United States Patent Application Publication US 2021/0260178 A1 - sequence listing, part 24

SEQ ID NO: 39495 - RNA, 1785 nt, Artificial Sequence
  mRNA product Design b-4 (A100) comprising derived and/or modified sequence from LASV(803213;Clade II)__AAF86703__GPCmut11 (opt5)
aggagagucccgcagucggcguccagcggcucugcuuguucgugugugugucguugcaggccuuauucaagcuuaccaugggccagaucauuaccuucuuucaagaggugccccacgucaucgaagagguuaugaacauugugcugaucgcccucagccugcuugcuauucugaaggggaucuacaauguggccacaugcggacucuucggccugaucuccuuucuucugcucugugggagaucuugcagcgucacguauaaaggaguguacgaacugcagacccuggagcucaacauggcgaaucugaacaugacaaugccucuuuccuguaccaagaauaacucucaucacuauauuaugguuggcaaugaaacagggcuggagcucacccugacaaacaccagcaucauuaaucauaaauucugcaaccuuuccgacgcucacaagaaaaaucuguacgaucaugcccucaugucuaucauuagcacguuucaccuguccaucccgaacuucaaucaguaugaggccaugagcugugacuuuaacggaggcaagauuucugugcaguacaaucugucccacagcuucgcugucgaugccgcuaaccauugcggcaccaucgccaacggggugcuccaaacauuuaugcggauggcguggggaggcucuuauaucgcccuggacuccgggaagggaaauugggauuguauuaugaccagcuaccaguaccuuaucauucagaacacaaccugggaagaccacugccaguucucucgccccuccccuaucggcuaucuggggcuccugagccaaagaacgcgggauauuuacaucucccgcagacuucugggaacauuuaccuggacacucucugacagcgagggcaaugaagcucccggcggguauugucugacccgguggaugcugaucgaggccgagcucaaaugcuucggaaacaccgcuguugccaaguguaaugaaaaacaugaugaggaauuuugcgacaugcugcgccuuuucgauuucaacaagcaggcgauuaaaagacugaagacagaggcccagauguccauccagcucauuaauaaggcugugaacgcccugaucaaugaccaacuuauuaugaaaaaccaucugcgggauaucaugggcaucccuuacugcaauuauagccgcuacuguuaucucaaccacacggucaccgggaagacaucucugcccagaugcugucugguguccaauggaagcuaccucaacgaaacccacuuuucugacgacauugagcagcaggcugauaauaugaucacagagaugcugcaaaaagaauacauggaccggcagggcaagaccccucuugggcugguggaucucuucgucuuuagcacguccuucuaucugauuucuaucuuucugcaccuuguuaaaauuccgacacaucgccacaucgugggaaagcccugcccuaaaccccauagacucaaccacaugggcauuuguagcugcggccuguacaagcacccuggggugcccgucaaguggaaacggugaggacuaguaauaaggaaacuguaugaaugucugugggcaggaagugaagagauccuucuguaaagguuuuuggaauuaugucugcugaauaauaaacuuuuuugaaauaauaaaucugguagaaaaaugagaucuaaaaaaaaaaaaaaaaaaaaaaaaaaaaaaaaaaaaaaaaaaaaaaaaaaaaaaaaaaaaaaaaaaaaaaaaaaaaaaaaaaaaaaaaaaaaaaaaaaaa

SEQ ID NO: 39496 - RNA, 1785 nt, Artificial Sequence
  mRNA product Design b-4 (A100) comprising derived and/or modified sequence from LASV(GA391;Clade III)__CAA36645__GPCmut11 (opt5)
aggagagucccgcagucggcguccagcggcucugcuuguucgugugugugucguugcaggccuuauucaagcuuaccaugggccagaucgugaccuucuuucaagaggucccccacguuauugaagaggugaugaacaucgugcugauugcccucagcauccuggcuauucuuaaggggcuguacaaugucgccacaugcggacucaucggccuggugacguuccuucugcucuccgggagaucuuguagccugaucuauaaaggaaccuacgaacugcagacacucgagcugaacauggaaacccuuaauaugacaaugccucuguccugcaccaagaacaauucucaucacuauauucggguuggcaacgagacagggcucgagcugacccuuacgaauaccagcauccugaaccauaaauuuuguaaucucuccgacgcgcacaagcgcaaccuguacgaucauucucugaugagcauuaucuccacauuccaccucagcauuccgaauuuuaaccaguaugaagcuaugucuugcgacuucaauggaggcaaaaucaccgugcaguacaaccugucccacagcuuugccgucgaugccgcuggccauugugggacacuugccaauggagugcugcaaaccuucaugagaauggcuuggggcgggucuuauauugcccucgacuccggacggggcaacugggauugcaucaugacgagcuaccaguaccugaucauucagaacacaaccugggacgaucacugucaguuuucucgccccuccccuaucggguaucuuggacugcucagccaaagaacacgggacauuuacaucucccgcagacugcugggcaccuucaccuggacacucucugauagcgagggcaaugaaacgcccgggggauauugccugacccgguggaugcuuauugaggcggagcugaaguguuuuggcaacacagccguugcuaagugcaaugaaaaacaugacgaggaguucugugauaugcuccgccuguuugacuucaacaagcaggccaucagacggcuuaaaaccgaagcucagauguccauccagcugauuaauaaggccgugaacgcgcucaucaaugaucaacugauuaugaaaaaccaucugcgcgacaucauggggauuccuuacugcaauuauagcagauacugcuaucucaaccacacaucuaccggaaagacgucccugccccgguguugccuuaucagcaauggcucuuaccugaacgaaacaaaguucagcgacgauaucgagcagcaggccgacaauaugauuaccgagaugcuccaaaaagaauacaucgaucgccaggggaagaccccucugggacuggucgaccuuuuuguguucuccacaucuuuuuaucucauuagcaucuuccugcaccuggugaaaauuccgacccacagacauaucgucggcaagcccuguccuaaaccccaccggcucaaccauaugggcauuugcuccugugggcuguacaagcagccuggaguucccgugagauggaaacgcugaggacuaguaauaaggaaacuguaugaaugucugugggcaggaagugaagagauccuucuguaaagguuuuuggaauuaugucugcugaauaauaaacuuuuuugaaauaauaaaucugguagaaaaaugagaucuaaaaaaaaaaaaaaaaaaaaaaaaaaaaaaaaaaaaaaaaaaaaaaaaaaaaaaaaaaaaaaaaaaaaaaaaaaaaaaaaaaaaaaaaaaaaaaaaaaaa

SEQ ID NO: 39497 - RNA, 1788 nt, Artificial Sequence
  mRNA product Design b-4 (A100) comprising derived and/or modified sequence from LASV(AV;Clade V)__CCA30314__GPCmut11 (opt5)
aggagagucccgcagucggcguccagcggcucugcuuguucgugugugugucguugcaggccuuauucaagcuuaccaugggccagaucgugaccuucuuucaagaggucccccacguuauugaagaggugaugaacaucgugcugauugcccucagcauccuggcuguccuuaaggggcuguacaauauugccacaugcggacucaucggccugaucacguuccuucugcucugugggagauccugcucuagcaaccuguauaaaggaguguacgaacugcagucccucgaccugaauauggagacccuuaacaugacaaugccucugucuuguaccaagaauaacagccaucacuauauucggguuggcaaugauacagggcucgaacugacccuuacaaacaccuccauccugaaucauaaauuuugcaaccucucugacgcgcacaagaaagaucuguacgaccaugcucugaugagcauuaucuccacguuccaccucagcauuccgaauuuuaaccaguaugaggccaugucuugugauuucaauggaggcaagaucuccgugcaguacaaccugagccacucuuaugccauugacgcugccaaucauugcggcaccgucgcuaacgggauccuucaaacauuuaugcgcauggccuggggaggcuccuacaucgcgcuggauagcgggagaggaaacugggacuguauuaugaccucuuaccaguaucucaucauucagaauacaaccugggagaaccacugccaguucucccggcccagcccuaucggcuaccuggggcuucugucccaacgcacgagagauauuuauaucucucggcgccuccugggaacauuuaccuggacacugagcgacuccgaaggcaaugccacccccggcggguacugucucaccagauggaugcugaucgaggcugaacuuaagugcuucggaaacacagccguggcuaaauguaaugagaagcaugaugaggaauuuugcgacaugcugcgccucuucgauuuuaacaaacaggccauuagccggcugaagucugaggcgcagauguccauccagcuuauuaauaaagccguuaacgcucugaucaaugaccaacucauuaugaagaaccaccugagagacaucaugggcaucccuuauugcaauuacagcaaguauuguuaccugaaccacacgauuaccgggaaaacaucucuccccaagugcugucuggugagcaauggauccuaccuuaacgaaacccauuucucugaugacaucgagcagcaggccgauaauaugauuacagaaaugcugcaaaaagaguauauggagcggcagggcaagaccccucucgggcuggucgaccuguucguguuuagcacguccuucuaccuuaucagcauuuuucuccgccuggugaaaaucccgacacacagacauauugucggaaagcccugcccuaaaccccaccggcugaaccauaugggcaucuguucuugcggccucuauaagcagccugggguucccgugcgcuggaagagaugaggacuaguaauaaggaaacuguaugaaugucugugggcaggaagugaagagauccuucuguaaagguuuuuggaauuaugucugcugaauaauaaacuuuuuugaaauaauaaaucugguagaaaaaugagaucuaaaaaaaaaaaaaaaaaaaaaaaaaaaaaaaaaaaaaaaaaaaaaaaaaaaaaaaaaaaaaaaaaaaaaaaaaaaaaaaaaaaaaaaaaaaaaaaaaaaa

SEQ ID NO: 39498 - RNA, 1785 nt, Artificial Sequence
  mRNA product Design b-4 (A100) comprising derived and/or modified sequence from LASV(Togo/2016/7082;Clade VI)__AMR44577__GPCmut11 (opt5)
aggagagucccgcagucggcguccagcggcucugcuuguucgugugugugucguugcaggccuuauucaagcuuaccaugggccagaucauuaccuucuuucaagaggugccccacgucaucgaagagguuaugaacauugugcugaucgcccucagccugcuugcuauucugaaggggguguacaaugucgccacaugcggaaucaucggccucgugacguuccuguuucuuugugggagauccugcucucugauuuauaaaggaagcuacgaacuccagacccuggagcugaacauggaaacacucaauaugaccaugccucuguccuguacaaagaacucuagccaucacuauauccggguuggcaaugagaccgggcuugagcugacacucaccaacacguccauuaucaaucauaaauucugcaaccugucugacgcgcacaagcgcaaucuuuacgaucaugcucugaugagcauucucuccaccuuucaccugagcaucccgaacuucaaucaguaugaagccaugucuugugacuuuaacggaggcaaaauuuccgugcaguacaaucugagccacgccuaugcugucgaugccgcugagcauugcggcacaguggccaacgggguucuccaaaccuucaugagaauggcguggggaggcucuuacaucgcccuggacuccgggcggggaaauugggauuguaucaugacaagcuaccaguaucuuauuauccagaacaccacgugggaagaccacugccaguuuucucgccccuccccuauuggcuaccuggggcuccugagccaaagaacacgggauaucuauauuucccgcagacuucugggaaccuucacauggacccucucugacagcgagggcaacgagacccccggcggguacugucugacacgguggaugcugaucgaagcugagcucaagugcuuuggaaauacggccguggcuaaguguaacgaaaaacaugaugaggaguucugcgacaugcugcgccuuuuugauuucaauaagcaggccauccagagacugaaauccgaagcgcagaugagcauucaacucaucaacaaggccgucaaugcucugauuaacgaccagcuuaucaugaaaaaucaucugcgggauaugaugggcauuccuuauugcaacuacucuaaguauuguuaccucaaucacaccuccagcgggcgcacaucucugcccaagugcugucuggugagcaacggauccuaccucaaugagacccacuucucugacgacaucgaacagcaagccgauaacaugaucacagagaugcugcagaaagaauauauugacagacagggcaagaccccucuugggcugguggaucucuuugucuucagcacguccuuuuaccugaucagcauuuuccugcaccuuaucaaaauuccgacacaucggcacaucguuggaaagcccugcccuaaaccccaucgccucaaucacaugggcauuuguucuugcggccuguauaagcagccuggggugcccaccagauggaaacggugaggacuaguaauaaggaaacuguaugaaugucugugggcaggaagugaagagauccuucuguaaagguuuuuggaauuaugucugcugaauaauaaacuuuuuugaaauaauaaaucugguagaaaaaugagaucuaaaaaaaaaaaaaaaaaaaaaaaaaaaaaaaaaaaaaaaaaaaaaaaaaaaaaaaaaaaaaaaaaaaaaaaaaaaaaaaaaaaaaaaaaaaaaaaaaaaa

SEQ ID NO: 39499 - RNA, 1785 nt, Artificial Sequence
  mRNA product Design b-4 (A100) comprising derived and/or modified sequence from LASV(KAK-428;Clade n.d. (VII))__ANH09740__GPCmut11 (opt5)
aggagagucccgcagucggcguccagcggcucugcuuguucgugugugugucguugcaggccuuauucaagcuuaccaugggccagaucgugaccuucuuucaagaggucccccacguuauugaagaggugaugaacaucgugcugauugcccucagccugcuugcuauccugaaggggcucuacaauuucgccacaugcggagucauuggccugaucacguuucuucugcucugugggagauccugcucugcgaccuauaaaggacaguacgaacugcagacacuggagcucaacauggaaagccugaauaugaccaugccucuuuccuguacaaagaacaauucucaucacuauauccgggcuggcaacaauaccgggcuggagcucacacugaccaacacgagcauuaucucccauaaauucugcaaucuuucugacgcccacaagaaaaaccuguacgaucauacccucaugagcauuaucacaaccuuucaccuguccauuccgaauuucaaccaguaugaggccaugagcugugacuuuaauggaggcaagaucucuauucaauacaaccugucccacagcuaugcuggcgaugccgcucagcauugcgggacaguggccaauggaguucuccagaccuucaugcgcauggcguggggcgggucuuaccuggcccuugacuccggaagacggggcugggauuguaucaucagcucuuaccaguaucugauuauccaaaacacgacaugggacgaucacugccaguuuucccgccccagcccuauuggguaccucggauucgugucccagaagaccagagacaucuauauuucucggcgccugcuuggcacauuuaccuggacccugagcgauuccgaaggccaugacaugcccgggggauacugucucacaagauggaugcugaucgaggcugaucugaaaugcuucggcaacacggccgucgcuaaguguaaugaaaaacacgacgaggaguuuugcgauauguggcgccucuucgacuucaacaagcaggccauccaacggcugaaagcggaagcccagaugaauauucagcuuaucaacaaggcugugaaugcccugauuaacgaccaacucaugaugaagaaucaccugagagauaucauggggauuccuuauugcaacuacagcaaauuuuguuaucuuaauaacaccacaaccggacggacaucucugccccgcugcugucucaucuccaauggcagcuaccugaacgagacccauuucucugacgauaucgaacagcaggcugacaauaugauuacggagaugcugcagaaggaauacauggauagacaagggaaaacaccucucggacugguugaccuuuuuguguucagcaccuccuuuuaucugaucaccauuuuccuccaccuggucaagaucccgacacaucggcacauugugggcaaacccugcccuaagccccaucgccugaaccacaugggcaucuguucuugcgggcuuuacaaacagccuggagugcccgucagauggaagcggugaggacuaguaauaaggaaacuguaugaaugucugugggcaggaagugaagagauccuucuguaaagguuuuuggaauuaugucugcugaauaauaaacuuuuuugaaauaauaaaucugguagaaaaaugagaucuaaaaaaaaaaaaaaaaaaaaaaaaaaaaaaaaaaaaaaaaaaaaaaaaaaaaaaaaaaaaaaaaaaaaaaaaaaaaaaaaaaaaaaaaaaaaaaaaaaaa

SEQ ID NO: 39500 - RNA, 1785 nt, Artificial Sequence; identical to SEQ ID NO: 39494
  mRNA product Design b-4 (A100) comprising derived and/or modified sequence from LASV(Pinneo-NIG-1969;Clade I)__AIT17836__GPCmut11 (opt5)

SEQ ID NO: 39501 - RNA, 1785 nt, Artificial Sequence
  mRNA product Design b-4 (A100) comprising derived and/or modified sequence from LASV(ISTH0009-NIG-2011;Clade II)__AIT17404__GPCmut11 (opt5)
aggagagucccgcagucggcguccagcggcucugcuuguucgugugugugucguugcaggccuuauucaagcuuaccaugggccagaucauuaccuucuuucaagaggugccccacgucaucgaagagguuaugaacauugugcugaucgcccucagccugcuugcuauucugaaggggaucuacaauguggccacaugcggacucuucggccuggucuccuuucuucugcucugugggagaucuugcagcacgaccuauaaaggaguguacgaacugcagacacuggagcucgacauggcgucccugaacaugaccaugccucuuucuuguacaaagaauaacagccaucacuauaucaugguuggcaaugaaaccgggcuggagcucacacugaccaacacguccauuaucaaucauaaauucugcaaccuuucugaugcucacaagaaaaaucuguacgaccaugcccucaugagcauuaucuccaccuuucaccugagcauuccgaacuucaaucaguaugaggccaugucuugugauuuuaacggaggcaagaucuccgugcaguacaaucugagccacgcuuaugccgucgacgcugccaaccauugcggcacaauugcgaauggggugcuccaaaccuucaugcggauggccuggggaggcucuuacaucgcucuggauuccgggaagggaagcugggacuguaucaugacaucuuaccaguaucuuauuauccagaacaccacgugggaagaucacugccaguuuucccgccccagcccuauuggcuaccuggggcuccugucccaaagaacacgggacaucuauauuucucgcagacuucugggaaccuucacauggacccucagcgauuccgagggcaacgaaacccccggcggguacugucugacacgguggaugcugaucgaggccgagcucaaaugcuuuggaaauacggcuguugccaaguguaacgaaaaacaugacgaggaguucugcgauaugcugcgccuuuuugacuucaauaagcaggcgaucagacggcugaaaaccgaagcccagaugagcauucagcucaucaacaaggcugugaaugcccugauuaacgaucaacuuaucaugaagaaucaucugcgcgacauuaugggcaucccuuauugcaacuacucuaaauauuguuaccucaaucacacagucaccgggaagacaucccugcccagaugcugucuggugagcaacggaucuuaccucaaugaaacccacuucagcgacgauaucgagcagcaggcugacaacaugauuacggagcugcuucaaaaagaauauauggaucggcagggcaagacaccucuggggcucguggaccuguuugucuucuccaccucuuuuuaccugaucagcauuuuccuucaccucaucaaaauuccgacccaucgccacaucacaggaaagcccugcccuaaaccccauagacugaaucacaugggcauuuguuccugcggccuguauaagcacccugggguucccgugaaguggaaacggugaggacuaguaauaaggaaacuguaugaaugucugugggcaggaagugaagagauccuucuguaaagguuuuuggaauuaugucugcugaauaauaaacuuuuuugaaauaauaaaucugguagaaaaaugagaucuaaaaaaaaaaaaaaaaaaaaaaaaaaaaaaaaaaaaaaaaaaaaaaaaaaaaaaaaaaaaaaaaaaaaaaaaaaaaaaaaaaaaaaaaaaaaaaaaaaaa

SEQ ID NO: 39502 - RNA, 1785 nt, Artificial Sequence
  mRNA product Design b-4 (A100) comprising derived and/or modified sequence from LASV(ISTH2010-NIG-2012;Clade II)__AIT17482__GPCmut11 (opt5)
aggagagucccgcagucggcguccagcggcucugcuuguucgugugugugucguugcaggccuuauucaagcuuaccaugggccagaucauuaccuucuuucaagaggugccccacgucaucgaagagguuaugaacauugugcugaucgcccucagccugcuugcuauucugaaggggaucuacaauguggccacaugcggacucuucggccuggucuccuuucuucugcucugugggagaucuugcagcacgaccuauaaaggaguguacgaacugcagacacuggagcucgacauggcgucccugaacaugaccaugccucuuucuuguacaaagaauaacagccaucacuauaucaugguuggcaaugaaaccgggcuggagcucacacugaccaacacguccauuaucaaucauaaauucugcaaccuuucugaugcucacaagaaaaaucuguacgaccaugcccucaugagcauuaucuccaccuuucaccugagcauuccgaacuucaaucaguaugaggccaugucuugugauuuuaacggaggcaagaucuccgugcaguacaaucugagccacgcuuaugccgucgacgcugccaaccauugcggcacaauugcgaauggggugcuccaaaccuucaugcggauggccuggggaggcucuuacaucgcucuggauuccgggaagggaagcugggacuguaucaugacaucuuaccaguaucuuauuauccagaacauuaccugggaagaucacugccaguuuucccgccccagcccuaucggcuaccuggggcuccugucccaaagaacgcgggacauuuauaucucucgcagacuucugggaacauucaccuggacacucagcgauuccgagggcaacgaaacccccggcggguacugucugacccgguggaugcugaucgaggccgagcucaaaugcuuuggaaauacagcuguugccaaguguaacgaaaaacaugacgaggaguucugcgauaugcugcgccuuuuugacuucaauaagcaggcgauuagacggcugaaaacggaagcccagaugagcauccagcucauuaacaaggcugugaaugcccugaucaacgaucaacuuauuaugaagaaucaucugcgcgacaucaugggcaucccuuauugcaacuacucuaaauauuguuaccucaaucacaccgucacagggaagaccucccugcccagaugcugucuggugagcaacggaucuuaccucaaugaaacacacuucagcgacgauauugagcagcaggcugacaacaugaucaccgagcugcuucaaaaagaauauauugaucggcagggcaagacgccucuggggcucguggaccuguuugucuucuccacaucuuuuuaccugaucagcauuuuccuucaccucguuaaaaucccgacccaucgccacguggugggaaagcccugcccuaaaccccauagacugaaucacaugggcauuuguuccugcggccuguauaagcacccugggguccccgugaaguggaaacggugaggacuaguaauaaggaaacuguaugaaugucugugggcaggaagugaagagauccuucuguaaagguuuuuggaauuaugucugcugaauaauaaacuuuuuugaaauaauaaaucugguagaaaaaugagaucuaaaaaaaaaaaaaaaaaaaaaaaaaaaaaaaaaaaaaaaaaaaaaaaaaaaaaaaaaaaaaaaaaaaaaaaaaaaaaaaaaaaaaaaaaaaaaaaaaaaa

SEQ ID NO: 39503 - RNA, 1785 nt, Artificial Sequence
  mRNA product Design b-4 (A100) comprising derived and/or modified sequence from LASV(Lassa virus/H.sapiens-wt/NGA/2015/ISTH_0543;Clade II)__AVO03639__GPCmut11 (opt5)
aggagagucccgcagucggcguccagcggcucugcuuguucgugugugugucguugcaggccuuauucaagcuuaccaugggccagaucauuaccuucuuucaagaggugccccacgucaucgaagagguuaugaacauugugcugaucgcccucagccugcuugcuauucugaaggggaucuacaauguggccacaugcggacucuucggccuggucuccuuucuucugcucugugggagaucuugcagcacgaccuauaaaggaguguacgaacugcagacacuggagcucgacauggcgaaccugaauaugaccaugccucuuuccuguacaaagaacaauucucaucacuauaucaugguuggcaacgaaaccgggcuggagcucacacugaccaauacgagcauuaucaaccauaaauucugcaaucuuuccgaugcucacaagaaaaaccuguacgaccaugcccucaugucuauuaucagcaccuuucaccuguccauuccgaauuucaaccaguaugaggccaugagcugugauuuuaauggaggcaagaucucugugcaguacaaccugucccacacauaugcugucgacgccgcuaaucauugcggcaccauugccaacggggugcuccaaacauucaugcggauggcguggggaggcagcuacaucgcccuggauucugggaagggauccugggacuguaucaugaccagcuaccaguaucuuguuauucagaacacgacaugggaagaucacugccaguuuucucgccccuccccuaucggcuaccuggggcuccugagccaaagaacccgggacauuuauaucucccgcagacuucugggaacauucaccuggacccucucugauagcgagggcaaugaaacacccggcggguacugucugacgcgguggaugcugauugaggcugagcucaaaugcuuuggaaacaccgccguggcuaaguguaaugaaaaacaugacgaggaguucugcgauaugcugcgccuuuuugacuucaacaagcaggccaucagacggcugaaaacagaagcgcagauguccauccagcucauuaauaaggccgucaacgcucugaucaaugaucaacuuauuaugaagaaccaucugcgcgacaucaugggcauuccuuauugcaauuacagcaaauauuguuaccucaaccacaccgugacagggaagaccucucugcccagaugcugucugguguccaauggaagcuaccucaacgaaacgcacuucucugacgauaucgagcagcaggccgacaauaugaucacagagcugcuucaaaaagaauauauugaucggcagggcaagaccccucuggggcucgucgaccuguuuguuuucagcaccuccuuuuaccugaucucuauuuuccuucaccucgugaaaaucccgacacaucgccacauuaccggaaagcccugcccuaaaccccauagacugaaccacaugggcaucuguagcugcggccuguauaagcacccuggggugcccgucaaguggaaacggugaggacuaguaauaaggaaacuguaugaaugucugugggcaggaagugaagagauccuucuguaaagguuuuuggaauuaugucugcugaauaauaaacuuuuuugaaauaauaaaucugguagaaaaaugagaucuaaaaaaaaaaaaaaaaaaaaaaaaaaaaaaaaaaaaaaaaaaaaaaaaaaaaaaaaaaaaaaaaaaaaaaaaaaaaaaaaaaaaaaaaaaaaaaaaaaaa

SEQ ID NO: 39504 - RNA, 1785 nt, Artificial Sequence
  mRNA product Design b-4 (A100) comprising derived and/or modified sequence from LASV(Lassa virus/H.sapiens-wt/NGA/2016/ISTH_0009;Clade II)__AVO03571__GPCmut11 (opt5)
aggagagucccgcagucggcguccagcggcucugcuuguucgugugugugucguugcaggccuuauucaagcuuaccaugggccagaucauuaccuucuuucaagaggugccccacgucaucgaagagguuaugaacauugugcugaucgcccucagccugcuugcuauucugaaggggaucuacaauguggccacaugcggacuccugggccuugucuccuuccugcuccugugugggagaucuugcagcacgaccuauaaaggaguguacgaacugcagacacucgagcuggacauggcgucccuuaacaugaccaugccucugucuuguacaaagaauaacagccaucacuauaucaugguuggcaaugaaaccgggcucgagcugacacuuaccaacacguccauuaucaaucauaaauuuugcaaccugucugaugcucacaagaaaaaucucuacgaccaugcccugaugagcauuaucuccaccuuccaccugagcauuccgaacuuuaaucaguaugaggccaugucuugugauuucaacggaggccggaucuccgugcaguacaaucucagccacucuuaugcugucgacgccgcuaaccauugcggcacaauugccaauggggugcugcaaaccuuuaugcgcauggcguggggaggcuccuacaucgcccuugauagcgggaagggaucuugggacuguaucaugacauccuaccaguaucugauuauccagaacaccacgugggaagaucacugccaguucagcagacccuccccuauuggcuaccucgggcugcuuucucaacggacacgcgacaucuauauuagcagacggcugcucggaaccuuuacauggacccuguccgauagcgagggcaacgaaacccccggcggguacugucugacacgcuggaugcucaucgaggcugagcugaagugcuucggaaauacggccguugcuaaauguaacgaaaagcaugacgaggaauuuugcgauaugcuuagacuguucgacuuuaauaaacaggccauccggcgccucaagaccgaggcgcagaugucuauucagcugaucaacaaagccgugaaugcucuuauuaacgaucaacugaucaugaagaaucaccucagagacauuaugggcaucccuuauugcaacuacuccaaguauuguuaccugaaucacacagucaccgggaaaacaagccugccccggugcugucucgugucuaacggaagcuaccugaaugaaacccauuucuccgacgauaucgagcagcaggccgacaacaugauuacggagcuucugcaaaaggaauauaucgaucgccagggcaaaacaccucucgggcugguggaccuguucgucuuuucuaccagcuucuaccuuauuuccaucuuucuccaccugguuaagauuccgacccauagacacaucacaggaaaacccugcccuaagccccaucggcugaaucacaugggcauuuguagcugcggccucuauaaccacccuggggugcccgugaaauggaagcgcugaggacuaguaauaaggaaacuguaugaaugucugugggcaggaagugaagagauccuucuguaaagguuuuuggaauuaugucugcugaauaauaaacuuuuuugaaauaauaaaucugguagaaaaaugagaucuaaaaaaaaaaaaaaaaaaaaaaaaaaaaaaaaaaaaaaaaaaaaaaaaaaaaaaaaaaaaaaaaaaaaaaaaaaaaaaaaaaaaaaaaaaaaaaaaaaaa

SEQ ID NO: 39505 - RNA, 1785 nt, Artificial Sequence
  mRNA product Design b-4 (A100) comprising derived and/or modified sequence from LASV(Lassa virus/H.sapiens-wt/NGA/2016/ISTH_0017;Clade II)__AVO03567__GPCmut11 (opt5)
aggagagucccgcagucggcguccagcggcucugcuuguucgugugugugucguugcaggccuuauucaagcuuaccaugggccagaucauuaccuucuuucaagaggugccccacgucaucgaagagguuaugaacauugugcugaucgcccucagccugcuugcuauucugaaggggaucuacaauguggccacaugcggacucuucggccuggucuccuuucuucugcucugugggagaucuugcagcacgaccuauaaaggaguguacgaacugcagacacuggagcucgacauggcgucccugaacaugaccaugccucuuucuuguacaaagaauaacagccaucacuauaucaugguuggcaaugaaaccgggcuggagcucacacugaccaacacguccauuaucaaucauaaauucugcaaccuuucugaugcucacaagaaaaaucuguacgaccaugcccucaugagcauuaucuccaccuuucaccugagcauuccgaacuucaaucaguaugaggccaugucuugugauuuuaacggaggcaagaucuccgugcaguacaaucugagccacacauaugcuauugacgccgcuaaccauugcggcaccaucgccaaugggguccuccaaacauucaugcggauggcguggggaggcucuuacaucgcccuggauuccgggaagggaagcugggacuguauuaugaccucuuaccaguaucuuaucauucagaacacgacaugggaagaucacugccaguuuucccgccccagcccuaucggcuaccuggggcuccugucccaaagaacccgggacauuuauaucucucgcagacuucugggaacauucaccuggacccucagcgauuccgagggcaacgaaacacccggcggguacugucugacgcgguggaugcugaucgaggcugagcucaaaugcuuuggaaauaccgccguggcuaaguguaacgaaaaacaugacgaggaguucugcgauaugcugcgccuuuuugacuucaauaagcaggccauuagacggcugaaaacagaagcgcagaugagcauccagcucauuaacaaggccguuaaugcucugaucaacgaucaacuuauuaugaagaaucaucugcgcgacaucaugggcaucccuuauugcaacuacucuaaauauuguuaccucaaucacaccgugacagggaagaccucccugcccagaugcugucuggucagcaacggaucuuaccucaaugaaacgcacuucagcgacgauauugagcagcaggccgacaacaugaucacagagcugcuucaaaaagaauauauggaucggcagggcaagaccccucuggggcucguggaccuguuuguguucuccaccucuuuuuaccugauuagcaucuuccuucaccucguccgcauuccgacacauagacacguuaucggaaaacccugcccuaagccccaucggcugaaucacaugggcauuuguuccugcggccuguauaaacacccuggggugcccgugaaguggaagcgcugaggacuaguaauaaggaaacuguaugaaugucugugggcaggaagugaagagauccuucuguaaagguuuuuggaauuaugucugcugaauaauaaacuuuuuugaaauaauaaaucugguagaaaaaugagaucuaaaaaaaaaaaaaaaaaaaaaaaaaaaaaaaaaaaaaaaaaaaaaaaaaaaaaaaaaaaaaaaaaaaaaaaaaaaaaaaaaaaaaaaaaaaaaaaaaaaa

SEQ ID NO: 39506 - RNA, 1785 nt, Artificial Sequence
  mRNA product Design b-4 (A100) comprising derived and/or modified sequence from LASV(Lassa virus/H.sapiens-wt/NGA/2018/ISTH_0959;Clade II)__AVV65099__GPCmut11 (opt5)
aggagagucccgcagucggcguccagcggcucugcuuguucgugugugugucguugcaggccuuauucaagcuuaccaugggccagaucauuaccuucuuucaagaggugccccacgucaucgaagagguuaugaacauugugcugaucgcccucagccugcuugcuauucugaaggggaucuacaauguggucacaugcggacucuucggccugguguccuuucuucugcucugugggagaucuugcagcacgaccuauaaaggaguuuacgaacugcagacacuggagcucgacauggccucccugaacaugaccaugccucuuucuuguacaaagaauaacagccaucacuauaucauggugggcaaugaaaccgggcuggagcucacacugaccaacacguccauuaucaaucauaaauucugcaaccuuucugaugcgcacaagaaaaaucuguacgaccaugcucucaugagcauuaucuccaccuuucaccugagcauuccgaacuucaaucaguaugaggccaugucuugugauuuuaacggaggcaagaucuccguccaguacaaucugagccacgccuaugcuauugacgccgcuaaccauugcggcacaaucgccaauggggugcuccaaaccuucaugcggauggcguggggaggcucuuacaucgcccuggauuccgggaagggaagcugggacuguauuaugacaucuuaccaguaucuuaucauucagaacaccacgugggaagaucacugccaguuuucccgccccagcccuaucggcuaccuggggcuccugucccaaagaacacgggacauuuauaucucucgcagacuucugggaaccuucacauggacccucagcgauuccgagggcaacgaaacccccggcggguacugucugacacgguggaugcugaucgaggcugagcucaaaugcuuuggaaauacggccguugcuaaguguaacgaaaaacaugacgaggaguucugcgauaugcugcgccuuuuugacuucaauaagcaggccauuagacggcugaaaaccgaagcgcagaugagcauccagcucauuaacaaggccgugaaugcucugaucaacgaucaacuuauuaugaagaaucaucugcgcgacaucaugggcaucccuuauugcaacuacucuaaauauuguuaccucaaucacacagucaccgggaagacaucccugcccagaugcugucuggugagcaacggaucuuaccucaaugaaacccacuucagcgacgauauugagcagcaggccgacaacaugaucacggagcugcuucaaaaagaauauauugaucggcagggcaagacaccucuggggcucguggaccuguuugucuucuccaccucuuuuuaccugaucagcauuuuccuucaccucguuaaaaucccgacccaucgccacgugauuggaaagcccugcccuaaaccccauagacugaaucacaugggcaucuguuccugcggccuguauaagcacccuggggugcccgucaaguggaaacggugaggacuaguaauaaggaaacuguaugaaugucugugggcaggaagugaagagauccuucuguaaagguuuuuggaauuaugucugcugaauaauaaacuuuuuugaaauaauaaaucugguagaaaaaugagaucuaaaaaaaaaaaaaaaaaaaaaaaaaaaaaaaaaaaaaaaaaaaaaaaaaaaaaaaaaaaaaaaaaaaaaaaaaaaaaaaaaaaaaaaaaaaaaaaaaaaa

SEQ ID NO: 39507 - RNA, 1785 nt, Artificial Sequence
  mRNA product Design b-4 (A100) comprising derived and/or modified sequence from LASV(LASV003-NIG-2008;Clade II)__AIT17580__GPCmut11 (opt5)
aggagagucccgcagucggcguccagcggcucugcuuguucgugugugugucguugcaggccuuauucaagcuuaccaugggccagaucauuaccuucuuucaagaggugccccacgucaucgaagagguuaugaacauugugcugaucgcccucagccugcuugcuauucugaaggggaucuacaauguggccacaugcggacucuucggccuggucuccuuucuucugcucugugggagaucuugcagcacgaccuauaaaggaguguacgaacugcagacacuggagcucgacauggcgucccugaacaugaccaugccucuuucuuguacaaagaauaacagccaucacuauaucaugguuggcaaugaaaccgggcuggagcucacacugaccaacacguccauuaucaaucauaaauucugcaaccuuucugaugcucacaagaaaaaucuguacgaccaugcccucaugagcauuaucuccaccuuucaccugagcauuccgaacuucaaucaguaugaggccaugucuugugauuuuaacggaggcaagaucuccgugcaguacaaucugagccacacauaugcugucgacgccgcuaaccauugcggcaccauugccaauggggugcuccaaacauucaugcggauggcguggggaggcucuuacaucgcccuggauuccgggaagggaagcugggacuguaucaugaccucuuaccaguaucuuauuauccagaacacgacaugggaagaucacugccaguuuucccgccccagcccuauuggcuaccuggggcuccugucccaaagaacccgggacaucuauauuucucgcagacuucugggaacauucaccuggacccucagcgauuccgagagcaacgaaacacccggcggcuacugucugacgcgguggaugcugaucgaggcugagcucaaaugcuuugggaauaccgccguugcuaaguguaacgaaaaacaugacgaggaguucugcgauaugcugcgccuuuuugacuucaauaagcaggccaucagacggcugaaagcggaagcccagaugucuauucagcucaucaacaaggcugugaaugcccugauuaacgaucaacuuaucaugaagaaucaucugcgcgacauuaugggaaucccuuauugcaacuacuccaaauauuguuaccucaaucacacagucaccggcagaacaagccugccccggugcugucuggugucuaacgggagcuaccucaaugaaacccacuucuccgacgauaucgagcagcaggcugacaacaugauuacggagcugcuucaaaaggaauauauggaucgccagggaaaaacaccucugggccucguggaccuguuugucuucucuaccagcuuuuaccugaucuccauuuuccuucaccucguuaagaucccgacccauagacacgugauugggaaacccugcccuaagccccaucggcugaaucacaugggaaucuguagcugcggccuguauaaacacccuggcgugcccgucaaguggaagcgcugaggacuaguaauaaggaaacuguaugaaugucugugggcaggaagugaagagauccuucuguaaagguuuuuggaauuaugucugcugaauaauaaacuuuuuugaaauaauaaaucugguagaaaaaugagaucuaaaaaaaaaaaaaaaaaaaaaaaaaaaaaaaaaaaaaaaaaaaaaaaaaaaaaaaaaaaaaaaaaaaaaaaaaaaaaaaaaaaaaaaaaaaaaaaaaaaa

SEQ ID NO: 39508 - RNA, 1785 nt, Artificial Sequence
  mRNA product Design b-4 (A100) comprising derived and/or modified sequence from LASV(LASV035-NIG-2009;Clade II)__AIT17588__GPCmut11 (opt5)
aggagagucccgcagucggcguccagcggcucugcuuguucgugugugugucguugcaggccuuauucaagcuuaccaugggccagaucauuaccuucuuucaagaggugccccacgucaucgaagagguuaugaacauugugcugaucgcccucagccugcuugcuauucugaaggggaucuacaauguggccacaugcggacucuucggccuggucuccuuucuucugcucugugggagaucuugcagcacgaccuauaaaggaguguacgaacugcagacacuggagcucgacauggcgucccugaacaugaccaugccucuuucuuguacaaagaauaacagccaucacuauaucaugguuggcaaugaaaccgggcuggagcucacacugaccaacacguccauuaucaaucauaaauucugcaaccuuucugaugcucacaagaaaaaucuguacgaccaugcccucaugagcauuaucuccaccuuucaccugagcauuccgaacuucaaucaguaugaggccaugucuugugauuuuaacggaggcaagaucuccgugcaguacaaucugagccacgcuuaugccgucgacgcugccaaccauugcggcacaauugcgaauggggugcuccaaaccuucaugcggauggccuggggaggcucuuacaucgcucuggauuccgggaagggaagcugggacuguaucaugacaucuuaccaguaucuuauuauccagaacaccacgugggaagaucacugccaguuuucccgccccagcccuauuggcuaccuggggcuccugucccaaagaacacgggacaucuauauuucucgcagacuucugggaaccuucacauggacccucagcgauuccgagggcaacgaaacccccggcggguacugucugacacgguggaugcugaucgaggccgagcucaaaugcuuuggaaauacggcuguugccaaguguaacgaaaaacaugacgaggaguucugcgauaugcugcgccuuuuugacuucaauaagcaggcgaucagacggcugaaagccgaagcucagaugagcauucagcucaucaacaaggccgugaaugcucugauuaacgaucaacuuaucaugaagaaucaucugcgcgacauuaugggcaucccuuauugcaacuacucuaaauauuguuaccucaaucacaccgucacagggaagaccucccugcccagaugcugucuggugagcaacggaucuuaccucaaugaaacacacuucagcgacgauaucgagcagcaggccgacaacaugauuaccgagcugcuucaaaaagaauauaucgaucggcagggcaagacgccucuggggcucguggaccuguuugucuucuccacaucuuuuuaccugauuagcaucuuccuucaccucguuaaaauuccgacccaucgccacgugaucggaaagcccugcccuaaaccccauagacugaaucacaugggcauuuguuccugcggccuguauaagcacccuggggugcccgucaaguggaaacggugaggacuaguaauaaggaaacuguaugaaugucugugggcaggaagugaagagauccuucuguaaagguuuuuggaauuaugucugcugaauaauaaacuuuuuugaaauaauaaaucugguagaaaaaugagaucuaaaaaaaaaaaaaaaaaaaaaaaaaaaaaaaaaaaaaaaaaaaaaaaaaaaaaaaaaaaaaaaaaaaaaaaaaaaaaaaaaaaaaaaaaaaaaaaaaaaa

SEQ ID NO: 39509 - RNA, 1785 nt, Artificial Sequence
  mRNA product Design b-4 (A100) comprising derived and/or modified sequence from LASV(LASV1000-NIG-2009;Clade II)__AIT17782__GPCmut11 (opt5)
aggagagucccgcagucggcguccagcggcucugcuuguucgugugugugucguugcaggccuuauucaagcuuaccaugggccagaucauuaccuucuuucaagaggugccccacgucaucgaagagguuaugaacauugugcugaucgcccucagccugcuugcuauucugaaggggaucuacaauguggccacaugcggacucuucggccuggucuccuuucuucugcucugugggagaucuugcagcacgaccuauaaaggaguguacgaacugcagacacuggagcucgacauggcgucccugaacaugaccaugccucuuucuuguacaaagaauaacagccaucacuauaucaugguuggcaaugaaaccgggcuggagcucacacugaccaacacguccauuaucaaucauaaauucugcaaccuuucugaugcucacaagaaaaaucuguacgaccaugcccucaugagcauuaucuccaccuuucaccugagcauuccgaacuucaaucaguaugaggccaugucuugugauuuuaacggaggcaagaucuccgugcaguacaaucugagccacacauaugcugucgacgccgcuaaccauugcggcaccauugccaauggggugcuccaaacauucaugcggauggcguggggaggcucuuacaucgcccuggauuccgggaagggaagcugggacuguaucaugaccucuuaccaguaucuuauuauccagaacacgacaugggaagaucacugccaguuuucccgccccagcccuauuggcuaccuggggcuccugucccaaagaacccgggacaucuauauuucucgcagacuucugggaacauucaccuggacccucagcgauuccgagggcaacgaaacacccggcggguacugucugacgcgguggaugcugaucgaggcugagcucaaaugcuuuggaaauaccgccguugcuaaguguaacgaaaaacaugacgaggaguucugcgauaugcugcgccuuuuugacuucaauaagcaggccaucaaaagacugaagacagaagcgcagaugagcauucagcucaucaacaaggccgugaaugcucugauuaacgaucaacuuaucaugaaaaaucaucugcgggacauuaugggcaucccuuauugcaacuacucuaaguauuguuaccucaaucacaccgucacagggaaaaccucccugccccgcugcugucuggugagcaacggaucuuaccucaaugaaacgcacuucagcgacgauaucgagcagcaggccgacaacaugauuacagagcugcuucaaaaggaauauaucgauagacagggcaaaaccccucuggggcucguggaccuguuugucuucuccaccucuuuuuaccugauuagcaucuuccuucaccucguuaagauuccgacacaucggcacguggugggaaaacccugcccuaagccccaucgccugaaucacaugggcaucuguuccugcggccuguauaagcacccugggguccccgugaaauggaagagaugaggacuaguaauaaggaaacuguaugaaugucugugggcaggaagugaagagauccuucuguaaagguuuuuggaauuaugucugcugaauaauaaacuuuuuugaaauaauaaaucugguagaaaaaugagaucuaaaaaaaaaaaaaaaaaaaaaaaaaaaaaaaaaaaaaaaaaaaaaaaaaaaaaaaaaaaaaaaaaaaaaaaaaaaaaaaaaaaaaaaaaaaaaaaaaaaa

SEQ ID NO: 39510 - RNA, 1785 nt, Artificial Sequence
  mRNA product Design b-4 (A100) comprising derived and/or modified sequence from LASV(LASV221-NIG-2010;Clade II)__AIT17624__GPCmut11 (opt5)
aggagagucccgcagucggcguccagcggcucugcuuguucgugugugugucguugcaggccuuauucaagcuuaccaugggccagaucauuaccuucuuucaagaggugccccacgucaucgaagagguuaugaacauugugcugaucgcccucagccugcuugcuauucugaaggggaucuacaauguggccacaugcggacucuucggccuggucuccuuucuucugcucugugggagaucuugcagcacgaccuauaaaggaguguacgaacugcagacacuggagcucgacauggcgucccugaacaugaccaugccucuuucuuguacaaagaauaacagccaucacuauaucaugguuggcaaugaaaccgggcuggagcucacacugaccaacacguccauuaucaaucauaaauucugcaaccuuucugaugcucacaagaaaaaucuguacgaccaugcccucaugagcauuaucuccaccuuucaccugagcauuccgaacuucaaucaguaugaggccaugucuugugauuuuaacggaggcaagaucuccgugcaguacaaucugagccacacauaugcuauugacgccgcuaaccauugcggcaccaucgccaaugggguccuccaaacauucaugcggauggcguggggaggcucuuacaucgcccuggauuccgggaagggaagcugggacuguauuaugaccucuuaccaguaucuuaucauucagaacacgacaugggaagaucacugccaguuuucccgccccagcccuaucggcuaccuggggcuccugucccaaagaacccgggacauuuauaucucucgcagacuucugggaacauucaccuggacccucagcgauuccgagggcaacgaaacacccggcggguacugucugacgcgguggaugcugaucgaggcugagcucaaaugcuuuggaaauaccgccguggcuaaguguaacgaaaaacaugacgaggaguucugcgauaugcugcgccuuuuugacuucaauaagcaggccauuagacggcugaaaacagaagcgcagaugagcauccagcucauuaacaaggccguuaaugcucugaucaacgaucaacuuauuaugaagaaucaucugcgcgacaucaugggcaucccuuauugcaacuacucuaaauauuguuaccucaaucacaccgugacagggaagaccucccugcccagaugcugucuggucagcaacggaucuuaccucaaugaaacgcacuucagcgacgauauugagcagcaggccgacaacaugaucacagagaugcugcaaaaagaauauauggaucggcagggcaagaccccucuugggcugguggaccucuuuguguucuccaccucuuuuuaccugauuagcaucuuccugcaccuugucaaaauuccgacacaucgccacguuaucggaaagcccugcccuaaaccccauagacucaaucacaugggcauuuguuccugcggccuguauaagcacccuggggugcccgugaaguggaaacggugaggacuaguaauaaggaaacuguaugaaugucugugggcaggaagugaagagauccuucuguaaagguuuuuggaauuaugucugcugaauaauaaacuuuuuugaaauaauaaaucugguagaaaaaugagaucuaaaaaaaaaaaaaaaaaaaaaaaaaaaaaaaaaaaaaaaaaaaaaaaaaaaaaaaaaaaaaaaaaaaaaaaaaaaaaaaaaaaaaaaaaaaaaaaaaaaa

SEQ ID NO: 39511 - RNA, 1785 nt, Artificial Sequence
  mRNA product Design b-4 (A100) comprising derived and/or modified sequence from LASV(LASV237-NIG-2010;Clade II)__AIT17638__GPCmut11 (opt5)
aggagagucccgcagucggcguccagcggcucugcuuguucgugugugugucguugcaggccuuauucaagcuuaccaugggccagaucauuaccuucuuucaagaggugccccacgucaucgaagagguuaugaacauugugcugaucgcccucagccugcuugcuauucugaaggggaucuacaauguggccacaugcggacucuucggccuggucuccuuucuucugcucugugggagaucuugcagcacgaccuauaaaggaguguacgaacugcagacacuggagcucgacauggcgucccugaacaugaccaugccucuuucuuguacaaagaauaacagccaucacuauaucaugguuggcaaugaaaccgggcuggagcucacacugaccaacacguccauuaucaaucauaaauucugcaaccuuucugaugcucacaagaaagaccuguacgaucaugcccucaugagcauuaucuccaccuuucaccugagcauuccgaauuucaaccaguaugaggccaugucuugugacuuuaauggaggcaagaucuccgugcaguacaaccugagccacacauaugcugucgaugccgcuaaucauugcggcaccauugccaacggggugcuccaaacauucaugcggauggcguggggaggcucuuacaucgcccuggacuccgggaagggaagcugggauuguaucaugaccucuuaccaguaucuuauuauccagaauacgacaugggaagaccacugccaguuuucccgccccagcccuauuggcuaccuggggcuccugucccaaagaacccgggauaucuauauuucucgcagacuucugggaacauucaccuggacccucagcgacuccgagggcaacgaaacacccggcggguacugucugacgcgguggaugcugaucgaggcugagcucaaaugcuuuggaaacaccgccguugcuaaguguaaugaaaaacaugaugaggaguucugcgacaugcugcgccuuuuugauuucaacaagcaggccaucagacggcugaaaacagaagcgcagaugagcauucagcucaucaauaaggccgugaacgcucugauuaaugaccaacuuaucaugaagaaccaucugcgcgacauuaugggcaucccuuauugcaauuacucuaaauauuguuaccucaaccacaccgucacagggaagaccucccugcccagaugcugucuggugagcaauggaucuuaccucaacgaaacgcacuucagcgaugacaucgagcagcaggccgauaauaugauuacagagcugcuucaaaaagaauauauggaccggcagggcaagaccccucuggggcucguggaucuguuugucuucuccaccucuuuuuaccugaucagcauuuuccuucaccucaucaaaauuccgacacaucgccacaucaccggaaagcccugcccuaaaccccauagacugaaccacaugggcauuuguuccugcggccuguauaagcacccugggguucccgugaaguggaaacggugaggacuaguaauaaggaaacuguaugaaugucugugggcaggaagugaagagauccuucuguaaagguuuuuggaauuaugucugcugaauaauaaacuuuuuugaaauaauaaaucugguagaaaaaugagaucuaaaaaaaaaaaaaaaaaaaaaaaaaaaaaaaaaaaaaaaaaaaaaaaaaaaaaaaaaaaaaaaaaaaaaaaaaaaaaaaaaaaaaaaaaaaaaaaaaaaa

SEQ ID NO: 39512 - RNA, 1785 nt, Artificial Sequence
  mRNA product Design b-4 (A100) comprising derived and/or modified sequence from LASV(LASV253-NIG-2011;Clade II)__AIT17670__GPCmut11 (opt5)
aggagagucccgcagucggcguccagcggcucugcuuguucgugugugugucguugcaggccuuauucaagcuuaccaugggccagaucauuaccuucuuucaagaggugccccacgucaucgaagagguuaugaacauugugcugaucgcccucagccugcuugcuauucugaaggggaucuacaauguggccacaugcggacucuucggccuggucuccuuucuucugcucugugggagaucuugcagcacgaccuauaaaggaguguacgaacugcagacacuggagcucgacauggcgucccugaacaugaccaugccucuuucuuguacaaagaauaacagccaucacuauaucaugguuggcaaugaaaccgggcuggagcucacacugaccaacacguccauuaucaaucauaaauucugcaaccuuucugaugcucacaagaaaaaucuguacgaccaugcccucaugagcauuaucuccaccuuucaccugagcauuccgaacuucaaucaguaugaggccaugucuugugauuuuaacggaggcaagaucuccgugcaguacaaucugagccacacauaugcugucgacgccgcuaaccauugcggcaccauugccaauggggugcuccaaacauucaugcggauggcguggggaggcucuuacaucgcccuggauuccgggaagggaagcugggacuguaucaugaccucuuaccaguaucuuauuauccagaacacgacaugggaagaucacugccaguuuucccgccccagcccuauuggcuaccuggggcuccugucccaaagaacccgggacaucuauauuucucgcagacuucugggaacauucaccuggacccucagcgauuccgagggcaacgaaacacccggcggguacugucugacgcgguggaugcugaucgaggcugagcucaaaugcuuuggaaauaccgccguugcuaaguguaacgaaaaacaugacgaggaguucugcgauaugcugcgccuuuuugacuucaauaagcaggccaucagacggcugaaagcggaagcccagaugagcauucagcucaucaacaaggcugugaaugcccugauuaacgaucaacuuaucaugaagaaucaucugcgcgacauuaugggcaucccuuauugcaacuacucuaaauauuguuaccucaaucacacagucaccgggagaacaucccugccccggugcugucuggugagcaacggaucuuaccucaaugaaacccacuucagcgacgauaucgagcagcaggcugacaacaugauuacggagcugcuucaaaaggaauauaucgaucgccagggcaaaacaccucuggggcucguggaccuguuugucuucuccaccucuuuuuaccugauuagcaucuuccuucaccucguuaagauuccgacccauagacacaucauuggaaaacccugcccuaagccccaucggcugaaucacaugggcaucuguuccugcggccuguauaaacacccuggggugcccgugaaguggaagcgcugaggacuaguaauaaggaaacuguaugaaugucugugggcaggaagugaagagauccuucuguaaagguuuuuggaauuaugucugcugaauaauaaacuuuuuugaaauaauaaaucugguagaaaaaugagaucuaaaaaaaaaaaaaaaaaaaaaaaaaaaaaaaaaaaaaaaaaaaaaaaaaaaaaaaaaaaaaaaaaaaaaaaaaaaaaaaaaaaaaaaaaaaaaaaaaaaa

SEQ ID NO: 39513 - RNA, 1785 nt, Artificial Sequence
  mRNA product Design b-4 (A100) comprising derived and/or modified sequence from LASV(LASV254-NIG-2011;Clade II)__AIT17674__GPCmut11 (opt5)
aggagagucccgcagucggcguccagcggcucugcuuguucgugugugugucguugcaggccuuauucaagcuuaccaugggccagaucauuaccuucuuucaagaggugccccacgucaucgaagagguuaugaacauugugcugaucgcccucagccugcuugcuauucugaaggggaucuacaauguggccacaugcggacucuucggccuggucuccuuucuucugcucugugggagaucuugcagcacgaccuauaaaggaguguacgaacugcagacacuggagcucgacaugaccaaccugaauaugacaaugccucuuuccuguaccaagaacaauucucaucacuauaucaugguuggcaacgaaacagggcuggagcucacccugacgaauaccagcauuaucaaccauaaauucugcaaucuuuccgaugcgcacaagaaaaaccuguacaaucaugcucucaugucuauuaucagcacauuucaccuguccauuccgaacuucaaucaguaugaggccaugagcugugacuuuaacggaggcaagaucucugugcaguacaaucugucccacagcuaugccgucgaugcugccaaccauugcggcaccauugcuaacggggugcuccaaacauucaugcggauggccuggggaggcucuuacaucgcgcuggacuccgggaagggaaauugggauuguaucaugaccagcuaccaguaucuuauuauccagaacacgacaugggaagaccacugccaguuuucucgccccuccccuauuggcuaccuggggcuccugagccaaagaacccgggauaucuauauuucccgcagacuucugggaacauucaccuggacccucucugacagcgagggcaaugaaacacccggcggguacugucugacgcgguggaugcugaucgaggccgagcucaaaugcuuuggaaacaccgcuguugccaaguguaaugaaaaacaugaugaggaguucugcgacaugcugcgccuuuuugauuucaacaagcaggcuaucagacggcugaaaacagaagcccaggcgaauauucagcucaucaacaaggccgugaaugcucugauuaacgaccaacuuaucaugaagaaucaucugcgcgauauuaugggcaucccuuauugcaacuacuccaaauauuguuaccucaaucacaccgucacagggaagaccagccugcccagaugcugucuggugucuaacggauccuaccucaaugaaacgcacuucagcgacgacaucgagcagcaggccgauaacaugauuacagagcugcuucaaaaagaauauauggaccggcagggcaagaccccucuggggcucguggaucuguuugucuucucuaccagcuuuuaccugaucuccauuuuccuucaccucguuaaaaucccgacacaucgccacgugauuggaaagcccugcccuaaaccccauagacugaaccacaugggcaucuguucuugcggccuguauaagcacccuggggugcccgucaaguggaaacggugaggacuaguaauaaggaaacuguaugaaugucugugggcaggaagugaagagauccuucuguaaagguuuuuggaauuaugucugcugaauaauaaacuuuuuugaaauaauaaaucugguagaaaaaugagaucuaaaaaaaaaaaaaaaaaaaaaaaaaaaaaaaaaaaaaaaaaaaaaaaaaaaaaaaaaaaaaaaaaaaaaaaaaaaaaaaaaaaaaaaaaaaaaaaaaaaa

SEQ ID NO: 39514 - RNA, 1785 nt, Artificial Sequence
  mRNA product Design b-4 (A100) comprising derived and/or modified sequence from LASV(Nig08-A19;Clade III)__ADU56618__GPCmut11 (opt5)
aggagagucccgcagucggcguccagcggcucugcuuguucgugugugugucguugcaggccuuauucaagcuuaccaugggccagaucgugaccuucuuucaagaggucccccacguuauugaagaggugaugaacaucgugcugauugcccucagcauccuggcuauucuuaaggggcuguacaauaucgccacaugcggacucaucggccuggucacguuccuucugcucuccgggagaucuuguagcaugaccuauaaaggaguguacgaacugcagacacuggagcucaacaugaauacccugaacaugacaaugccucuuuccugcaccaagaauaacucucaucacuauauuaugguuggcaaugaaacagggcuggagcucacccugacgaacaccagccuucugcaucacaaauuuuguaaucucuccgacgcgcauaagaaaaaccuguacgaucacacacugaugucuaucauuagcaccuuccaccucuccaucccgaauuuuaaccaguaugaggcuaugagcugcgacuucaauggaggcaagauuacagugcaguacaaccugucucauuccuaugccaucgaugccgcuaaucacuguggcaccgucgccaacggggugcuucaaacguuuaugcggauggcuuggggaggcagcuacauugcccuggacucugggcgcggaaagugggauugcaucaugacauccuaccaguaucucaucauucagaacaccacaugggaagaccauugucaguucagcagacccucuccuaucggcuaccuggggcuucugucccaacggacccgcgauauuuauaucagcagacggcuccugggaaccuuuacauggacgcuguccgacucugagggcaaugaaacccccggcggguacugccucacacgcuggaugcugauugaggcggagcuuaaauguuucggaaacaccgccguugcuaagugcaaugaaaaacacgaugaggaauuuugugacaugcugagacucuucgauuuuaacaagcaggccauccggcgccugaaagcugaggcccagaugagcauccagcuuauuaauaaggcggugaacgcccugaucaaugaccaacucauuaugaagaaccaccugagagauaucaugggcauuccuuauugcaauuacuccaaauauugcuaccugaaccauacaagcaccgggcggacgucucucccccgcuguugccuggucuccaauggaagcuaccuuaacgaaacacacuucucugacgacaucgagcagcaggcugauaauaugaucaccgagaugcugcaaaaggaauaucucgacagacagggcaaaaccccucuggggcugguggaucuuuucguguuuagcacauccuucuaccucauuucuaucuuucugcaucuggucaagauuccgacccaccggcauaucguuggaaaacccuguccuaagccccaccgccucaaccacaugggcauuugcagcuguggccuguauaaacagccuggggugcccgugagauggaagcggugaggacuaguaauaaggaaacuguaugaaugucugugggcaggaagugaagagauccuucuguaaagguuuuuggaauuaugucugcugaauaauaaacuuuuuugaaauaauaaaucugguagaaaaaugagaucuaaaaaaaaaaaaaaaaaaaaaaaaaaaaaaaaaaaaaaaaaaaaaaaaaaaaaaaaaaaaaaaaaaaaaaaaaaaaaaaaaaaaaaaaaaaaaaaaaaaa

SEQ ID NO: 39515 - RNA, 1788 nt, Artificial Sequence
  mRNA product Design b-4 (A100) comprising derived and/or modified sequence from LASV(G1180-SLE-2010;Clade IV)__AIT17168__GPCmut11 (opt5)
aggagagucccgcagucggcguccagcggcucugcuuguucgugugugugucguugcaggccuuauucaagcuuaccaugggccagaucgugaccuucuuucaagaggucccccacguuauugaagaggugaugaacaucgugcugauugcccucagcauccuggcuguccuuaaggggcuguacaauuucgccacaugcggacucgugggccugcuuacguuucugcuccugugugggagauccugcaccgcgucucgguauaaaggaguuuacgaacugcagacacucgagcugaacauggaaacccuuaauaugacaaugccucugagcuguaccaagaacaauucccaucacuauauuauggugggcaacgagacagggcucgagcugacccuuacgaauaccucuaucaucaaccauaaauucugcaaucugagcgacgcucacaagaaaaaccucuacgaucaugcccugauguccauuaucucuacauuucaccugagcauuccgaauuucaaccaguaugaagccauguccugugacuuuaauggaggcaagaucagcguccaguacaaccucucucacuccuaugcuggcgaugccgcuaaucauugcgggaccguggccaacggaguucugcaaacauucaugcgcauggcguggggcgggagcuacauugcccuugacucuggacacggcuccugggauuguaucaugaccagcuaccaguaucugauuauccagaacacgacaugggaggaccauugccaguuuucuagacccuccccuaucggguaccucggacugcuuagccaacggacccgcgauauuuauaucuccagacggcugcucggcacauucaccuggacccugucugacagcgaaggcaaggauacacccgggggauacugucugacgcgcuggaugcucauugaggcugagcugaaaugcuuuggcaauaccgccguggcuaaguguaacgaaaaacacgacgaggaguucugcgauaugcuuagacuguuugacuucaauaagcaggccauccagcggcucaaagcggaagcccagauguccauucaacugaucaacaaggcugucaaugcccuuaucaacgaucagcugauuaugaagaaucaccuccgcgacaucauggggauuccuuauugcaacuacagcaaauauuguuaccugaaucauacaaccacaggaaagaccucucugcccaaaugcugucucguguccaacggcagcuaccugaaugaaacgcacuucucugacgauaucgagcagcaagcugacaacaugauuacagagaugcuucagaaggaauauauggagagacaggggaaaaccccucugggacucguggaucuguuugucuucagcaccuccuuuuaccugaucucuaucuuccuucaucucguuaagauuccgacacaccggcauaucgugggcaaaagcugccccaagccucaccgccugaaucacaugggcauuuguuccugcgggcuguauaagcagcccggagugccugucaaauggaagagaugaggacuaguaauaaggaaacuguaugaaugucugugggcaggaagugaagagauccuucuguaaagguuuuuggaauuaugucugcugaauaauaaacuuuuuugaaauaauaaaucugguagaaaaaugagaucuaaaaaaaaaaaaaaaaaaaaaaaaaaaaaaaaaaaaaaaaaaaaaaaaaaaaaaaaaaaaaaaaaaaaaaaaaaaaaaaaaaaaaaaaaaaaaaaaaaaa

SEQ ID NO: 39516 - RNA, 1788 nt, Artificial Sequence
  mRNA product Design b-4 (A100) comprising derived and/or modified sequence from LASV(G1442-SLE-2011;Clade IV)__AIT17180__GPCmut11 (opt5)
aggagagucccgcagucggcguccagcggcucugcuuguucgugugugugucguugcaggccuuauucaagcuuaccaugggccagaucgugaccuucuuucaagaggucccccacguuauugaagaggugaugaacaucgugcugauugcccucagcauccuggcuguccuuaaggggcuguacaauguggccacaugcggacucauuggccugguuacguuccuucugcucugugggagauccugcaccacaacccuguauaaaggaguguacgaacugcagacacucgagcugaacauggaaacccuuaauaugacaaugccucugucuuguaccaagaacaauagccaucacuauauccgggucggcaacgagacggggcucgagcugacccuuacaaauaccuccaucauuaaccauaaauuuugcaaucugucugacgcgcacaagaaaaaccucuacgaucaugcucugaugagcaucauuuccacauuccaccugucuaucccgaauuuuaaccaguaugaagccaugagcugugacuucaauggaggcaagauuuccgugcaguacaaccucagccacucuuaugccggcgaugcugccaaucauugcgggaccguugcuaacggagugcugcaaacguuuaugcgcauggccuggggcggguccuacaucgcgcuugacagcggaagaggcaacugggauuguauuaugacaucuuaccaguaucugaucauccagaauaccacaugggacgaucacugccaguucucccggcccagcccuauuggguaccucggacugcuuucucaacgcaccagagacgucuauaucucccggcgccugcucggcaccuuuacauggacgcugagcgauuccgagggcaaggacacccccgggggauacugucugacaagauggaugcucauugaagccgagcugaaaugcuucggcaacaccgcuguggccaaguguaaugagaaacaugaugaagaguuuugcgacaugcuucggcuguucgauuuuaacaagcaggcuauccagcgccucaaagccgaagcgcagaugucuauucaacugaucaauaaggccgugaacgcucuuaucaaugaccagcugauuaugaagaaccaccucagagacaucauggggauuccuuauugcaauuacagcaaauauuguuaccugaacaauacagccaccggaaagacgucccugcccaaaugcugucucaucagcaacggcucuuaccugaaugagacacacuucuccgaugacauugaacaggaggcugauaacaugaucaccgagaugcuucaaaaggaauauauggagcggcaggggaaaaccccucugggacucgucgaccuguucguuuuuagcacaucuuucuaccugaucagcauuuuucuucaucucgugaagaucccgacccaccgccauauugugggcaaauccugccccaagccucacagacugaaucauaugggcaucuguucuugcgggcuguauaagcagcccggagucccugugcgguggaaacgcugaggacuaguaauaaggaaacuguaugaaugucugugggcaggaagugaagagauccuucuguaaagguuuuuggaauuaugucugcugaauaauaaacuuuuuugaaauaauaaaucugguagaaaaaugagaucuaaaaaaaaaaaaaaaaaaaaaaaaaaaaaaaaaaaaaaaaaaaaaaaaaaaaaaaaaaaaaaaaaaaaaaaaaaaaaaaaaaaaaaaaaaaaaaaaaaaa

SEQ ID NO: 39517 - RNA, 1788 nt, Artificial Sequence
  mRNA product Design b-4 (A100) comprising derived and/or modified sequence from LASV(G3010-SLE-2013;Clade IV)__AIT17344__GPCmut11 (opt5)
aggagagucccgcagucggcguccagcggcucugcuuguucgugugugugucguugcaggccuuauucaagcuuaccaugggccagaucgugaccuucuuucaagaggucccccacguuauugaagaggugaugaacaucgugcugauugcccucagcauccuggcuguccuuaaggggcuguacaauuucgccacaugcggacucgugggccugguuacguuucuucugcucugugggagauccugcaccacaucucuguauaaaggaguguacgaacugcagacccucgagcugaacauggaaacacuuaauaugaccaugccucugagcuguacaaagaacaauucccaucacuauauuauggucggcaacgagaccgggcucgagcugacgcuuaccaauacaucuaucaucaaccauaaauucugcaaucugagcgacgcgcacaagaaaaaccucuacaaucaugcucugauguccauuaucucuaccuuucaccugagcauuccgaacuucaaucaguaugaagccauguccugugauuuuaacggaggcaagaucagcgugcaguacaaucucucucacuccuaugccggcgacgcugccagccauugcgggacaguugcuaacggagugcugcaaaccuucaugcggauggccuggggcgggucuuacauugcgcuugauuccggauacggcaagugggacuguaucaugacgagcuaucaguaccugauuauccagaacacaaccugggaggaucacugccaguuuucucgccccuccccuaucggguaucucggacugcuuagccaaagaacacgggacauuuacaucucccgcagacugcucggcaccuucaccuggacacugucugauagcgaaggcaaagacacgcccgggggauauugucugacccgguggaugcucauugaggccgagcugaagugcuuuggcaauacagcugucgccaaauguaacgaaaagcaugaugaggaguucugcgacaugcuucgccuguuugauuucaauaaacaggcuauccagagacucaagaccgaagcccagauguccauucaacugaucaacaaggcggugaaugcccuuaucaacgaccagcugauuaugaaaaaucaccuccgggauaucauggggauuccuuacugcaacuauagcaaguacuguuaccugaaucacacaaccacgggaaaaacaucucugcccaagugcugucucguguccaacggcagcuaucugaaugaaacccauuucucugacgacaucgagcagcaagcugauaacaugauuaccgagaugcuucagaaagaauacauggagcgccaggggaagacaccucugggacucgucgaccuguuuguuuucagcaccuccuuuuaucugaucucuaucuuccuucaccucgugaaaauuccgacacauagacacaucgugggcaagagcugccccaagccucaucggcugaaucacaugggcauuuguuccugcgggcuguacaaacagcccggagucccugugcgcuggaagagaugaggacuaguaauaaggaaacuguaugaaugucugugggcaggaagugaagagauccuucuguaaagguuuuuggaauuaugucugcugaauaauaaacuuuuuugaaauaauaaaucugguagaaaaaugagaucuaaaaaaaaaaaaaaaaaaaaaaaaaaaaaaaaaaaaaaaaaaaaaaaaaaaaaaaaaaaaaaaaaaaaaaaaaaaaaaaaaaaaaaaaaaaaaaaaaaaa

SEQ ID NO: 39518 - RNA, 1788 nt, Artificial Sequence
  mRNA product Design b-4 (A100) comprising derived and/or modified sequence from LASV(G502-SLE-2009;Clade IV)__AIT17126__GPCmut11 (opt5)
aggagagucccgcagucggcguccagcggcucugcuuguucgugugugugucguugcaggccuuauucaagcuuaccaugggccagaucgugaccuucuuucaagaggucccccacguuauugaagaggugaugaacaucgugcugauugcccucagcauccuggcuguccuuaaggggcuguacaauuucgccacaugcggacucgugggccugcuuacguuucugcuccugugugggagauccugcaccacaggacuguauaaaggcguuuacgaacuccagacccuggagcuuaacauggaaacacugaauaugaccaugccucucucuuguacaaagaacaauagccaucacuauauuaugguggggaacgagaccggacuggagcuuacgcugaccaauacauccaucaucaaccauaaauucugcaaucucucugacgcgcacaagaaaaaccuguacgaucaugcucugaugagcauuaucuccaccuuucaccucucuauuccgaauuucaaccaguaugaagccaugagcugugacuuuaauggcggcaagaucuccguccaguacaaccugagccacucuuaugccggggaugcugccgaccauugcggaacaguggcuaauggcguucuucaaaccuucaugcggauggccuggggaggguccuacauugcgcuggauagcggccgcgggagaugggacuguaucaugacgucuuaccaguaucucauuauccagaacacaaccugggaggaucacugccaguuuucccggcccagcccuaucggauaccugggccuucugucucaacgcacaagagacauuuauaucucccggcgccuccugggcaccuucaccuggacacugagcgauuccgaagggaaggacacgcccggaggcuacugucucaccagauggaugcugauugaggccgagcuuaaaugcuuugggaacacagcuguggccaaguguaaugaaaaacaugaugaggaguucugcgacaugcugcggcucuuugauuucaacaagcaggcuauccagcgccugaaagccgaagcgcagaugucuauucaacuuaucaauaaggccgucaacgcucugaucaaugaccagcucgugaugaagaaccaccugagagacauuaugggaaucccuuauugcaauuacagccgguauuguuaccugaaccacaccacaaccggccgcacgucccuccccaaaugcugucuggugagcaaugggucuuaccuuaacgaaacacauuucuccgaugacauugagcagcaagccgauaauaugaucaccgagaugcugcagaaggaauauauggagagacagggaaaaaccccucucggccuggucgaccuguuuguuuucagcacaucuuuuuaccuuauuagcaucuuccuccaccuggugaagaucccgacccaucggcacauugugggcaaauccugccccaagccucaucgccugaaccacauggggaucuguucuugcggacucuauaaacagcccggcgucccugugaaguggaagagaugaggacuaguaauaaggaaacuguaugaaugucugugggcaggaagugaagagauccuucuguaaagguuuuuggaauuaugucugcugaauaauaaacuuuuuugaaauaauaaaucugguagaaaaaugagaucuaaaaaaaaaaaaaaaaaaaaaaaaaaaaaaaaaaaaaaaaaaaaaaaaaaaaaaaaaaaaaaaaaaaaaaaaaaaaaaaaaaaaaaaaaaaaaaaaaaaa

SEQ ID NO: 39519 - RNA, 1788 nt, Artificial Sequence
  mRNA product Design b-4 (A100) comprising derived and/or modified sequence from LASV(G733-SLE-2010;Clade IV)__AIT17154__GPCmut11 (opt5)
aggagagucccgcagucggcguccagcggcucugcuuguucgugugugugucguugcaggccuuauucaagcuuaccaugggccagaucgugaccuucuuucaagaggucccccacguuauugaagaggugaugaacaucgugcugauugcccucagcauccuggcuguccuuaaggggcuguacaauuucgccacaugcggaauugugggccucguuuccuuucugcuucugugugggagaucuugcacgaccagccucuauaaaggaguguacgaacugcagacacuggagcucaacauggaaacccugaauaugacaaugccucuuuccuguaccaagaacaauucucaucacuauaucauggucggcaacgagacagggcuggagcucacccugacgaauaccagcaucauuaaccauaaauucugcaaucuuuccgacgcgcacaagaaaaaccuguacgaucaugcucucaugucuaucauuagcacauuucaccuguccaucccgaauuucaaccaguaugaagccaugagcugugacuuuaauggaggcaagauuucugugcaguacaaccugucccacagcuaugccggcgaugcugccaaucauugcgggaccaucgcuaacggaguucuccaaacauucaugcggauggccuggggcgggucuuacauugcgcuggacuccggacgcgauagaugggacuguaucaugaccagcuaccaguaucuuaucauucagaacacgacaugggaggaucacugccaguuuucucggcccuccccuaucggcuaccuggggcuccugagccaacgcaccagagacauuuauaucucccggcgccuucugggaacauucaccuggacccucucugauagcgaaggcaaggacacacccggcggguacugucugacgagauggaugcugauugaggccgagcucaaaugcuuuggaaauaccgcuguggccaaguguaacgaaaaacaugaugaggaguucugcgacaugcugcggcuuuuugauuucaauaagcaggcuauccagcgccugaaagccgaagcgcagauguccauccaacucauuaacaaggccgucaaugcucugaucaacgaccagcuuauuaugaagaaucaccugagagacaucaugggcauuccuuauugcaacuacagcaaauauuguuaccucaaucacacaaccacagggaagaccucucugcccaaaugcugucugguguccaacggaagcuaccucaaugaaacgcauuucucugaugacaucgagcagcaagccgauaacaugaucacagagaugcugcagaaggaauauauggagcggcagggcaaaaccccucuugggcugguggaccucuuugucuucagcaccuccuuuuaccugauuucuaucuuccugcaccuuguuaagauuccgacacaucgccacguggugggaaaaagcugccccaagccucauagacucaaucacaugggcaucuguuccugcggccuguaugggcagcccggagucccugugaaguggaaacggugaggacuaguaauaaggaaacuguaugaaugucugugggcaggaagugaagagauccuucuguaaagguuuuuggaauuaugucugcugaauaauaaacuuuuuugaaauaauaaaucugguagaaaaaugagaucuaaaaaaaaaaaaaaaaaaaaaaaaaaaaaaaaaaaaaaaaaaaaaaaaaaaaaaaaaaaaaaaaaaaaaaaaaaaaaaaaaaaaaaaaaaaaaaaaaaaa

SEQ ID NO: 39520 - RNA, 1788 nt, Artificial Sequence
  mRNA product Design b-4 (A100) comprising derived and/or modified sequence from MOPV/LASV reassortant(IGS-1;Clade IV)__AFY05576__GPCmut11 (opt5)
aggagagucccgcagucggcguccagcggcucugcuuguucgugugugugucguugcaggccuuauucaagcuuaccaugggccagaucgugaccuucuuucaagaggucccccacguuauugaagaggugaugaacaucgugcugauugcccucagcguccuggcugugcuuaaggggcuguacaauuucgccacaugcggacucguuggccuggugacguuucuucugcucugugggagauccugcaccacaucucuguauaaaggagucuacgaacugcagacccucgagcugaacauggaaacacuuaauaugaccaugccucugagcuguacaaagaacaauucccaucacuauaucauggugggcaacgagaccgggcucgagcugacgcuuaccaauacaucuauuaucaaccauaaauucugcaaucugagcgacgcgcacaagaaaaaccucuacgaucaugcucugauguccaucauuucuaccuuucaccugagcaucccgaauuucaaccaguaugaagccauguccugugacuuuaauggaggcaagauuagcguucaguacaaccucucucacuccuaugccggcgaugcugccaaucauugcgggacaguggcuaacggaguccugcaaaccuucaugcggauggccuggggcgggagcuacaucgcgcuugacucuggacgcggcaacugggauuguauuaugacguccuaccaguaucugaucauucagaauacaaccugggaggaccacugccaguuuagcagacccucuccuaucggguaccucggacugcuuucccaacggacacgcgauaucuauauuagcagacggcugcucggcaccuucaccuggacacuguccgacucugaaggcgaggauacgcccgggggauacugucugacccgcuggaugcucaucgaggccgaacugaagugcuuuggcaacacagcuguggccaaauguaaugagaagcaugacgaagaguucugcgauaugcuuagacuguuugacuucaacaaacaggcuauucagcggcucaaggccgaagcgcagaugagcauccaacugauuaauaaagccgugaacgcucuuaucaaugaucagcugaucaugaagaaccaccuccgcgacauuauggggaucccuuauugcaauuacuccaaguauuguuaccugaaccacaccacaaccggaagaacgagccugcccaaaugcugucucgucucuaauggcuccuaccugaacgagacacauuucagcgacgauauugagcagcaagccgacaauaugaucaccgaaaugcuucagaaggaguauauggaacggcaggggaaaaccccucugggacucguugaucuguuuguguucucuaccagcuuuuaccugauuuccaucuuccuucaccucgugaagaucccgacacaucgccacauugucggcaaaucuugccccaagccucauagacugaaccacaugggcaucuguagcugcgggcuguauaaacagcccggagugccuguuaaguggaagcggugaggacuaguaauaaggaaacuguaugaaugucugugggcaggaagugaagagauccuucuguaaagguuuuuggaauuaugucugcugaauaauaaacuuuuuugaaauaauaaaucugguagaaaaaugagaucuaaaaaaaaaaaaaaaaaaaaaaaaaaaaaaaaaaaaaaaaaaaaaaaaaaaaaaaaaaaaaaaaaaaaaaaaaaaaaaaaaaaaaaaaaaaaaaaaaaaa

SEQ ID NO: 39521 - RNA, 1788 nt, Artificial Sequence
  mRNA product Design b-4 (A100) comprising derived and/or modified sequence from LASV(LM765-SLE-2012;Clade IV)__AIT17814__GPCmut11 (opt5)
aggagagucccgcagucggcguccagcggcucugcuuguucgugugugugucguugcaggccuuauucaagcuuaccaugggccagaucgugaccuucuuucaagaggucccccacguuauugaagaggugaugaacaucgugcugauugcccucagcauccuggcuguccuuaaggggcuguacaauuucgccacaugcggacucgugggccugguuacguuucuucugcucugugggagauccugcaccacaucucuguauaaaggaguguacgaacugcagacccucgagcugaacauggaaacacuuaauaugaccaugccucugagcuguacaaagaacaauucccaucacuauauuauggucggcaacgagaccgggcucgagcugacgcuuaccaauacaucuaucaucgaccauaaauucugcaaccugagcgaugcgcaccggaagaaucucuacgaccaugcucugauguccauuaucucuaccuuucaccugagcauuccgaacuucaaucaguaugaagccauguccugugauuuuaacggaggcaaaaucagcgugcaguacaaucucucucacuccuaugccaaggacgcugccgaucauugcggcacaguugcuaacggggugcugcaaaccuucaugcgcauggccuggggaggcagcuacauugcgcuugacucugggagaggacggugggauuguaucaugacguccuaccaguaucugauuauccagaauacaaccugggaggaccacugccaguuuagccgccccucuccuaucggcuaccucgggcugcuuucccaaagaacacgggauauuuauaucagccgcagacugcucggaaccuucaccuggacacuguccgacucugaaggcaaggauacgcccggcggguacugucugacccgguggaugcucauugaggccgagcugaaaugcuuuggaaacacagcugucgccaaguguaacgaaaaacaugacgaggaguucugcgauaugcuucgccuguuugacuucaauaagcaggcuauccagagacucaaagccgaagcgcagaugagcauucaacugaucaacaaggccgugaaugcucuuaucaacgaccagcugauuaugaagaaucaccuccgggauaucaugggcauuccuuauugcaacuacuccaaauauuguuaccugaaucacaccacaaccgggaagacgagccugcccaaaugcugucucgugucuaacggauccuaccugaaugaaacacauuucagcgacgauaucgagcagcaagccgacaacaugauuaccgagaugcuucagaaggaauauauggagcgccagggcaaaaccccucuggggcucgucgaucuguuuguuuucucuaccagcuuuuaccugaucuccaucuuccuucaccucgugaagauuccgacacauagacacaucgugggaaaacccugcccuaagccccaucggcugaaucacaugggcauuuguucuugcggccuguauaagcagccugggguccccgugaaauggaagcgcugaggacuaguaauaaggaaacuguaugaaugucugugggcaggaagugaagagauccuucuguaaagguuuuuggaauuaugucugcugaauaauaaacuuuuuugaaauaauaaaucugguagaaaaaugagaucuaaaaaaaaaaaaaaaaaaaaaaaaaaaaaaaaaaaaaaaaaaaaaaaaaaaaaaaaaaaaaaaaaaaaaaaaaaaaaaaaaaaaaaaaaaaaaaaaaaaa

SEQ ID NO: 39522 - RNA, 1788 nt, Artificial Sequence
  mRNA product Design b-4 (A100) comprising derived and/or modified sequence from LASV(LM776-SLE-2012;Clade IV)__AIT17824__GPCmut11 (opt5)
aggagagucccgcagucggcguccagcggcucugcuuguucgugugugugucguugcaggccuuauucaagcuuaccaugggccagaucgugaccuucuuucaagaggucccccacguuauugaagaggugaugaacaucgugcugauugcccucagcauccuggcuguccuuaaggggcuguacaauuucgccacaugcggacucgugggccugguuacguuucuucugcucugugggagauccugcaccacaucuguguauaaaggagucuacgaacugcagacccuggagcucaacauggaaacacugaauaugaccaugccucuuagcuguacaaagaacaauucccaucacuauauuauggugggcaacgagaccgggcuggagcucacgcugaccaauacaucuaucaucaaccauaaauucugcaaucuuagcgacgcgcacaagaaaaaccuguacgaucaugcucucauguccauuaucucuaccuuucaccugagcauuccgaauuucaaccaguaugaagccauguccugugacuuuaauggaggcaagaucagcguucaguacaaccugucucacuccuaugccggcgaugcugccaaucauugcgggacaguggcuaacggaguccuccaaaccuucaugcggauggccuggggcgggagcuacauugcgcuggacucuggacacggcaagugggauuguaucaugacguccuaccaguaucuuauuauccagaacacaaccugggaggaccauugccaguuuagccgccccucuccuaucggguaccugggacuccugucccaaagaacacgggauauuuauaucagccgcagacuucugggcaccuucaccuggacacucuccgacucugaaggcaaagauacgcccgggggauacugucugacccgguggaugcugauugaggccgagcucaagugcuuuggcaauacagcuguggccaaauguaacgaaaagcacgacgaggaguucugcgauaugcugcgccuuuuugacuucaauaaacaggcuauccagagacugaaggccgaagcgcagaugagcauucaacucaucaacaaggccgugaaugcucugaucaacgaucagcuuauuaugaaaaaucaucugcgggacaucauggggauuccuuauugcaacuacuccaaguauuguuaccucaaucacaccacaaccggaaaaacgagccugcccaagugcugucuggucucuaacggcuccuaccucaaugaaacacacuucagcgacgauaucgagcagcaagccgacaacaugauuaccgagaugcugcagaaagaauauauggagcgccaggggaagaccccucuuggacugguugaucucuuuguguucucuaccagcuuuuaccugaucuccaucuuccugcaucuugugaaaauuccgacacacagacauaucgucggcaagucuugccccaagccucaccggcucaaucacaugggcauuuguagcugcgggcuguauaaacagcccggagugccuguucgcuggaagagaugaggacuaguaauaaggaaacuguaugaaugucugugggcaggaagugaagagauccuucuguaaagguuuuuggaauuaugucugcugaauaauaaacuuuuuugaaauaauaaaucugguagaaaaaugagaucuaaaaaaaaaaaaaaaaaaaaaaaaaaaaaaaaaaaaaaaaaaaaaaaaaaaaaaaaaaaaaaaaaaaaaaaaaaaaaaaaaaaaaaaaaaaaaaaaaaaa

SEQ ID NO: 39523 - RNA, 1788 nt, Artificial Sequence
  mRNA product Design b-4 (A100) comprising derived and/or modified sequence from LASV(Mad39;Clade IV)__ANH09722__GPCmut11 (opt5)
aggagagucccgcagucggcguccagcggcucugcuuguucgugugugugucguugcaggccuuauucaagcuuaccaugggccagaucgugaccuucuuucaagaggucccccacguuauugaagaggugaugaacaucgugcugauugcccucagcauccuggcuguccuuaaggggcuguacaauguggccacaugcggacucauuggccugguuacguuccuucugcucugugggagauccugcaccacaacccuguauaaaggaguguacgaacugcaggcgcucgagcugaacauggaaacacuuaauaugaccaugccucugucuuguacaaagaacaauagccaucacuauauccgggucggcaacgagaccgggcucgagcugacgcuuaccaauacaucccugaucaaccauaaauuuugcaaucucucugacgcucacaagaaaaaccuguacgaucaugcccugaugagcauuaucuccaccuuccaccucucuauuccgaauuuuaaccaguaugaagccaugagcugugacuucaaugauggaaagaucuccgugcaguacaaccugagccacacauaugcuggcgacaccgccaaucauugcggcacgguugcuaacggggugcuucaaacauuuaugcgcauggccuggggaggcucuuacauugcgcuggauuccgggagaggaggcugggacuguaucaugaccagcuaccaguaucucauuauccagaacacaaccugggaggaucacugccaguucucucggcccuccccuaucggguaccugggacuucugagccaacgcaccagagacauuuauaucucucggcgccuccugggcacauuuacguggacccuguccgauagcgaaggcaaggacacacccgggggauacugucucaccagauggaugcugauugaggccgagcuuaaaugcuucggcaauacagcugucgccaaguguaacgaaaaacaugaugaggaauuuugcgacaugcugcgccucuucgauuuuaauaagcaggcuauccagcggcugaaagccgaggcgcagauguccauucaacuuaucaacaaggccgugaaugcucugaucaacgaccagcucauuaugaagaaucaccugagagacaucauggggauuccuuauugcaacuacucuaaauauuguuaccugaaucacaccgugacgggaaagacaagccuccccaaaugcugucuggucuccaacggcagcuaccuuaaugaaacccauuucucugaugacaucgagcagcaagccgauaacaugauuaccgagaugcugcagaaggaauauauggagcggcaggggaaaacaccucucggacugguugaccuguucguguuuuccaccagcuucuaccuuaucucuaucuuucuccaccuggugaagauuccgacacaucgccacgucgugggcaaacccugcccuaagccccauagacugaaucacaugggcaucuguagcugcggguucuauaagcagccuggaguucccgugcgguggaaacgcugaggacuaguaauaaggaaacuguaugaaugucugugggcaggaagugaagagauccuucuguaaagguuuuuggaauuaugucugcugaauaauaaacuuuuuugaaauaauaaaucugguagaaaaaugagaucuaaaaaaaaaaaaaaaaaaaaaaaaaaaaaaaaaaaaaaaaaaaaaaaaaaaaaaaaaaaaaaaaaaaaaaaaaaaaaaaaaaaaaaaaaaaaaaaaaaaa

SEQ ID NO: 39524 - RNA, 1788 nt, Artificial Sequence
  mRNA product Design b-4 (A100) comprising derived and/or modified sequence from LASV(Z0947-SLE-2011;Clade IV)__AIT17840__GPCmut11 (opt5)
aggagagucccgcagucggcguccagcggcucugcuuguucgugugugugucguugcaggccuuauucaagcuuaccaugggccagaucgugaccuucuuucaagaggucccccacguuauugaagaggugaugaacaucgugcugauugcccucagcauccuggcuguccuuaaggggcuguacaauuucgccacaugcggacucgugggccugguuacguuucuucugcucugugggagauccugcaccauuucucuguauaaaggaguguacgaacugcagacacucgagcugaacauggaaacccuuaauaugacaaugccucugagcuguaccaagaacaauucccaucacuauaucauggucggcaacgagacagggcucgagcugacccuuacgaauaccucuaucauuaaccauaaauucugcaaucugagcgacgcgcacaagaaaaaccucuacgaucaugcucugauguccaucauuucuacauuucaccugagcaucccgaauuucaaccaguaugaagccauguccugugacuuuaauggaggcaagauuagcgugcaguacaaccucucucacuccuaugccggcgaugcugccaaucauugcgggaccguugcuaacggagugcugcaaacauucaugcggauggccuggggcgggagcuacaucgcgcuugacucuggacgcgauagaugggacuguauuaugaccuccuaccaguaucugaucauccagaacacgacaugggaggaucacugccaguuuagccggcccucuccuauuggcuaccucgggcugcuuucccaacgcaccagagacaucuauauuagccggcgccugcucggaacauucaccuggacccuguccgauucugaaggcaaggacacacccggcggguacugucugacgagauggaugcucaucgaggccgagcugaaaugcuuuggaaauaccgcugucgccaaguguaacgaaaaacaugaugaggaguucugcgacaugcuucggcuguuugauuucaauaagcaggcuauucagcgccucaaagccgaagcgcagaugagcauccaacugaucaacaaggccgugaaugcucuuauuaacgaccagcugaucaugaagaaucaccucagagacauuaugggcaucccuuauugcaacuacuccaaauauuguuaccugaaucacacaaccacagggaagaccagccugcccaaaugcugucucgugucuaacggauccuaccugaaugaaacgcauuucagcgaugacauugagcagcaagccgauaacaugaucacagagaugcuucagaaggaauauauggagcggcagggcaaaaccccucuggggcucgucgaccuguuuguuuucucuaccagcuuuuaccugaucuccauuuuccuucaccucgugaagaucccgacacaucgccacauugugggaaaacccugcccuaagccccauagacugaaucacaugggcaucuguucuugcggccuguauaagcagccugggguccccgugaaauggaagcggugaggacuaguaauaaggaaacuguaugaaugucugugggcaggaagugaagagauccuucuguaaagguuuuuggaauuaugucugcugaauaauaaacuuuuuugaaauaauaaaucugguagaaaaaugagaucuaaaaaaaaaaaaaaaaaaaaaaaaaaaaaaaaaaaaaaaaaaaaaaaaaaaaaaaaaaaaaaaaaaaaaaaaaaaaaaaaaaaaaaaaaaaaaaaaaaaa

SEQ ID NO: 39525 - RNA, 1658 nt, Artificial Sequence
  mRNA product Design i-3 (hSL-A64-N5) comprising derived and/or modified sequence from LASV(Josiah;Clade IV)__NP_694870__GPCmut11 (opt1)
aggagaaagcuuaccaugggccagaucgugaccuucuuccaggaggucccccacgugaucgaggaggugaugaacaucguccugaucgcccucagcgugcuggccgugcugaaggggcucuacaacuucgcgaccugcggccuggucgggcuggugacguuccuccugcugugcggccgcuccugcaccaccagccucuacaaggggguguacgagcugcagacccuggagcucaacauggagacgcugaacaugaccaugccgcuguccugcaccaagaacaacagccaccacuacaucauggucggcaacgagaccggccucgagcugacgcugaccaacaccuccaucaucaaccacaaguucugcaaccucagcgacgcccacaagaagaaccuguacgaccacgcccugauguccaucaucagcaccuuccaccucuccauccccaacuucaaccaguacgaggccaugagcugcgacuucaacgggggcaagaucuccgugcaguacaaccugagccacuccuacgccggggacgcggccaaccacugcggcacgguggccaacgggguccugcagaccuucaugcggauggccuggggcggcagcuacaucgcgcucgacuccgggcgcggcaacugggacugcaucaugaccagcuaccaguaccugaucauccagaacaccacgugggaggaccacugccaguucucccggcccagccccaucggguaccugggccuccugucccagcgcacccgggacaucuacaucagccgccggcugcucggcaccuucaccuggacgcugagcgacuccgaggggaaggacaccccgggcggguacugccugacccgcuggaugcucaucgaggccgagcugaagugcuucggcaacaccgccguggccaagugcaacgagaagcacgacgaggaguucugcgacaugcugcggcuguucgacuucaacaagcaggccauccagcgccugaaggcggaggcccagaugagcauccagcugaucaacaaggccgugaacgcccucaucaacgaccagcugaucaugaagaaccaccuccgggacaucauggggauccccuacugcaacuacuccaaguacugcuaccucaaccacacgaccaccggccgcaccagccugcccaagugcugccuggucuccaacggcagcuaccucaacgagacgcacuucuccgacgacaucgagcagcaggccgacaacaugaucaccgagaugcugcagaaggaguacauggagcggcaggggaagacgccccugggccucguggaccuguucguguucagcaccuccuucuaccugaucagcaucuuccugcaccucgucaagaucccgacccaccgccacaucguggggaaguccugccccaagccccaccggcugaaccacaugggcaucugcagcugcgggcuguacaagcagcccggcgugccggucaaguggaagcgcugaggacuaguuauaagacugacuagcccgaugggccucccaacgggcccuccuccccuccuugcaccgagauuaaucaaaggcucuuuucagagccaccaaaaaaaaaaaaaaaaaaaaaaaaaaaaaaaaaaaaaaaaaaaaaaaaaaaaaaaaaaaaaaaaagaauu

SEQ ID NO: 39526 - RNA, 1655 nt, Artificial Sequence
  mRNA product Design i-3 (hSL-A64-N5) comprising derived and/or modified sequence from LASV(LP;Clade I)__AAF86701__GPCmut11 (opt1)
aggagaaagcuuaccaugggccagaucaucaccuucuuccaggaggugccccacgucaucgaggaggugaugaacaucgugcugaucgcccucagccugcuggccauccucaaggggcuguacaacaucgcgaccugcggcaucaucgggcuggucgccuuccucuuccugugcggcaaguccugcagccugacgcucaagggcggguacgagcugcagacccuggagcucaacauggagacccugaacaugaccaugccgcuguccugcacgaagaacagcucccaccacuacauccgcgugggcaacgagaccgggcucgagcugacccugaccaacacgagcaucaucaaccacaaguucugcaaccucuccgacgcccacaagaagaaccuguacgaccacgcccugaugagcaucaucuccaccuuccaccucagcauccccaacuucaaccaguacgaggccauguccugcgacuucaacggcgggaagaucagcgugcaguacaaccugucccacagcuacgcgggcgacgccgccgagcacugcgggaccgucgccaacggcgugcugcagaccuucaugcggauggcguggggcgggcgcuacaucgcccucgacuccggcaaggggaacugggacugcaucaugacgagcuaccaguaccugaucauccagaacaccaccugggaggaccacugccaguucucccggcccagccccaucggcuaccugggccuccugucccagcgcacccgggacaucuacaucagccgccggcugcucgggacguucaccuggacccugagcgacuccgagggcaacgagacccccgggggcuacugccugacgcgcuggaugcucaucgaggccgagcugaagugcuucgggaacaccgccguggccaagugcaacgagaagcacgacgaggaguucugcgacaugcugcggcuguucgacuucaacaagcaggcgauccgccggcugaaggccgaggcccagaugagcauccagcugaucaacaaggccgucaacgcccucaucaacgaccagcugaucaugaagaaccaccuccgcgacaucaugggcauccccuacugcaacuacuccaaguacugcuaccucaaccacaccagcuccggccggaccagccugcccaagugcugccugaucuccaacgggagcuaccucaacgagacgcaguucuccgacgacaucgagcagcaggcggacaacaugaucaccgagaugcugcagaaggaguacaucgagcgccagggcaagaccccgcuggggcucguggacaucuucaucuucagcaccuccuucuaccugaucagcaucuuccugcaccugaucaagaucccgacgcaccggcacaucgugggcaagcccugccccaagccccaccgccucaaccacaugggggucugcuccugcggccuguacaagcacccgggcgugcccaccaaguggaagcggugaggacuaguuauaagacugacuagcccgaugggccucccaacgggcccuccuccccuccuugcaccgagauuaaucaaaggcucuuuucagagccaccaaaaaaaaaaaaaaaaaaaaaaaaaaaaaaaaaaaaaaaaaaaaaaaaaaaaaaaaaaaaaaaaagaauu

SEQ ID NO: 39527 - RNA, 1655 nt, Artificial Sequence
  mRNA product Design i-3 (hSL-A64-N5) comprising derived and/or modified sequence from LASV(803213;Clade II)__AAF86703__GPCmut11 (opt1)
aggagaaagcuuaccaugggccagaucaucaccuucuuccaggaggugccccacgucaucgaggaggugaugaacaucgugcugaucgcccucagccugcuggccauccucaaggggaucuacaacgucgcgaccugcggccuguucgggcugaucuccuuccuccugcugugcggccgcagcugcuccgugacguacaaggggguguacgagcuccagacccuggagcugaacauggccaaccucaacaugaccaugccgcugagcugcaccaagaacaacucccaccacuacaucauggucggcaacgagacgggccuggagcucacccugaccaacaccagcaucaucaaccacaaguucugcaaccuguccgacgcccacaagaagaaccucuacgaccacgcccugaugagcaucaucuccacguuccaccugagcauccccaacuucaaccaguacgaggccauguccugcgacuucaacgggggcaagaucagcgugcaguacaaccucucccacagcuucgcgguggacgccgccaaccacugcgggaccaucgccaacggcguccugcagaccuucaugcggauggcguggggcggguccuacaucgcccuggacagcggcaaggggaacugggacugcaucaugaccuccuaccaguaccucaucauccagaacacgaccugggaggaccacugccaguucagccgccccucccccaucggcuaccuggggcugcucagccagcggacccgcgacaucuacaucagccggcgccugcugggcaccuucacguggacccucuccgacagcgagggcaacgaggcccccgggggcuacugccugacccgguggaugcugaucgaggccgagcucaagugcuucgggaacaccgccguggcgaagugcaacgagaagcacgacgaggaguucugcgacaugcugcgccuguucgacuucaacaagcaggccaucaagcggcucaagacggaggcccagauguccauccagcugaucaacaaggccgugaacgcccugaucaacgaccagcucaucaugaagaaccaccuccgcgacaucaugggcauccccuacugcaacuacagccgguacugcuaccugaaccacaccgucaccgggaagaccucccugccccgcugcugccuggugagcaacggcuccuaccugaacgagacgcacuucagcgacgacaucgagcagcaggcggacaacaugaucaccgagaugcuccagaaggaguacauggaccggcagggcaagaccccgcuggggcugguggaccucuucgucuucuccaccagcuucuaccugaucuccaucuuccugcaccuggugaagaucccgacgcaccgccacaucgugggcaagcccugccccaagccccaccggcucaaccacauggggaucugcagcugcggccuguacaagcacccggggguccccgugaaguggaagcgcugaggacuaguuauaagacugacuagcccgaugggccucccaacgggcccuccuccccuccuugcaccgagauuaaucaaaggcucuuuucagagccaccaaaaaaaaaaaaaaaaaaaaaaaaaaaaaaaaaaaaaaaaaaaaaaaaaaaaaaaaaaaaaaaaagaauu

SEQ ID NO: 39528 - RNA, 1655 nt, Artificial Sequence
  mRNA product Design i-3 (hSL-A64-N5) comprising derived and/or modified sequence from LASV(GA391;Clade III)__CAA36645__GPCmut11 (opt1)
aggagaaagcuuaccaugggccagaucgugaccuucuuccaggaggucccccacgugaucgaggaggugaugaacaucguccugaucgcccucagcauccuggccauccugaaggggcucuacaacguggcgaccugcggccugaucgggcuggugacguuccuccugcuguccggccgcagcugcucccucaucuacaaggggaccuacgagcugcagacccuggagcucaacauggagacccugaacaugacgaugccgcugagcugcaccaagaacaacucccaccacuacauccgggucggcaacgagaccggccucgagcugacccugacgaacaccagcauccucaaccacaaguucugcaaccuguccgacgcccacaagcgcaaccuguacgaccacagccucauguccaucaucagcaccuuccaccuguccauccccaacuucaaccaguacgaggccaugagcugcgacuucaacgggggcaagaucaccgugcaguacaaccugucccacagcuucgccguggacgccgcggggcacugcggcacgcucgccaacgggguccugcagaccuucaugcggauggccuggggcggcuccuacaucgcccuggacagcgggcgcggcaacugggacugcaucaugaccuccuaccaguaccucaucauccagaacaccacgugggacgaccacugccaguucagccggcccucccccaucggguaccugggccugcucagccagcgcacccgggacaucuacaucagccgccggcugcugggcaccuucaccuggacgcucuccgacagcgaggggaacgagaccccgggcggguacugccugacccgcuggaugcugaucgaggcggagcucaagugcuucggcaacaccgccguggccaagugcaacgagaagcacgacgaggaguucugcgacaugcugcggcuguucgacuucaacaagcaggccauccgccggcucaagacggaggcccagauguccauccagcugaucaacaaggcggugaacgcccugaucaacgaccagcucaucaugaagaaccaccuccgcgacaucauggggauccccuacugcaacuacagccgguacugcuaccugaaccacaccuccaccggcaagaccagccugccccgcugcugccugaucuccaacggcagcuaccugaacgagacgaaguucuccgacgacaucgagcagcaggccgacaacaugaucaccgagaugcuccagaaggaguacaucgaccggcaggggaagacgccccugggccuggucgaccuguucguguucagcaccuccuucuaccucaucagcaucuuccugcaccuggugaagaucccgacccaccgccacaucgucgggaagcccugccccaagccccaccggcucaaccacaugggcaucugcuccugcgggcuguacaagcagccgggcgugcccgugcgcuggaagcggugaggacuaguuauaagacugacuagcccgaugggccucccaacgggcccuccuccccuccuugcaccgagauuaaucaaaggcucuuuucagagccaccaaaaaaaaaaaaaaaaaaaaaaaaaaaaaaaaaaaaaaaaaaaaaaaaaaaaaaaaaaaaaaaaagaauu

SEQ ID NO: 39529 - RNA, 1658 nt, Artificial Sequence
  mRNA product Design i-3 (hSL-A64-N5) comprising derived and/or modified sequence from LASV(AV;Clade V)__CCA30314__GPCmut11 (opt1)
aggagaaagcuuaccaugggccagaucgugaccuucuuccaggaggucccccacgugaucgaggaggugaugaacaucguccugaucgcccucagcauccuggccgugcugaaggggcucuacaacaucgcgaccugcggccugaucgggcugaucacguuccuccugcugugcggccgcuccugcagcuccaaccucuacaaggggguguacgagcugcagagccuggaccucaacauggagacccugaacaugaccaugccgcuguccugcaccaagaacaacagccaccacuacauccgggucggcaacgacacgggccucgagcugacccugaccaacaccuccauccucaaccacaaguucugcaaccugagcgacgcccacaagaaggaccuguacgaccacgcccucauguccaucaucagcacguuccaccuguccauccccaacuucaaccaguacgaggccaugagcugcgacuucaacgggggcaagaucuccgugcaguacaaccugagccacuccuacgccaucgacgcggccaaccacugcgggaccguggccaacggcauccuccagaccuucaugcgcauggccuggggcgggagcuacaucgcgcuggacuccggccgggggaacugggacugcaucaugaccagcuaccaguaccugaucauccagaacacgaccugggagaaccacugccaguucucccgccccagccccaucggcuaccucgggcugcugagccagcggacccgcgacaucuacaucucccggcgccuccugggcaccuucacguggacccugagcgacuccgagggcaacgccacccccgggggcuacugccucacccgguggaugcugaucgaggccgagcugaagugcuucgggaacacggccgucgccaagugcaacgagaagcacgacgaggaguucugcgacaugcuccgccuguucgacuucaacaagcaggcgaucagccggcugaaguccgaggcccagaugagcauccagcucaucaacaaggccgugaacgcccugaucaacgaccagcugaucaugaagaaccaccuccgcgacaucaugggcauccccuacugcaacuacuccaaguacugcuaccugaaccacaccaucaccgggaagaccagccugcccaagugcugccucguguccaacggcagcuaccugaacgagacgcacuucuccgacgacaucgagcagcaggccgacaacaugaucaccgagaugcugcagaaggaguacauggagcggcagggcaagaccccgcucgggcuggucgaccuguucguguucagcaccuccuucuaccugaucagcaucuuccuccgccuggugaagaucccgacgcaccggcacaucgucggcaagcccugccccaagccccaccgccugaaccacauggggaucugcuccugcggccucuacaagcagccgggggugcccgugcgguggaagcgcugaggacuaguuauaagacugacuagcccgaugggccucccaacgggcccuccuccccuccuugcaccgagauuaaucaaaggcucuuuucagagccaccaaaaaaaaaaaaaaaaaaaaaaaaaaaaaaaaaaaaaaaaaaaaaaaaaaaaaaaaaaaaaaaaagaauu

SEQ ID NO: 39530 - RNA, 1655 nt, Artificial Sequence
  mRNA product Design i-3 (hSL-A64-N5) comprising derived and/or modified sequence from LASV(Togo/2016/7082;Clade VI)__AMR44577__GPCmut11 (opt1)
aggagaaagcuuaccaugggccagaucaucaccuucuuccaggaggugccccacgucaucgaggaggugaugaacaucgugcugaucgcccucagccugcuggccauccucaagggggucuacaacguggcgaccugcggcaucaucgggcuggugacguuccuguuccucugcggccgcuccugcagccugaucuacaagggguccuacgagcugcagacccucgagcugaacauggagacccugaacaugaccaugccgcucagcugcacgaagaacuccagccaccacuacauccgggucggcaacgagaccggccuggagcugacccucaccaacacguccaucaucaaccacaaguucugcaaccugagcgacgcccacaagcgcaaccuguacgaccacgcccucauguccauccugagcaccuuccaccuguccauccccaacuucaaccaguacgaggccaugagcugcgacuucaacgggggcaagaucuccgugcaguacaaccucagccacgccuacgcgguggacgccgccgagcacugcgggaccgucgccaacggcgugcugcagaccuucaugcggauggcguggggcggguccuacaucgcccuggacagcggccgcgggaacugggacugcaucaugacguccuaccaguaccucaucauccagaacaccaccugggaggaccacugccaguucagccggcccucccccaucggcuaccuggggcugcucagccagcgcacccgggacaucuacaucagccgccggcugcugggcacguucaccuggacccucuccgacagcgagggcaacgagacccccgggggcuacugccugacgcgcuggaugcugaucgaggccgagcucaagugcuucgggaacaccgccguggccaagugcaacgagaagcacgacgaggaguucugcgacaugcugcggcuguucgacuucaacaagcaggcgauccagcgccucaaguccgaggcccagaugagcauccagcugaucaacaaggccgucaacgcccugaucaacgaccagcucaucaugaagaaccaccuccgggacaugaugggcauccccuacugcaacuacuccaaguacugcuaccugaaccacaccagcuccgggcgcaccagccugcccaagugcugccugguguccaacggcagcuaccugaacgagacgcacuucuccgacgacaucgagcagcaggccgacaacaugaucaccgagaugcuccagaaggaguacaucgaccggcagggcaagaccccgcuggggcugguggaccucuucgucuucagcaccuccuucuaccugaucagcaucuuccugcaccugaucaagaucccgacgcaccgccacaucgugggcaagcccugccccaagccccaccggcucaaccacauggggaucugcuccugcggccuguacaagcagccgggggugcccacccgcuggaagcggugaggacuaguuauaagacugacuagcccgaugggccucccaacgggcccuccuccccuccuugcaccgagauuaaucaaaggcucuuuucagagccaccaaaaaaaaaaaaaaaaaaaaaaaaaaaaaaaaaaaaaaaaaaaaaaaaaaaaaaaaaaaaaaaaagaauu

SEQ ID NO: 39531 - RNA, 1655 nt, Artificial Sequence
  mRNA product Design i-3 (hSL-A64-N5) comprising derived and/or modified sequence from LASV(KAK-428;Clade n.d. (VII))__ANH09740__GPCmut11 (opt1)
aggagaaagcuuaccaugggccagaucgugaccuucuuccaggaggucccccacgugaucgaggaggugaugaacaucguccugaucgcccucagccugcuggccauccucaaggggcuguacaacuucgcgaccugcggcgugaucgggcugaucacguuccuccugcugugcggccgcuccugcagcgccaccuacaaggggcaguacgagcuccagacccuggagcugaacauggagucccucaacaugaccaugccgcugagcugcacgaagaacaacucccaccacuacauccgggccggcaacaacaccggccuggagcucacccugaccaacacgagcaucaucucccacaaguucugcaaccugagcgacgcccacaagaagaaccucuacgaccacacccugauguccaucaucaccaccuuccaccugagcauccccaacuucaaccaguacgaggccauguccugcgacuucaacgggggcaagaucagcauccaguacaaccucucccacagcuacgcgggggacgccgcccagcacugcggcacgguggccaacgggguccugcagaccuucaugcgcauggcguggggcggcuccuaccuggcccucgacagcgggcggcgcggcugggacugcaucaucuccagcuaccaguaccugaucauccagaacaccaccugggacgaccacugccaguucucccggcccagccccaucggguaccugggcuucgugagccagaagacgcgcgacaucuacaucucccggcgccuccugggcaccuucaccuggacccugagcgacuccgaggggcacgacaugccgggcggguacugccucacgcgguggaugcugaucgaggccgaccugaagugcuucggcaacaccgccguggccaagugcaacgagaagcacgacgaggaguucugcgacauguggcgccucuucgacuucaacaagcaggcgauccagcggcugaaggccgaggcccagaugaacauccagcugaucaacaaggccgucaacgcccucaucaacgaccagcugaugaugaagaaccaccuccgcgacaucauggggauccccuacugcaacuacagcaaguucugcuaccugaacaacaccaccacgggccggaccucccugccccgcugcugccugaucagcaacggcuccuaccucaacgagacccacuucagcgacgacaucgagcagcaggcggacaacaugaucaccgagaugcugcagaaggaguacauggaccggcaggggaagacgccccugggccucguggaccuguucguguucuccaccagcuucuaccugaucaccaucuuccuccaccuggucaagaucccgacccaccgccacaucguggggaagcccugccccaagccccaccggcugaaccacaugggcaucugcuccugcgggcuguacaagcagccgggcgugcccguccgcuggaagcggugaggacuaguuauaagacugacuagcccgaugggccucccaacgggcccuccuccccuccuugcaccgagauuaaucaaaggcucuuuucagagccaccaaaaaaaaaaaaaaaaaaaaaaaaaaaaaaaaaaaaaaaaaaaaaaaaaaaaaaaaaaaaaaaaagaauu

SEQ ID NO: 39532 - RNA, 1655 nt, Artificial Sequence; identical to SEQ ID NO: 39526
  mRNA product Design i-3 (hSL-A64-N5) comprising derived and/or modified sequence from LASV(Pinneo-NIG-1969;Clade I)__AIT17836__GPCmut11 (opt1)

SEQ ID NO: 39533 - RNA, 1655 nt, Artificial Sequence
  mRNA product Design i-3 (hSL-A64-N5) comprising derived and/or modified sequence from LASV(ISTH0009-NIG-2011;Clade II)__AIT17404__GPCmut11 (opt1)
aggagaaagcuuaccaugggccagaucaucaccuucuuccaggaggugccccacgucaucgaggaggugaugaacaucgugcugaucgcccucagccugcuggccauccucaaggggaucuacaacgucgcgaccugcggccuguucgggcugguguccuuccuccugcugugcggccgcagcugcuccacgaccuacaaggggguguacgagcuccagacccuggagcuggacauggccagccucaacaugaccaugccgcuguccugcacgaagaacaacagccaccacuacaucauggucggcaacgagaccggccuggagcucacccugaccaacacguccaucaucaaccacaaguucugcaaccugagcgacgcccacaagaagaaccucuacgaccacgcccugauguccaucaucagcaccuuccaccuguccauccccaacuucaaccaguacgaggccaugagcugcgacuucaacgggggcaagaucuccgugcaguacaaccucagccacgcguacgccguggacgccgccaaccacugcgggaccaucgcgaacggcguccugcagaccuucaugcggauggccuggggcggguccuacaucgcccuggacagcggcaagggguccugggacugcaucaugacgagcuaccaguaccucaucauccagaacaccaccugggaggaccacugccaguucucccgccccagccccaucggcuaccuggggcugcucagccagcggacccgcgacaucuacaucucccggcgccugcugggcacguucaccuggacccucagcgacuccgagggcaacgagacccccgggggcuacugccugacgcgguggaugcugaucgaggccgagcucaagugcuucgggaacaccgccguggcgaagugcaacgagaagcacgacgaggaguucugcgacaugcugcgccuguucgacuucaacaagcaggccauccggcgccucaagaccgaggcccagaugagcauccagcugaucaacaaggccgugaacgcccugaucaacgaccagcucaucaugaagaaccaccuccgggacaucaugggcaucccguacugcaacuacuccaaguacugcuaccugaaccacaccgucacggggaagaccagccugccccgcugcugccugguguccaacggcagcuaccugaacgagacccacuucuccgacgacaucgagcagcaggcggacaacaugaucaccgagcuccugcagaaggaguacauggaccggcagggcaagacgccccuggggcucguggaccuguucgucuucagcaccuccuucuaccugaucagcaucuuccugcaccucaucaagaucccgacccaccgccacaucaccggcaagcccugccccaagccccaccggcugaaccacauggggaucugcuccugcggccuguacaagcacccgggggugcccgugaaguggaagcgcugaggacuaguuauaagacugacuagcccgaugggccucccaacgggcccuccuccccuccuugcaccgagauuaaucaaaggcucuuuucagagccaccaaaaaaaaaaaaaaaaaaaaaaaaaaaaaaaaaaaaaaaaaaaaaaaaaaaaaaaaaaaaaaaaagaauu

SEQ ID NO: 39534 - RNA, 1655 nt, Artificial Sequence
  mRNA product Design i-3 (hSL-A64-N5) comprising derived and/or modified sequence from LASV(ISTH2010-NIG-2012;Clade II)__AIT17482__GPCmut11 (opt1)
aggagaaagcuuaccaugggccagaucaucaccuucuuccaggaggugccccacgucaucgaggaggugaugaacaucgugcugaucgcccucagccugcuggccauccucaaggggaucuacaacgucgcgaccugcggccuguucgggcugguguccuuccuccugcugugcggccgcagcugcuccacgaccuacaaggggguguacgagcuccagacccuggagcuggacauggccagccucaacaugaccaugccgcuguccugcacgaagaacaacagccaccacuacaucauggucggcaacgagaccggccuggagcucacccugaccaacacguccaucaucaaccacaaguucugcaaccugagcgacgcccacaagaagaaccucuacgaccacgcccugauguccaucaucagcaccuuccaccuguccauccccaacuucaaccaguacgaggccaugagcugcgacuucaacgggggcaagaucuccgugcaguacaaccucagccacgcguacgccguggacgccgccaaccacugcgggaccaucgcgaacggcguccugcagaccuucaugcggauggccuggggcggguccuacaucgcccuggacagcggcaagggguccugggacugcaucaugacgagcuaccaguaccucaucauccagaacaucaccugggaggaccacugccaguucucccgccccagccccaucggcuaccuggggcugcucagccagcggacccgcgacaucuacaucucccggcgccugcugggcaccuucacguggacccucagcgacuccgagggcaacgagacccccgggggcuacugccugacccgguggaugcugaucgaggccgagcucaagugcuucgggaacacggccguggcgaagugcaacgagaagcacgacgaggaguucugcgacaugcugcgccuguucgacuucaacaagcaggccauccggcgccucaagaccgaggcccagaugagcauccagcugaucaacaaggccgugaacgcccugaucaacgaccagcucaucaugaagaaccaccuccgggacaucaugggcauccccuacugcaacuacuccaaguacugcuaccugaaccacaccgucaccgggaagacgagccugccccgcugcugccugguguccaacggcagcuaccugaacgagacccacuucuccgacgacaucgagcagcaggcggacaacaugaucaccgagcuccugcagaaggaguacaucgaccggcagggcaagaccccgcuggggcucguggaccuguucgucuucagcacguccuucuaccugaucagcaucuuccugcaccucgugaagaucccgacccaccgccacguggucggcaagcccugccccaagccccaccggcugaaccacauggggaucugcuccugcggccuguacaagcacccgggggugcccgugaaguggaagcgcugaggacuaguuauaagacugacuagcccgaugggccucccaacgggcccuccuccccuccuugcaccgagauuaaucaaaggcucuuuucagagccaccaaaaaaaaaaaaaaaaaaaaaaaaaaaaaaaaaaaaaaaaaaaaaaaaaaaaaaaaaaaaaaaaagaauu

SEQ ID NO: 39535 - RNA, 1655 nt, Artificial Sequence
  mRNA product Design i-3 (hSL-A64-N5) comprising derived and/or modified sequence from LASV(Lassa virus/H.sapiens-wt/NGA/2015/ISTH_0543;Clade II)__AVO03639__GPCmut11 (opt1)
aggagaaagcuuaccaugggccagaucaucaccuucuuccaggaggugccccacgucaucgaggaggugaugaacaucgugcugaucgcccucagccugcuggccauccucaaggggaucuacaacgucgcgaccugcggccuguucgggcugguguccuuccuccugcugugcggccgcagcugcuccacgaccuacaaggggguguacgagcuccagacccuggagcuggacauggccaaccucaacaugaccaugccgcugagcugcacgaagaacaacucccaccacuacaucauggucggcaacgagaccggccuggagcucacccugaccaacacgagcaucaucaaccacaaguucugcaaccuguccgacgcccacaagaagaaccucuacgaccacgcccugaugagcaucaucuccaccuuccaccugagcauccccaacuucaaccaguacgaggccauguccugcgacuucaacgggggcaagaucagcgugcaguacaaccucucccacaccuacgcgguggacgccgccaaccacugcgggaccaucgccaacggcguccugcagacguucaugcggauggcguggggcgggagcuacaucgcccuggacuccggcaaggggagcugggacugcaucaugaccuccuaccaguaccucgugauccagaacaccaccugggaggaccacugccaguucagccgccccucccccaucggcuaccuggggcugcucagccagcggacgcgcgacaucuacaucagccggcgccugcugggcaccuucaccuggacccucuccgacagcgagggcaacgagacgcccgggggcuacugccugacccgguggaugcugaucgaggccgagcucaagugcuucgggaacaccgccguggccaagugcaacgagaagcacgacgaggaguucugcgacaugcugcgccuguucgacuucaacaagcaggcgauccggcgccucaagaccgaggcccagauguccauccagcugaucaacaaggccgucaacgcccugaucaacgaccagcucaucaugaagaaccaccuccgggacaucaugggcauccccuacugcaacuacagcaaguacugcuaccugaaccacacggugaccgggaagaccucccugccccgcugcugccuggugagcaacggcuccuaccugaacgagacccacuucagcgacgacaucgagcagcaggccgacaacaugaucacggagcuccugcagaaggaguacaucgaccggcagggcaagaccccgcuggggcucgucgaccuguucguguucuccaccagcuucuaccugaucuccaucuuccugcaccucgugaagaucccgacccaccgccacaucacgggcaagcccugccccaagccccaccggcugaaccacauggggaucugcagcugcggccuguacaagcacccggggguccccgugaaguggaagcgcugaggacuaguuauaagacugacuagcccgaugggccucccaacgggcccuccuccccuccuugcaccgagauuaaucaaaggcucuuuucagagccaccaaaaaaaaaaaaaaaaaaaaaaaaaaaaaaaaaaaaaaaaaaaaaaaaaaaaaaaaaaaaaaaaagaauu

SEQ ID NO: 39536 - RNA, 1655 nt, Artificial Sequence
  mRNA product Design i-3 (hSL-A64-N5) comprising derived and/or modified sequence from LASV(Lassa virus/H.sapiens-wt/NGA/2016/ISTH_0009;Clade II)__AVO03571__GPCmut11 (opt1)
aggagaaagcuuaccaugggccagaucaucaccuucuuccaggaggugccccacgucaucgaggaggugaugaacaucgugcugaucgcccucagccugcuggccauccucaaggggaucuacaacgucgcgaccugcggccugcuggggcucguguccuuccugcugcucugcggccgcagcugcuccacgaccuacaaggggguguacgagcugcagacccuggagcucgacauggccagccugaacaugaccaugccgcuguccugcacgaagaacaacagccaccacuacaucauggucggcaacgagaccggccucgagcugacccugaccaacacguccaucaucaaccacaaguucugcaaccucagcgacgcccacaagaagaaccuguacgaccacgcccugauguccaucaucagcaccuuccaccucuccauccccaacuucaaccaguacgaggccaugagcugcgacuucaacgggggccggaucuccgugcaguacaaccugagccacuccuacgcgguggacgccgccaaccacugcgggaccaucgccaacggcguccugcagaccuucaugcgcauggcguggggcgggagcuacaucgcccucgacuccggcaaggggagcugggacugcaucaugacguccuaccaguaccugaucauccagaacaccaccugggaggaccacugccaguucagccggcccagccccaucggcuaccuggggcuccugucccagcgcacccgggacaucuacaucagccgccggcugcucggcacguucaccuggacccuguccgacagcgagggcaacgagacccccgggggcuacugccugacgcgcuggaugcucaucgaggccgagcugaagugcuucgggaacaccgccguggccaagugcaacgagaagcacgacgaggaguucugcgacaugcugcggcuguucgacuucaacaagcaggcgauccgccggcugaagaccgaggcccagauguccauccagcugaucaacaaggccgugaacgcccucaucaacgaccagcugaucaugaagaaccaccuccgcgacaucaugggcaucccguacugcaacuacagcaaguacugcuaccucaaccacaccgucacggggaagaccucccugccccggugcugccuggugagcaacggcuccuaccucaacgagacccacuucagcgacgacaucgagcagcaggccgacaacaugaucaccgagcugcugcagaaggaguacaucgaccgccagggcaagacgccccucgggcugguggaccuguucgucuucuccaccagcuucuaccugaucuccaucuuccuccaccuggugaagaucccgacccaccggcacaucaccggcaagcccugccccaagccccaccgccugaaccacauggggaucugcagcugcggccucuacaaccacccgggggugcccgucaaguggaagcggugaggacuaguuauaagacugacuagcccgaugggccucccaacgggcccuccuccccuccuugcaccgagauuaaucaaaggcucuuuucagagccaccaaaaaaaaaaaaaaaaaaaaaaaaaaaaaaaaaaaaaaaaaaaaaaaaaaaaaaaaaaaaaaaaagaauu

SEQ ID NO: 39537 - RNA, 1655 nt, Artificial Sequence
  mRNA product Design i-3 (hSL-A64-N5) comprising derived and/or modified sequence from LASV(Lassa virus/H.sapiens-wt/NGA/2016/ISTH_0017;Clade II)__AVO03567__GPCmut11 (opt1)
aggagaaagcuuaccaugggccagaucaucaccuucuuccaggaggugccccacgucaucgaggaggugaugaacaucgugcugaucgcccucagccugcuggccauccucaaggggaucuacaacgucgcgaccugcggccuguucgggcugguguccuuccuccugcugugcggccgcagcugcuccacgaccuacaaggggguguacgagcuccagacccuggagcuggacauggccagccucaacaugaccaugccgcuguccugcacgaagaacaacagccaccacuacaucauggucggcaacgagaccggccuggagcucacccugaccaacacguccaucaucaaccacaaguucugcaaccugagcgacgcccacaagaagaaccucuacgaccacgcccugauguccaucaucagcaccuuccaccuguccauccccaacuucaaccaguacgaggccaugagcugcgacuucaacgggggcaagaucuccgugcaguacaaccucagccacaccuacgcgaucgacgccgccaaccacugcgggaccaucgccaacggcgugcugcagacguucaugcggauggcguggggcggguccuacaucgcccuggacagcggcaagggguccugggacugcaucaugaccagcuaccaguaccucaucauccagaacaccaccugggaggaccacugccaguucucccgccccagccccaucggcuaccuggggcugcucagccagcggacgcgcgacaucuacaucucccggcgccugcugggcaccuucaccuggacccucagcgacuccgagggcaacgagacgcccgggggcuacugccugacccgguggaugcugaucgaggccgagcucaagugcuucgggaacaccgccgucgccaagugcaacgagaagcacgacgaggaguucugcgacaugcugcgccuguucgacuucaacaagcaggcgauccggcgccucaagaccgaggcccagaugagcauccagcugaucaacaaggccgugaacgcccugaucaacgaccagcucaucaugaagaaccaccuccgggacaucaugggcauccccuacugcaacuacuccaaguacugcuaccugaaccacacggugaccgggaagaccagccugccccgcugcugccuggucuccaacggcagcuaccugaacgagacccacuucuccgacgacaucgagcagcaggccgacaacaugaucacggagcuccugcagaaggaguacauggaccggcagggcaagaccccgcuggggcucguggaccuguucguguucagcaccuccuucuaccugaucagcaucuuccugcaccucguccgcaucccgacccaccggcacgugaucggcaagcccugccccaagccccaccgccugaaccacauggggaucugcuccugcggccuguacaagcacccgggggugcccgucaaguggaagcggugaggacuaguuauaagacugacuagcccgaugggccucccaacgggcccuccuccccuccuugcaccgagauuaaucaaaggcucuuuucagagccaccaaaaaaaaaaaaaaaaaaaaaaaaaaaaaaaaaaaaaaaaaaaaaaaaaaaaaaaaaaaaaaaaagaauu

SEQ ID NO: 39538 - RNA, 1655 nt, Artificial Sequence
  mRNA product Design i-3 (hSL-A64-N5) comprising derived and/or modified sequence from LASV(Lassa virus/H.sapiens-wt/NGA/2018/ISTH_0959;Clade II)__AVV65099__GPCmut11 (opt1)
aggagaaagcuuaccaugggccagaucaucaccuucuuccaggaggugccccacgucaucgaggaggugaugaacaucgugcugaucgcccucagccugcuggccauccucaaggggaucuacaacgucgugaccugcggccuguucgggcugguguccuuccuccugcugugcggccgcagcugcuccacgaccuacaagggggucuacgagcuccagacccuggagcuggacauggcgagccucaacaugaccaugccgcuguccugcacgaagaacaacagccaccacuacaucauggugggcaacgagaccggccuggagcucacccugaccaacacguccaucaucaaccacaaguucugcaaccugagcgacgcccacaagaagaaccucuacgaccacgcccugauguccaucaucagcaccuuccaccuguccauccccaacuucaaccaguacgaggccaugagcugcgacuucaacgggggcaagaucuccgugcaguacaaccucagccacgccuacgcgaucgacgccgccaaccacugcgggaccaucgccaacggcguccugcagaccuucaugcggauggcguggggcggguccuacaucgcccuggacagcggcaagggguccugggacugcaucaugacgagcuaccaguaccucaucauccagaacaccaccugggaggaccacugccaguucucccgccccagccccaucggcuaccuggggcugcucagccagcggacccgcgacaucuacaucucccggcgccugcugggcacguucaccuggacccucagcgacuccgagggcaacgagacccccgggggcuacugccugacgcgguggaugcugaucgaggccgagcucaagugcuucgggaacaccgccguggccaagugcaacgagaagcacgacgaggaguucugcgacaugcugcgccuguucgacuucaacaagcaggcgauccggcgccucaagaccgaggcccagaugagcauccagcugaucaacaaggccgugaacgcccugaucaacgaccagcucaucaugaagaaccaccuccgggacaucaugggcaucccguacugcaacuacuccaaguacugcuaccugaaccacaccgucacggggaagaccagccugccccgcugcugccugguguccaacggcagcuaccugaacgagacccacuucuccgacgacaucgagcagcaggccgacaacaugaucaccgagcuccugcagaaggaguacaucgaccggcagggcaagacgccccuggggcucguggaccuguucgucuucagcaccuccuucuaccugaucagcaucuuccugcaccucgugaagaucccgacccaccgccacgugaucggcaagcccugccccaagccccaccggcugaaccacauggggaucugcuccugcggccuguacaagcacccggggguccccgugaaguggaagcgcugaggacuaguuauaagacugacuagcccgaugggccucccaacgggcccuccuccccuccuugcaccgagauuaaucaaaggcucuuuucagagccaccaaaaaaaaaaaaaaaaaaaaaaaaaaaaaaaaaaaaaaaaaaaaaaaaaaaaaaaaaaaaaaaaagaauu

SEQ ID NO: 39539 - RNA, 1655 nt, Artificial Sequence
  mRNA product Design i-3 (hSL-A64-N5) comprising derived and/or modified sequence from LASV(LASV003-NIG-2008;Clade II)__AIT17580__GPCmut11 (opt1)
aggagaaagcuuaccaugggccagaucaucaccuucuuccaggaggugccccacgucaucgaggaggugaugaacaucgugcugaucgcccucagccugcuggccauccucaaggggaucuacaacgucgcgaccugcggccuguucgggcugguguccuuccuccugcugugcggccgcagcugcuccacgaccuacaaggggguguacgagcuccagacccuggagcuggacauggccagccucaacaugaccaugccgcuguccugcacgaagaacaacagccaccacuacaucauggucggcaacgagaccggccuggagcucacccugaccaacacguccaucaucaaccacaaguucugcaaccugagcgacgcccacaagaagaaccucuacgaccacgcccugauguccaucaucagcaccuuccaccuguccauccccaacuucaaccaguacgaggccaugagcugcgacuucaacgggggcaagaucuccgugcaguacaaccucagccacaccuacgcgguggacgccgccaaccacugcgggaccaucgccaacggcguccugcagacguucaugcggauggcguggggcggguccuacaucgcccuggacagcggcaagggguccugggacugcaucaugaccagcuaccaguaccucaucauccagaacaccaccugggaggaccacugccaguucucccgccccagccccaucggcuaccuggggcugcucagccagcggacgcgcgacaucuacaucucccggcgccugcugggcaccuucaccuggacccucagcgacuccgagagcaacgagacgccgggcggguacugccugacccgguggaugcugaucgaggccgagcucaagugcuucggcaacaccgccguggccaagugcaacgagaagcacgacgaggaguucugcgacaugcugcgccuguucgacuucaacaagcaggcgauccggcgccucaaggccgaggcccagauguccauccagcugaucaacaaggccgugaacgcccugaucaacgaccagcucaucaugaagaaccaccuccgggacaucauggggauccccuacugcaacuacagcaaguacugcuaccugaaccacaccgucacgggccgcaccucccugccccggugcugccuggugagcaacggguccuaccugaacgagacccacuucagcgacgacaucgagcagcaggcggacaacaugaucaccgagcuccugcagaaggaguacauggaccgccagggcaagacgccccugggccucguggaccuguucgucuucuccaccagcuucuaccugaucuccaucuuccugcaccucgugaagaucccgacccaccggcacgugaucgggaagcccugccccaagccccaccgccugaaccacaugggcaucugcagcugcgggcuguacaagcacccgggcguccccgugaaguggaagcggugaggacuaguuauaagacugacuagcccgaugggccucccaacgggcccuccuccccuccuugcaccgagauuaaucaaaggcucuuuucagagccaccaaaaaaaaaaaaaaaaaaaaaaaaaaaaaaaaaaaaaaaaaaaaaaaaaaaaaaaaaaaaaaaaagaauu

SEQ ID NO: 39540 - RNA, 1655 nt, Artificial Sequence
  mRNA product Design i-3 (hSL-A64-N5) comprising derived and/or modified sequence from LASV(LASV035-NIG-2009;Clade II)__AIT17588__GPCmut11 (opt1)
aggagaaagcuuaccaugggccagaucaucaccuucuuccaggaggugccccacgucaucgaggaggugaugaacaucgugcugaucgcccucagccugcuggccauccucaaggggaucuacaacgucgcgaccugcggccuguucgggcugguguccuuccuccugcugugcggccgcagcugcuccacgaccuacaaggggguguacgagcuccagacccuggagcuggacauggccagccucaacaugaccaugccgcuguccugcacgaagaacaacagccaccacuacaucauggucggcaacgagaccggccuggagcucacccugaccaacacguccaucaucaaccacaaguucugcaaccugagcgacgcccacaagaagaaccucuacgaccacgcccugauguccaucaucagcaccuuccaccuguccauccccaacuucaaccaguacgaggccaugagcugcgacuucaacgggggcaagaucuccgugcaguacaaccucagccacgcguacgccguggacgccgccaaccacugcgggaccaucgcgaacggcguccugcagaccuucaugcggauggccuggggcggguccuacaucgcccuggacagcggcaagggguccugggacugcaucaugacgagcuaccaguaccucaucauccagaacaccaccugggaggaccacugccaguucucccgccccagccccaucggcuaccuggggcugcucagccagcggacccgcgacaucuacaucucccggcgccugcugggcacguucaccuggacccucagcgacuccgagggcaacgagacccccgggggcuacugccugacgcgguggaugcugaucgaggccgagcucaagugcuucgggaacaccgccguggcgaagugcaacgagaagcacgacgaggaguucugcgacaugcugcgccuguucgacuucaacaagcaggccauccggcgccucaaggccgaggcccagaugagcauccagcugaucaacaaggccgugaacgcgcugaucaacgaccagcucaucaugaagaaccaccuccgggacaucaugggcauccccuacugcaacuacuccaaguacugcuaccugaaccacaccgucaccgggaagacgagccugccccgcugcugccugguguccaacggcagcuaccugaacgagacccacuucuccgacgacaucgagcagcaggccgacaacaugaucaccgagcuccugcagaaggaguacaucgaccggcagggcaagaccccgcuggggcucguggaccuguucgucuucagcacguccuucuaccugaucagcaucuuccugcaccucgugaagaucccgacccaccgccacgugaucggcaagcccugccccaagccccaccggcugaaccacauggggaucugcuccugcggccuguacaagcacccggggguccccgugaaguggaagcgcugaggacuaguuauaagacugacuagcccgaugggccucccaacgggcccuccuccccuccuugcaccgagauuaaucaaaggcucuuuucagagccaccaaaaaaaaaaaaaaaaaaaaaaaaaaaaaaaaaaaaaaaaaaaaaaaaaaaaaaaaaaaaaaaaagaauu

SEQ ID NO: 39541 - RNA, 1655 nt, Artificial Sequence
  mRNA product Design i-3 (hSL-A64-N5) comprising derived and/or modified sequence from LASV(LASV1000-NIG-2009;Clade II)__AIT17782__GPCmut11 (opt1)
aggagaaagcuuaccaugggccagaucaucaccuucuuccaggaggugccccacgucaucgaggaggugaugaacaucgugcugaucgcccucagccugcuggccauccucaaggggaucuacaacgucgcgaccugcggccuguucgggcugguguccuuccuccugcugugcggccgcagcugcuccacgaccuacaaggggguguacgagcuccagacccuggagcuggacauggccagccucaacaugaccaugccgcuguccugcacgaagaacaacagccaccacuacaucauggucggcaacgagaccggccuggagcucacccugaccaacacguccaucaucaaccacaaguucugcaaccugagcgacgcccacaagaagaaccucuacgaccacgcccugauguccaucaucagcaccuuccaccuguccauccccaacuucaaccaguacgaggccaugagcugcgacuucaacgggggcaagaucuccgugcaguacaaccucagccacaccuacgcgguggacgccgccaaccacugcgggaccaucgccaacggcguccugcagacguucaugcggauggcguggggcggguccuacaucgcccuggacagcggcaagggguccugggacugcaucaugaccagcuaccaguaccucaucauccagaacaccaccugggaggaccacugccaguucucccgccccagccccaucggcuaccuggggcugcucagccagcggacgcgcgacaucuacaucucccggcgccugcugggcaccuucaccuggacccucagcgacuccgagggcaacgagacgcccgggggcuacugccugacccgguggaugcugaucgaggccgagcucaagugcuucgggaacaccgccguggccaagugcaacgagaagcacgacgaggaguucugcgacaugcugcgccuguucgacuucaacaagcaggcgaucaagcggcucaagaccgaggcccagaugagcauccagcugaucaacaaggccgugaacgcccugaucaacgaccagcucaucaugaagaaccaccuccgcgacaucaugggcauccccuacugcaacuacuccaaguacugcuaccugaaccacacggucaccgggaagaccagccugccccggugcugccugguguccaacggcagcuaccugaacgagacccacuucuccgacgacaucgagcagcaggccgacaacaugaucacggagcuccugcagaaggaguacaucgaccgccagggcaagaccccgcuggggcucguggaccuguucgucuucagcaccuccuucuaccugaucagcaucuuccugcaccucgugaagaucccgacccaccggcacguggucggcaagcccugccccaagccccaccgccugaaccacauggggaucugcuccugcggccuguacaagcacccgggggugcccgugaaguggaagcggugaggacuaguuauaagacugacuagcccgaugggccucccaacgggcccuccuccccuccuugcaccgagauuaaucaaaggcucuuuucagagccaccaaaaaaaaaaaaaaaaaaaaaaaaaaaaaaaaaaaaaaaaaaaaaaaaaaaaaaaaaaaaaaaaagaauu

SEQ ID NO: 39542 - RNA, 1655 nt, Artificial Sequence
  mRNA product Design i-3 (hSL-A64-N5) comprising derived and/or modified sequence from LASV(LASV221-NIG-2010;Clade II)__AIT17624__GPCmut11 (opt1)
aggagaaagcuuaccaugggccagaucaucaccuucuuccaggaggugccccacgucaucgaggaggugaugaacaucgugcugaucgcccucagccugcuggccauccucaaggggaucuacaacgucgcgaccugcggccuguucgggcugguguccuuccuccugcugugcggccgcagcugcuccacgaccuacaaggggguguacgagcuccagacccuggagcuggacauggccagccucaacaugaccaugccgcuguccugcacgaagaacaacagccaccacuacaucauggucggcaacgagaccggccuggagcucacccugaccaacacguccaucaucaaccacaaguucugcaaccugagcgacgcccacaagaagaaccucuacgaccacgcccugauguccaucaucagcaccuuccaccuguccauccccaacuucaaccaguacgaggccaugagcugcgacuucaacgggggcaagaucuccgugcaguacaaccucagccacaccuacgcgaucgacgccgccaaccacugcgggaccaucgccaacggcgugcugcagacguucaugcggauggcguggggcggguccuacaucgcccuggacagcggcaagggguccugggacugcaucaugaccagcuaccaguaccucaucauccagaacaccaccugggaggaccacugccaguucucccgccccagccccaucggcuaccuggggcugcucagccagcggacgcgcgacaucuacaucucccggcgccugcugggcaccuucaccuggacccucagcgacuccgagggcaacgagacgcccgggggcuacugccugacccgguggaugcugaucgaggccgagcucaagugcuucgggaacaccgccgucgccaagugcaacgagaagcacgacgaggaguucugcgacaugcugcgccuguucgacuucaacaagcaggcgauccggcgccucaagaccgaggcccagaugagcauccagcugaucaacaaggccgugaacgcccugaucaacgaccagcucaucaugaagaaccaccuccgggacaucaugggcauccccuacugcaacuacuccaaguacugcuaccugaaccacacggugaccgggaagaccagccugccccgcugcugccuggucuccaacggcagcuaccugaacgagacccacuucuccgacgacaucgagcagcaggccgacaacaugaucacggagaugcuccagaaggaguacauggaccggcagggcaagaccccgcuggggcugguggaccucuucguguucagcaccuccuucuaccugaucagcaucuuccugcaccuggucaagaucccgacccaccgccacgugaucggcaagcccugccccaagccccaccggcucaaccacauggggaucugcuccugcggccuguacaagcacccgggggugcccgucaaguggaagcgcugaggacuaguuauaagacugacuagcccgaugggccucccaacgggcccuccuccccuccuugcaccgagauuaaucaaaggcucuuuucagagccaccaaaaaaaaaaaaaaaaaaaaaaaaaaaaaaaaaaaaaaaaaaaaaaaaaaaaaaaaaaaaaaaaagaauu

SEQ ID NO: 39543 - RNA, 1655 nt, Artificial Sequence
  mRNA product Design i-3 (hSL-A64-N5) comprising derived and/or modified sequence from LASV(LASV237-NIG-2010;Clade II)__AIT17638__GPCmut11 (opt1)
aggagaaagcuuaccaugggccagaucaucaccuucuuccaggaggugccccacgucaucgaggaggugaugaacaucgugcugaucgcccucagccugcuggccauccucaaggggaucuacaacgucgcgaccugcggccuguucgggcugguguccuuccuccugcugugcggccgcagcugcuccacgaccuacaaggggguguacgagcuccagacccuggagcuggacauggccagccucaacaugaccaugccgcuguccugcacgaagaacaacagccaccacuacaucauggucggcaacgagaccggccuggagcucacccugaccaacacguccaucaucaaccacaaguucugcaaccugagcgacgcccacaagaaggaccucuacgaccacgcccugauguccaucaucagcaccuuccaccuguccauccccaacuucaaccaguacgaggccaugagcugcgacuucaacgggggcaagaucuccgugcaguacaaccucagccacaccuacgcgguggacgccgccaaccacugcgggaccaucgccaacggcguccugcagacguucaugcggauggcguggggcggguccuacaucgcccuggacagcggcaagggguccugggacugcaucaugaccagcuaccaguaccucaucauccagaacaccaccugggaggaccacugccaguucucccgccccagccccaucggcuaccuggggcugcucagccagcggacgcgcgacaucuacaucucccggcgccugcugggcaccuucaccuggacccucagcgacuccgagggcaacgagacgcccgggggcuacugccugacccgguggaugcugaucgaggccgagcucaagugcuucgggaacaccgccguggccaagugcaacgagaagcacgacgaggaguucugcgacaugcugcgccuguucgacuucaacaagcaggcgauccggcgccucaagaccgaggcccagaugagcauccagcugaucaacaaggccgugaacgcccugaucaacgaccagcucaucaugaagaaccaccuccgggacaucaugggcauccccuacugcaacuacuccaaguacugcuaccugaaccacacggucaccgggaagaccagccugccccgcugcugccugguguccaacggcagcuaccugaacgagacccacuucuccgacgacaucgagcagcaggccgacaacaugaucacggagcuccugcagaaggaguacauggaccggcagggcaagaccccgcuggggcucguggaccuguucgucuucagcaccuccuucuaccugaucagcaucuuccugcaccucaucaagaucccgacccaccgccacaucacgggcaagcccugccccaagccccaccggcugaaccacauggggaucugcuccugcggccuguacaagcacccgggggugcccgugaaguggaagcgcugaggacuaguuauaagacugacuagcccgaugggccucccaacgggcccuccuccccuccuugcaccgagauuaaucaaaggcucuuuucagagccaccaaaaaaaaaaaaaaaaaaaaaaaaaaaaaaaaaaaaaaaaaaaaaaaaaaaaaaaaaaaaaaaaagaauu

SEQ ID NO: 39544 - RNA, 1655 nt, Artificial Sequence
  mRNA product Design i-3 (hSL-A64-N5) comprising derived and/or modified sequence from LASV(LASV253-NIG-2011;Clade II)__AIT17670__GPCmut11 (opt1)
aggagaaagcuuaccaugggccagaucaucaccuucuuccaggaggugccccacgucaucgaggaggugaugaacaucgugcugaucgcccucagccugcuggccauccucaaggggaucuacaacgucgcgaccugcggccuguucgggcugguguccuuccuccugcugugcggccgcagcugcuccacgaccuacaaggggguguacgagcuccagacccuggagcuggacauggccagccucaacaugaccaugccgcuguccugcacgaagaacaacagccaccacuacaucauggucggcaacgagaccggccuggagcucacccugaccaacacguccaucaucaaccacaaguucugcaaccugagcgacgcccacaagaagaaccucuacgaccacgcccugauguccaucaucagcaccuuccaccuguccauccccaacuucaaccaguacgaggccaugagcugcgacuucaacgggggcaagaucuccgugcaguacaaccucagccacaccuacgcgguggacgccgccaaccacugcgggaccaucgccaacggcguccugcagacguucaugcggauggcguggggcggguccuacaucgcccuggacagcggcaagggguccugggacugcaucaugaccagcuaccaguaccucaucauccagaacaccaccugggaggaccacugccaguucucccgccccagccccaucggcuaccuggggcugcucagccagcggacgcgcgacaucuacaucucccggcgccugcugggcaccuucaccuggacccucagcgacuccgagggcaacgagacgcccgggggcuacugccugacccgguggaugcugaucgaggccgagcucaagugcuucgggaacaccgccguggccaagugcaacgagaagcacgacgaggaguucugcgacaugcugcgccuguucgacuucaacaagcaggcgauccggcgccucaaggccgaggcccagaugagcauccagcugaucaacaaggccgugaacgcccugaucaacgaccagcucaucaugaagaaccaccuccgggacaucaugggcaucccguacugcaacuacuccaaguacugcuaccugaaccacaccgucacggggcgcaccagccugccccggugcugccugguguccaacggcagcuaccugaacgagacccacuucuccgacgacaucgagcagcaggcggacaacaugaucaccgagcuccugcagaaggaguacaucgaccgccagggcaagacgccccuggggcucguggaccuguucgucuucagcaccuccuucuaccugaucagcaucuuccugcaccucgugaagaucccgacccaccggcacaucaucggcaagcccugccccaagccccaccgccugaaccacauggggaucugcuccugcggccuguacaagcacccgggggugcccgucaaguggaagcggugaggacuaguuauaagacugacuagcccgaugggccucccaacgggcccuccuccccuccuugcaccgagauuaaucaaaggcucuuuucagagccaccaaaaaaaaaaaaaaaaaaaaaaaaaaaaaaaaaaaaaaaaaaaaaaaaaaaaaaaaaaaaaaaaagaauu

SEQ ID NO: 39545 - RNA, 1655 nt, Artificial Sequence
  mRNA product Design i-3 (hSL-A64-N5) comprising derived and/or modified sequence from LASV(LASV254-NIG-2011;Clade II)__AIT17674__GPCmut11 (opt1)
aggagaaagcuuaccaugggccagaucaucaccuucuuccaggaggugccccacgucaucgaggaggugaugaacaucgugcugaucgcccucagccugcuggccauccucaaggggaucuacaacgucgcgaccugcggccuguucgggcugguguccuuccuccugcugugcggccgcagcugcuccacgaccuacaaggggguguacgagcuccagacccuggagcuggacaugaccaaccucaacaugacgaugccgcugagcugcaccaagaacaacucccaccacuacaucauggucggcaacgagaccggccuggagcucacccugacgaacaccagcaucaucaaccacaaguucugcaaccuguccgacgcccacaagaagaaccucuacaaccacgcccugaugagcaucaucuccaccuuccaccugagcauccccaacuucaaccaguacgaggccauguccugcgacuucaacgggggcaagaucagcgugcaguacaaccucucccacagcuacgccguggacgcggccaaccacugcgggaccaucgccaacggcguccugcagacguucaugcggauggccuggggcggguccuacaucgcgcuggacagcggcaaggggaacugggacugcaucaugaccuccuaccaguaccucaucauccagaacaccaccugggaggaccacugccaguucagccgccccucccccaucggcuaccuggggcugcucagccagcggacgcgcgacaucuacaucagccggcgccugcugggcaccuucaccuggacccucuccgacagcgagggcaacgagacgcccgggggcuacugccugacccgguggaugcugaucgaggccgagcucaagugcuucgggaacaccgccguggccaagugcaacgagaagcacgacgaggaguucugcgacaugcugcgccuguucgacuucaacaagcaggccauccggcgccucaagaccgaggcgcaggccaacauccagcugaucaacaaggccgugaacgcccugaucaacgaccagcucaucaugaagaaccaccuccgggacaucaugggcauccccuacugcaacuacuccaaguacugcuaccugaaccacacggucaccgggaagaccagccugccccgcugcugccugguguccaacggcagcuaccugaacgagacccacuucuccgacgacaucgagcagcaggccgacaacaugaucacggagcuccugcagaaggaguacauggaccggcagggcaagaccccgcuggggcucguggaccuguucgucuucagcaccuccuucuaccugaucagcaucuuccugcaccucgugaagaucccgacccaccgccacgugaucggcaagcccugccccaagccccaccggcugaaccacauggggaucugcuccugcggccuguacaagcacccggggguccccgugaaguggaagcgcugaggacuaguuauaagacugacuagcccgaugggccucccaacgggcccuccuccccuccuugcaccgagauuaaucaaaggcucuuuucagagccaccaaaaaaaaaaaaaaaaaaaaaaaaaaaaaaaaaaaaaaaaaaaaaaaaaaaaaaaaaaaaaaaaagaauu

SEQ ID NO: 39546 - RNA, 1655 nt, Artificial Sequence
  mRNA product Design i-3 (hSL-A64-N5) comprising derived and/or modified sequence from LASV(Nig08-A19;Clade III)__ADU56618__GPCmut11 (opt1)
aggagaaagcuuaccaugggccagaucgugaccuucuuccaggaggucccccacgugaucgaggaggugaugaacaucguccugaucgcccucagcauccuggccauccugaaggggcucuacaacaucgcgaccugcggccugaucgggcuggugacguuccuccugcuguccggccgcagcugcuccaugaccuacaaggggguguacgagcuccagacccuggagcugaacaugaacacccucaacaugacgaugccgcugagcugcaccaagaacaacucccaccacuacaucauggucggcaacgagaccggccuggagcucacccugacgaacaccagccugcuccaccacaaguucugcaaccuguccgacgcccacaagaagaaccuguacgaccacacccucaugagcaucaucuccaccuuccaccugagcauccccaacuucaaccaguacgaggccauguccugcgacuucaacgggggcaagaucacggugcaguacaaccugagccacuccuacgccaucgacgccgcgaaccacugcgggaccguggccaacggcguccuccagaccuucaugcggauggccuggggcgggagcuacaucgcccuggacuccggccgcgggaagugggacugcaucaugaccagcuaccaguaccugaucauccagaacacgaccugggaggaccacugccaguucucccggcccagccccaucggcuaccucgggcugcugucccagcgcacccgggacaucuacaucagccgccggcuccugggcaccuucacguggacccugagcgacuccgagggcaacgagacccccgggggcuacugccucacccgcuggaugcugaucgaggcggagcugaagugcuucgggaacacggccguggccaagugcaacgagaagcacgacgaggaguucugcgacaugcuccggcuguucgacuucaacaagcaggccauccgccggcugaaggccgaggcgcagaugagcauccagcucaucaacaaggccgugaacgcccugaucaacgaccagcugaucaugaagaaccaccuccgcgacaucaugggcauccccuacugcaacuacuccaaguacugcuaccugaaccacaccagcaccgggcggaccucccugccccgcugcugccucgucagcaacggcuccuaccugaacgagacgcacuucagcgacgacaucgagcagcaggccgacaacaugaucaccgagaugcugcagaaggaguaccucgaccggcagggcaagaccccgcuggggcugguggaccuguucguguucuccaccagcuucuaccucaucuccaucuuccugcaccuggucaagaucccgacgcaccgccacaucgugggcaagcccugccccaagccccaccggcucaaccacauggggaucugcagcugcggccuguacaagcagccgggggugcccguccgcuggaagcggugaggacuaguuauaagacugacuagcccgaugggccucccaacgggcccuccuccccuccuugcaccgagauuaaucaaaggcucuuuucagagccaccaaaaaaaaaaaaaaaaaaaaaaaaaaaaaaaaaaaaaaaaaaaaaaaaaaaaaaaaaaaaaaaaagaauu

SEQ ID NO: 39547 - RNA, 1658 nt, Artificial Sequence
  mRNA product Design i-3 (hSL-A64-N5) comprising derived and/or modified sequence from LASV(G1180-SLE-2010;Clade IV)__AIT17168__GPCmut11 (opt1)
aggagaaagcuuaccaugggccagaucgugaccuucuuccaggaggucccccacgugaucgaggaggugaugaacaucguccugaucgcccucagcauccuggccgugcugaaggggcucuacaacuucgcgaccugcggccugguggggcugcucaccuuccugcugcucugcggccgcuccugcaccgccagccgguacaagggggucuacgagcugcagacccuggagcucaacauggagacccugaacaugacgaugccgcuguccugcaccaagaacaacagccaccacuacaucauggugggcaacgagaccggccucgagcugacccugacgaacaccuccaucaucaaccacaaguucugcaaccucagcgacgcccacaagaagaaccuguacgaccacgcccugauguccaucaucagcaccuuccaccucuccauccccaacuucaaccaguacgaggccaugagcugcgacuucaacgggggcaagaucuccgugcaguacaaccugagccacuccuacgcgggggacgccgccaaccacugcggcaccgucgccaacggggugcugcagacguucaugcgcauggcguggggcggcagcuacaucgcccucgacuccgggcacggcagcugggacugcaucaugaccuccuaccaguaccugaucauccagaacaccaccugggaggaccacugccaguucagccggcccucccccaucggguaccugggccuccugagccagcgcacgcgggacaucuacaucagccgccggcugcucggcaccuucaccuggacccuguccgacagcgaggggaaggacacgccgggcggguacugccugacccgcuggaugcucaucgaggccgagcugaagugcuucggcaacaccgccguggccaagugcaacgagaagcacgacgaggaguucugcgacaugcugcggcuguucgacuucaacaagcaggcgauccagcgccugaaggccgaggcccagauguccauccagcugaucaacaaggccgucaacgcccucaucaacgaccagcugaucaugaagaaccaccuccgggacaucauggggauccccuacugcaacuacagcaaguacugcuaccucaaccacaccacgaccggcaagaccucccugcccaagugcugccuggugagcaacggcuccuaccucaacgagacccacuucagcgacgacaucgagcagcaggcggacaacaugaucacggagaugcugcagaaggaguacauggagcgccaggggaagacgccccugggccucguggaccuguucgucuucuccaccagcuucuaccugaucuccaucuuccugcaccucgugaagaucccgacccaccggcacaucgugggcaagagcugccccaagccccaccgccugaaccacauggggaucugcuccugcgggcuguacaagcagcccggcgucccggugaaguggaagcggugaggacuaguuauaagacugacuagcccgaugggccucccaacgggcccuccuccccuccuugcaccgagauuaaucaaaggcucuuuucagagccaccaaaaaaaaaaaaaaaaaaaaaaaaaaaaaaaaaaaaaaaaaaaaaaaaaaaaaaaaaaaaaaaaagaauu

SEQ ID NO: 39548 - RNA, 1658 nt, Artificial Sequence
  mRNA product Design i-3 (hSL-A64-N5) comprising derived and/or modified sequence from LASV(G1442-SLE-2011;Clade IV)__AIT17180__GPCmut11 (opt1)
aggagaaagcuuaccaugggccagaucgugaccuucuuccaggaggucccccacgugaucgaggaggugaugaacaucguccugaucgcccucagcauccuggccgugcugaaggggcucuacaacguggcgaccugcggccugaucgggcuggucacguuccuccugcugugcggccgcuccugcaccaccacccucuacaaggggguguacgagcugcagacgcuggagcucaacauggagacccugaacaugaccaugccgcugagcugcaccaagaacaacucccaccacuacauccgggugggcaacgagacgggccucgagcugacccugaccaacaccagcaucaucaaccacaaguucugcaaccucuccgacgcccacaagaagaaccuguacgaccacgcccugaugagcaucaucuccacguuccaccucagcauccccaacuucaaccaguacgaggccauguccugcgacuucaacgggggcaagaucagcguccaguacaaccugucccacagcuacgccggggacgcggccaaccacugcggcaccguggccaacggggugcugcagaccuucaugcgcauggccuggggcggcuccuacaucgcgcucgacagcgggcggggcaacugggacugcaucaugaccuccuaccaguaccugaucauccagaacacgaccugggacgaccacugccaguucagccgccccucccccaucggguaccugggccuccugagccagcggacccgcgacgucuacaucucccggcgccugcucggcaccuucacguggacccugagcgacagcgaggggaaggacaccccgggcggguacugccugacccgguggaugcucaucgaggccgagcugaagugcuucggcaacacggccguggccaagugcaacgagaagcacgacgaggaguucugcgacaugcugcgccucuucgacuucaacaagcaggccauccagcggcugaaggcggaggcccagauguccauccagcugaucaacaaggccgugaacgcccucaucaacgaccagcugaucaugaagaaccaccuccgcgacaucauggggauccccuacugcaacuacagcaaguacugcuaccugaacaacaccgccaccggcaagaccucccugcccaagugcugccugaucagcaacggcuccuaccucaacgagacgcacuucagcgacgacaucgagcaggaggcggacaacaugaucaccgagaugcugcagaaggaguacauggagcggcaggggaagacgccccugggccucgucgaccuguucguguucuccaccagcuucuaccugaucuccaucuuccugcaccucgugaagaucccgacccaccgccacaucgucggcaagagcugccccaagccccaccggcugaaccacauggggaucugcuccugcgggcuguacaagcagcccggcgugccggugcgcuggaagcggugaggacuaguuauaagacugacuagcccgaugggccucccaacgggcccuccuccccuccuugcaccgagauuaaucaaaggcucuuuucagagccaccaaaaaaaaaaaaaaaaaaaaaaaaaaaaaaaaaaaaaaaaaaaaaaaaaaaaaaaaaaaaaaaaagaauu

SEQ ID NO: 39549 - RNA, 1658 nt, Artificial Sequence
  mRNA product Design i-3 (hSL-A64-N5) comprising derived and/or modified sequence from LASV(G3010-SLE-2013;Clade IV)__AIT17344__GPCmut11 (opt1)
aggagaaagcuuaccaugggccagaucgugaccuucuuccaggaggucccccacgugaucgaggaggugaugaacaucguccugaucgcccucagcauccuggccgugcugaaggggcucuacaacuucgcgaccugcggccugguggggcuggucacguuccuccugcugugcggccgcuccugcaccaccagccucuacaaggggguguacgagcugcagacccuggagcucaacauggagacgcugaacaugaccaugccgcuguccugcaccaagaacaacagccaccacuacaucauggugggcaacgagaccggccucgagcugacgcugaccaacaccuccaucaucaaccacaaguucugcaaccucagcgacgcccacaagaagaaccuguacaaccacgcccugauguccaucaucagcaccuuccaccucuccauccccaacuucaaccaguacgaggccaugagcugcgacuucaacgggggcaagaucuccguccaguacaaccugagccacuccuacgccggggacgcggccagccacugcggcacgguggccaacggggugcugcagaccuucaugcggauggccuggggcggcuccuacaucgcgcucgacagcggguacggcaagugggacugcaucaugaccuccuaccaguaccugaucauccagaacaccacgugggaggaccacugccaguucagccgccccucccccaucggguaccugggccuccugagccagcggacccgcgacaucuacaucagccggcgccugcucggcaccuucaccuggacgcuguccgacagcgaggggaaggacaccccgggcggguacugccugacccgguggaugcucaucgaggccgagcugaagugcuucggcaacaccgccgucgccaagugcaacgagaagcacgacgaggaguucugcgacaugcugcgccucuucgacuucaacaagcaggccauccagcggcugaagacggaggcgcagauguccauccagcugaucaacaaggccgugaacgcccucaucaacgaccagcugaucaugaagaaccaccuccgcgacaucauggggauccccuacugcaacuacagcaaguacugcuaccugaaccacaccaccaccggcaagacgucccugcccaagugcugccuggugagcaacggcuccuaccucaacgagacccacuucagcgacgacaucgagcagcaggccgacaacaugaucaccgagaugcugcagaaggaguacauggagcggcaggggaagacgccccugggccucgucgaccuguucguguucuccaccagcuucuaccugaucuccaucuuccugcaccucgugaagaucccgacccaccgccacaucgucggcaagagcugccccaagccccaccggcugaaccacauggggaucugcuccugcgggcuguacaagcagcccggcgugccggugcgcuggaagcggugaggacuaguuauaagacugacuagcccgaugggccucccaacgggcccuccuccccuccuugcaccgagauuaaucaaaggcucuuuucagagccaccaaaaaaaaaaaaaaaaaaaaaaaaaaaaaaaaaaaaaaaaaaaaaaaaaaaaaaaaaaaaaaaaagaauu

SEQ ID NO: 39550 - RNA, 1658 nt, Artificial Sequence
  mRNA product Design i-3 (hSL-A64-N5) comprising derived and/or modified sequence from LASV(G502-SLE-2009;Clade IV)__AIT17126__GPCmut11 (opt1)
aggagaaagcuuaccaugggccagaucgugaccuucuuccaggaggucccccacgugaucgaggaggugaugaacaucguccugaucgcccucagcauccuggccgugcugaaggggcucuacaacuucgcgaccugcggccugguggggcugcucacguuccugcugcucugcggccgcuccugcaccaccgggcuguacaagggcgucuacgagcugcagacccucgagcugaacauggagacgcugaacaugaccaugccgcucagcugcaccaagaacaacucccaccacuacaucauggugggcaacgagaccgggcuggagcugacgcucaccaacaccagcaucaucaaccacaaguucugcaaccuguccgacgcccacaagaagaaccuguacgaccacgcccucaugagcaucaucuccaccuuccaccugagcauccccaacuucaaccaguacgaggccauguccugcgacuucaacggcgggaagaucagcgugcaguacaaccugucccacagcuacgccggcgacgcggccgaccacugcgggacggucgccaacggcgugcuccagaccuucaugcggauggccuggggcggguccuacaucgcgcuggacagcggccgcgggcggugggacugcaucaugaccuccuaccaguaccugaucauccagaacaccacgugggaggaccacugccaguucagccgccccucccccaucggcuaccucggccugcugagccagcggacccgcgacaucuacaucucccggcgccuccuggggaccuucaccuggacgcugagcgacagcgagggcaaggacacccccgggggcuacugccucacccgguggaugcugaucgaggccgagcugaagugcuucgggaacaccgccguggccaagugcaacgagaagcacgacgaggaguucugcgacaugcuccgccuguucgacuucaacaagcaggccauccagcggcugaaggcggaggcccagauguccauccagcucaucaacaaggccgucaacgcccugaucaacgaccagcuggugaugaagaaccaccuccgcgacaucaugggcauccccuacugcaacuacagccgguacugcuaccugaaccacacgaccaccggccgcaccucccugcccaagugcugccucgugagcaacggguccuaccugaacgagacgcacuucagcgacgacaucgagcagcaggccgacaacaugaucaccgagaugcugcagaaggaguacauggagcggcagggcaagaccccgcucgggcuggucgaccuguucguguucuccaccagcuucuaccugaucuccaucuuccuccaccuggugaagaucccgacgcaccgccacaucgucggcaagagcugccccaagccccaccggcugaaccacauggggaucugcuccugcggccucuacaagcagcccggcgugccggugaaguggaagcgcugaggacuaguuauaagacugacuagcccgaugggccucccaacgggcccuccuccccuccuugcaccgagauuaaucaaaggcucuuuucagagccaccaaaaaaaaaaaaaaaaaaaaaaaaaaaaaaaaaaaaaaaaaaaaaaaaaaaaaaaaaaaaaaaaagaauu

SEQ ID NO: 39551 - RNA, 1658 nt, Artificial Sequence
  mRNA product Design i-3 (hSL-A64-N5) comprising derived and/or modified sequence from LASV(G733-SLE-2010;Clade IV)__AIT17154__GPCmut11 (opt1)
aggagaaagcuuaccaugggccagaucgugaccuucuuccaggaggucccccacgugaucgaggaggugaugaacaucguccugaucgcccucagcauccuggccgugcugaaggggcucuacaacuucgcgaccugcggcaucguggggcuggucuccuuccugcuccugugcggccgcagcugcacgaccucccuguacaaggggguguacgagcuccagacccuggagcugaacauggagacccucaacaugacgaugccgcugagcugcaccaagaacaacucccaccacuacaucauggugggcaacgagaccggccuggagcucacccugacgaacaccagcaucaucaaccacaaguucugcaaccuguccgacgcccacaagaagaaccucuacgaccacgcccugaugagcaucaucuccaccuuccaccugagcauccccaacuucaaccaguacgaggccauguccugcgacuucaacgggggcaagaucagcguccaguacaaccucucccacagcuacgccggggacgcggccaaccacugcggcaccaucgccaacggggugcugcagacguucaugcggauggccuggggcggcuccuacaucgcgcuggacagcgggcgcgaccggugggacugcaucaugaccuccuaccaguaccucaucauccagaacaccaccugggaggaccacugccaguucagccgccccucccccaucggcuaccuggggcugcucagccagcggacgcgcgacaucuacaucagccggcgccugcugggcaccuucaccuggacccucuccgacagcgagggcaaggacacgcccgggggcuacugccugacccgguggaugcugaucgaggccgagcucaagugcuucgggaacaccgccguggccaagugcaacgagaagcacgacgaggaguucugcgacaugcugcgccuguucgacuucaacaagcaggccauccagcggcucaaggcggaggcccagauguccauccagcugaucaacaaggccgucaacgcccugaucaacgaccagcucaucaugaagaaccaccuccgcgacaucaugggcauccccuacugcaacuacagcaaguacugcuaccugaaccacaccacgaccgggaagaccucccugcccaagugcugccuggugagcaacggcuccuaccugaacgagacccacuucagcgacgacaucgagcagcaggccgacaacaugaucacggagaugcuccagaaggaguacauggagcggcagggcaagaccccgcuggggcugguggaccucuucgucuucuccaccagcuucuaccugaucuccaucuuccugcaccuggugaagaucccgacccaccgccacguggucggcaagagcugccccaagccccaccggcucaaccacauggggaucugcuccugcggccuguacgggcagcccggcgugccggugaaguggaagcgcugaggacuaguuauaagacugacuagcccgaugggccucccaacgggcccuccuccccuccuugcaccgagauuaaucaaaggcucuuuucagagccaccaaaaaaaaaaaaaaaaaaaaaaaaaaaaaaaaaaaaaaaaaaaaaaaaaaaaaaaaaaaaaaaaagaauu

SEQ ID NO: 39552 - RNA, 1658 nt, Artificial Sequence
  mRNA product Design i-3 (hSL-A64-N5) comprising derived and/or modified sequence from MOPV/LASV reassortant(IGS-1;Clade IV)__AFY05576__GPCmut11 (opt1)
aggagaaagcuuaccaugggccagaucgugaccuucuuccaggaggucccccacgugaucgaggaggugaugaacaucguccugaucgcccucagcgugcuggccgugcugaaggggcucuacaacuucgcgaccugcggccuggucgggcuggugacguuccuccugcugugcggccgcuccugcaccaccagccucuacaaggggguguacgagcugcagacccuggagcucaacauggagacgcugaacaugaccaugccgcuguccugcaccaagaacaacagccaccacuacaucauggucggcaacgagaccggccucgagcugacgcugaccaacaccuccaucaucaaccacaaguucugcaaccucagcgacgcccacaagaagaaccuguacgaccacgcccugauguccaucaucagcaccuuccaccucuccauccccaacuucaaccaguacgaggccaugagcugcgacuucaacgggggcaagaucuccgugcaguacaaccugagccacuccuacgccggggacgcggccaaccacugcggcacgguggccaacgggguccugcagaccuucaugcggauggccuggggcggcagcuacaucgcgcucgacuccgggcgcggcaacugggacugcaucaugaccagcuaccaguaccugaucauccagaacaccacgugggaggaccacugccaguucucccggcccagccccaucggguaccugggccuccugucccagcgcacccgggacaucuacaucagccgccggcugcucggcaccuucaccuggacgcugagcgacuccgagggggaggacaccccgggcggguacugccugacccgcuggaugcucaucgaggccgagcugaagugcuucggcaacaccgccguggccaagugcaacgagaagcacgacgaggaguucugcgacaugcugcggcuguucgacuucaacaagcaggccauccagcgccugaaggcggaggcccagaugagcauccagcugaucaacaaggccgugaacgcccucaucaacgaccagcugaucaugaagaaccaccuccgggacaucauggggauccccuacugcaacuacuccaaguacugcuaccucaaccacacgaccaccggccgcaccagccugcccaagugcugccuggucuccaacggcagcuaccucaacgagacgcacuucuccgacgacaucgagcagcaggccgacaacaugaucaccgagaugcugcagaaggaguacauggagcggcaggggaagacgccccugggccucguggaccuguucguguucagcaccuccuucuaccugaucagcaucuuccugcaccucgucaagaucccgacccaccgccacaucguggggaaguccugccccaagccccaccggcugaaccacaugggcaucugcagcugcgggcuguacaagcagcccggcgugccggucaaguggaagcgcugaggacuaguuauaagacugacuagcccgaugggccucccaacgggcccuccuccccuccuugcaccgagauuaaucaaaggcucuuuucagagccaccaaaaaaaaaaaaaaaaaaaaaaaaaaaaaaaaaaaaaaaaaaaaaaaaaaaaaaaaaaaaaaaaagaauu

SEQ ID NO: 39553 - RNA, 1658 nt, Artificial Sequence
  mRNA product Design i-3 (hSL-A64-N5) comprising derived and/or modified sequence from LASV(LM765-SLE-2012;Clade IV)__AIT17814__GPCmut11 (opt1)
aggagaaagcuuaccaugggccagaucgugaccuucuuccaggaggucccccacgugaucgaggaggugaugaacaucguccugaucgcccucagcauccuggccgugcugaaggggcucuacaacuucgcgaccugcggccugguggggcuggucacguuccuccugcugugcggccgcuccugcaccaccagccucuacaaggggguguacgagcugcagacccuggagcucaacauggagacgcugaacaugaccaugccgcuguccugcaccaagaacaacagccaccacuacaucauggugggcaacgagaccggccucgagcugacgcugaccaacaccuccaucaucgaccacaaguucugcaaccucagcgacgcccaccggaagaaccuguacgaccacgcccugauguccaucaucagcaccuuccaccucuccauccccaacuucaaccaguacgaggccaugagcugcgacuucaacgggggcaagaucuccguccaguacaaccugagccacuccuacgccaaggacgcggccgaccacugcgggacgguggccaacggcgugcugcagaccuucaugcgcauggccuggggcgggagcuacaucgcgcucgacuccggccgggggcgcugggacugcaucaugaccagcuaccaguaccugaucauccagaacaccacgugggaggaccacugccaguucucccggcccagccccaucggcuaccuggggcuccugucccagcgcacccgggacaucuacaucagccgccggcugcucggcaccuucaccuggacgcugagcgacuccgagggcaaggacacccccgggggcuacugccugacccgcuggaugcucaucgaggccgagcugaagugcuucgggaacaccgccgucgccaagugcaacgagaagcacgacgaggaguucugcgacaugcugcggcuguucgacuucaacaagcaggccauccagcgccugaaggcggaggcccagaugagcauccagcugaucaacaaggccgugaacgcccucaucaacgaccagcugaucaugaagaaccaccuccgggacaucaugggcauccccuacugcaacuacuccaaguacugcuaccucaaccacacgaccaccgggaagaccagccugcccaagugcugccugguguccaacggcagcuaccucaacgagacgcacuucuccgacgacaucgagcagcaggccgacaacaugaucaccgagaugcugcagaaggaguacauggagcgccagggcaagaccccgcuggggcucgucgaccuguucguguucagcaccuccuucuaccugaucagcaucuuccugcaccucgugaagaucccgacgcaccggcacaucgucggcaagcccugccccaagccccaccgccugaaccacauggggaucugcuccugcggccuguacaagcagccgggggugcccgugaaguggaagcggugaggacuaguuauaagacugacuagcccgaugggccucccaacgggcccuccuccccuccuugcaccgagauuaaucaaaggcucuuuucagagccaccaaaaaaaaaaaaaaaaaaaaaaaaaaaaaaaaaaaaaaaaaaaaaaaaaaaaaaaaaaaaaaaaagaauu

SEQ ID NO: 39554 - RNA, 1658 nt, Artificial Sequence
  mRNA product Design i-3 (hSL-A64-N5) comprising derived and/or modified sequence from LASV(LM776-SLE-2012;Clade IV)__AIT17824__GPCmut11 (opt1)
aggagaaagcuuaccaugggccagaucgugaccuucuuccaggaggucccccacgugaucgaggaggugaugaacaucguccugaucgcccucagcauccuggccgugcugaaggggcucuacaacuucgcgaccugcggccugguggggcuggucacguuccuccugcugugcggccgcuccugcaccaccagcguguacaaggggguguacgagcuccagacccuggagcugaacauggagacgcucaacaugaccaugccgcuguccugcaccaagaacaacagccaccacuacaucauggucggcaacgagaccggccuggagcucacgcugaccaacaccuccaucaucaaccacaaguucugcaaccugagcgacgcccacaagaagaaccucuacgaccacgcccugauguccaucaucagcaccuuccaccuguccauccccaacuucaaccaguacgaggccaugagcugcgacuucaacgggggcaagaucuccgugcaguacaaccucagccacuccuacgccggggacgcggccaaccacugcggcacgguggccaacgggguccugcagaccuucaugcggauggccuggggcggcagcuacaucgcgcuggacuccgggcacggcaagugggacugcaucaugaccagcuaccaguaccucaucauccagaacaccacgugggaggaccacugccaguucucccgccccagccccaucggguaccugggccugcucucccagcggacccgcgacaucuacaucagccggcgccugcugggcaccuucaccuggacgcucagcgacuccgaggggaaggacaccccgggcggguacugccugacccgguggaugcugaucgaggccgagcucaagugcuucggcaacaccgccguggccaagugcaacgagaagcacgacgaggaguucugcgacaugcugcgccuguucgacuucaacaagcaggccauccagcggcucaaggcggaggcccagaugagcauccagcugaucaacaaggccgugaacgcccugaucaacgaccagcucaucaugaagaaccaccuccgcgacaucauggggauccccuacugcaacuacuccaaguacugcuaccugaaccacacgaccaccggcaagaccagccugcccaagugcugccuggucuccaacggcagcuaccugaacgagacgcacuucuccgacgacaucgagcagcaggccgacaacaugaucaccgagaugcuccagaaggaguacauggagcggcaggggaagacgccccugggccugguggaccucuucguguucagcaccuccuucuaccugaucagcaucuuccugcaccuggucaagaucccgacccaccgccacaucguggggaaguccugccccaagccccaccggcucaaccacaugggcaucugcagcugcgggcuguacaagcagcccggcgugccgguccgcuggaagcggugaggacuaguuauaagacugacuagcccgaugggccucccaacgggcccuccuccccuccuugcaccgagauuaaucaaaggcucuuuucagagccaccaaaaaaaaaaaaaaaaaaaaaaaaaaaaaaaaaaaaaaaaaaaaaaaaaaaaaaaaaaaaaaaaagaauu

SEQ ID NO: 39555 - RNA, 1658 nt, Artificial Sequence
  mRNA product Design i-3 (hSL-A64-N5) comprising derived and/or modified sequence from LASV(Mad39;Clade IV)__ANH09722__GPCmut11 (opt1)
aggagaaagcuuaccaugggccagaucgugaccuucuuccaggaggucccccacgugaucgaggaggugaugaacaucguccugaucgcccucagcauccuggccgugcugaaggggcucuacaacguggcgaccugcggccugaucgggcuggucacguuccuccugcugugcggccgcuccugcaccaccacccucuacaaggggguguacgagcugcaggcccuggagcucaacauggagacgcugaacaugaccaugccgcugagcugcaccaagaacaacucccaccacuacauccgggugggcaacgagaccggccucgagcugacgcugaccaacaccagccucaucaaccacaaguucugcaaccuguccgacgcccacaagaagaaccuguacgaccacgcccucaugagcaucaucuccaccuuccaccugagcauccccaacuucaaccaguacgaggccauguccugcgacuucaacgacgggaagaucagcguccaguacaaccugucccacacguacgcgggcgacaccgccaaccacugcgggaccguggccaacggcgugcuccagaccuucaugcgcauggccuggggcgggagcuacaucgcgcuggacuccggccgcgggggcugggacugcaucaugacgagcuaccaguaccugaucauccagaacaccaccugggaggaccacugccaguucucccggcccagccccaucggguaccucggccugcugucccagcggacccgcgacaucuacaucagccggcgccuccugggcacguucaccuggacccuguccgacagcgaggggaaggacaccccgggcggguacugccucacgcgguggaugcugaucgaggccgagcugaagugcuucggcaacaccgccgucgccaagugcaacgagaagcacgacgaggaguucugcgacaugcuccgccuguucgacuucaacaagcaggccauccagcggcugaaggcggaggcccagaugagcauccagcucaucaacaaggccgugaacgcccugaucaacgaccagcugaucaugaagaaccaccuccgcgacaucauggggauccccuacugcaacuacuccaaguacugcuaccugaaccacaccgugaccggcaagacgagccugcccaagugcugccucgucuccaacggcagcuaccugaacgagacccacuucuccgacgacaucgagcagcaggccgacaacaugaucaccgagaugcugcagaaggaguacauggagcggcaggggaagacgccccucggccugguggaccuguucguguucagcaccuccuucuaccugaucagcaucuuccuccaccuggucaagaucccgacccaccgccacgugguggggaagcccugccccaagccccaccggcugaaccacaugggcaucugcuccugcggguucuacaagcagccgggcguccccgugcgcuggaagcggugaggacuaguuauaagacugacuagcccgaugggccucccaacgggcccuccuccccuccuugcaccgagauuaaucaaaggcucuuuucagagccaccaaaaaaaaaaaaaaaaaaaaaaaaaaaaaaaaaaaaaaaaaaaaaaaaaaaaaaaaaaaaaaaaagaauu

SEQ ID NO: 39556 - RNA, 1658 nt, Artificial Sequence
  mRNA product Design i-3 (hSL-A64-N5) comprising derived and/or modified sequence from LASV(Z0947-SLE-2011;Clade IV)__AIT17840__GPCmut11 (opt1)
aggagaaagcuuaccaugggccagaucgugaccuucuuccaggaggucccccacgugaucgaggaggugaugaacaucguccugaucgcccucagcauccuggccgugcugaaggggcucuacaacuucgcgaccugcggccugguggggcuggucacguuccuccugcugugcggccgcuccugcaccaucagccucuacaaggggguguacgagcugcagacccuggagcucaacauggagacccugaacaugacgaugccgcuguccugcaccaagaacaacagccaccacuacaucauggugggcaacgagaccggccucgagcugacccugacgaacaccuccaucaucaaccacaaguucugcaaccucagcgacgcccacaagaagaaccuguacgaccacgcccugauguccaucaucagcaccuuccaccucuccauccccaacuucaaccaguacgaggccaugagcugcgacuucaacgggggcaagaucuccguccaguacaaccugagccacuccuacgccggggacgcggccaaccacugcggcaccguggccaacggggugcugcagacguucaugcggauggccuggggcggcagcuacaucgcgcucgacuccgggcgcgaccggugggacugcaucaugaccagcuaccaguaccugaucauccagaacaccaccugggaggaccacugccaguucucccgccccagccccaucggcuaccuggggcuccugucccagcggacgcgcgacaucuacaucagccggcgccugcucggcaccuucaccuggacccugagcgacuccgagggcaaggacacgcccgggggcuacugccugacccgguggaugcucaucgaggccgagcugaagugcuucgggaacaccgccgucgccaagugcaacgagaagcacgacgaggaguucugcgacaugcugcgccucuucgacuucaacaagcaggccauccagcggcugaaggcggaggcccagaugagcauccagcugaucaacaaggccgugaacgcccucaucaacgaccagcugaucaugaagaaccaccuccgcgacaucaugggcauccccuacugcaacuacuccaaguacugcuaccugaaccacaccacgaccgggaagaccagccugcccaagugcugccugguguccaacggcagcuaccucaacgagacccacuucuccgacgacaucgagcagcaggccgacaacaugaucacggagaugcugcagaaggaguacauggagcggcagggcaagaccccgcuggggcucgucgaccuguucguguucagcaccuccuucuaccugaucagcaucuuccugcaccucgugaagaucccgacccaccgccacaucgucggcaagcccugccccaagccccaccggcugaaccacauggggaucugcuccugcggccuguacaagcagccgggggugcccgugaaguggaagcgcugaggacuaguuauaagacugacuagcccgaugggccucccaacgggcccuccuccccuccuugcaccgagauuaaucaaaggcucuuuucagagccaccaaaaaaaaaaaaaaaaaaaaaaaaaaaaaaaaaaaaaaaaaaaaaaaaaaaaaaaaaaaaaaaaagaauu

SEQ ID NO: 39557 - RNA, 1658 nt, Artificial Sequence
  mRNA product Design i-3 (hSL-A64-N5) comprising derived and/or modified sequence from LASV(Josiah;Clade IV)__NP_694870__GPCmut11 (opt1)
aggagaaagcuuaccaugggccagaucgugaccuucuuccaggaggucccccacgugaucgaggaggugaugaacaucguccugaucgcccucagcgugcuggccgugcugaaggggcucuacaacuucgcgaccugcggccuggucgggcuggugacguuccuccugcugugcggccgcuccugcaccaccagccucuacaaggggguguacgagcugcagacccuggagcucaacauggagacgcugaacaugaccaugccgcuguccugcaccaagaacaacagccaccacuacaucauggucggcaacgagaccggccucgagcugacgcugaccaacaccuccaucaucaaccacaaguucugcaaccucagcgacgcccacaagaagaaccuguacgaccacgcccugauguccaucaucagcaccuuccaccucuccauccccaacuucaaccaguacgaggccaugagcugcgacuucaacgggggcaagaucuccgugcaguacaaccugagccacuccuacgccggggacgcggccaaccacugcggcacgguggccaacgggguccugcagaccuucaugcggauggccuggggcggcagcuacaucgcgcucgacuccgggcgcggcaacugggacugcaucaugaccagcuaccaguaccugaucauccagaacaccacgugggaggaccacugccaguucucccggcccagccccaucggguaccugggccuccugucccagcgcacccgggacaucuacaucagccgccggcugcucggcaccuucaccuggacgcugagcgacuccgaggggaaggacaccccgggcggguacugccugacccgcuggaugcucaucgaggccgagcugaagugcuucggcaacaccgccguggccaagugcaacgagaagcacgacgaggaguucugcgacaugcugcggcuguucgacuucaacaagcaggccauccagcgccugaaggcggaggcccagaugagcauccagcugaucaacaaggccgugaacgcccucaucaacgaccagcugaucaugaagaaccaccuccgggacaucauggggauccccuacugcaacuacuccaaguacugcuaccucaaccacacgaccaccggccgcaccagccugcccaagugcugccuggucuccaacggcagcuaccucaacgagacgcacuucuccgacgacaucgagcagcaggccgacaacaugaucaccgagaugcugcagaaggaguacauggagcggcaggggaagacgccccugggccugguggaccucuucguguucagcaccuccuucuaccugaucagcaucuuccugcaccucgucaagaucccgacccaccgccacaucguggggaaguccugccccaagccccaccggcugaaccacaugggcaucugcagcugcgggcuguacaagcagcccggcgugccggucaaguggaagcgcugaggacuaguuauaagacugacuagcccgaugggccucccaacgggcccuccuccccuccuugcaccgagauuaaucaaaggcucuuuucagagccaccaaaaaaaaaaaaaaaaaaaaaaaaaaaaaaaaaaaaaaaaaaaaaaaaaaaaaaaaaaaaaaaaagaauu

SEQ ID NO: 39558 - RNA, 1655 nt, Artificial Sequence
  mRNA product Design i-3 (hSL-A64-N5) comprising derived and/or modified sequence from LASV(LP;Clade I)__AAF86701__GPCmut11 (opt1)
aggagaaagcuuaccaugggccagaucaucaccuucuuccaggaggugccccacgucaucgaggaggugaugaacaucgugcugaucgcccucagccugcuggccauccucaaggggcuguacaacaucgcgaccugcggcaucaucgggcuggucgccuuccucuuccugugcggcaaguccugcagccugacgcucaagggcggguacgagcugcagacccuggagcucaacauggagacccugaacaugaccaugccgcuguccugcacgaagaacagcucccaccacuacauccgcgugggcaacgagaccgggcucgagcugacccugaccaacacgagcaucaucaaccacaaguucugcaaccucuccgacgcccacaagaagaaccuguacgaccacgcccugaugagcaucaucuccaccuuccaccucagcauccccaacuucaaccaguacgaggccauguccugcgacuucaacggcgggaagaucagcgugcaguacaaccugucccacagcuacgcgggcgacgccgccgagcacugcgggaccgucgccaacggcgugcugcagaccuucaugcggauggcguggggcgggcgcuacaucgcccucgacuccggcaaggggaacugggacugcaucaugacgagcuaccaguaccugaucauccagaacaccaccugggaggaccacugccaguucucccggcccagccccaucggcuaccugggccuccugucccagcgcacccgggacaucuacaucagccgccggcugcucgggacguucaccuggacccugagcgacuccgagggcaacgagacccccgggggcuacugccugacgcgcuggaugcucaucgaggccgagcugaagugcuucgggaacaccgccguggccaagugcaacgagaagcacgacgaggaguucugcgacaugcugcggcuguucgacuucaacaagcaggcgauccgccggcugaaggccgaggcccagaugagcauccagcugaucaacaaggccgucaacgcccucaucaacgaccagcugaucaugaagaaccaccuccgcgacaucaugggcauccccuacugcaacuacuccaaguacugcuaccucaaccacaccagcuccggccggaccagccugcccaagugcugccugaucuccaacgggagcuaccucaacgagacgcaguucuccgacgacaucgagcagcaggcggacaacaugaucaccgagaugcugcagaaggaguacaucgagcgccagggcaagaccccgcuggggcugguggacaucuucaucuucagcaccuccuucuaccucaucagcaucuuccugcaccugaucaagaucccgacgcaccggcacaucgugggcaagcccugccccaagccccaccgccucaaccacaugggggucugcuccugcggccuguacaagcacccgggcgugcccaccaaguggaagcggugaggacuaguuauaagacugacuagcccgaugggccucccaacgggcccuccuccccuccuugcaccgagauuaaucaaaggcucuuuucagagccaccaaaaaaaaaaaaaaaaaaaaaaaaaaaaaaaaaaaaaaaaaaaaaaaaaaaaaaaaaaaaaaaaagaauu

SEQ ID NO: 39559 - RNA, 1655 nt, Artificial Sequence
  mRNA product Design i-3 (hSL-A64-N5) comprising derived and/or modified sequence from LASV(803213;Clade II)__AAF86703__GPCmut11 (opt1)
aggagaaagcuuaccaugggccagaucaucaccuucuuccaggaggugccccacgucaucgaggaggugaugaacaucgugcugaucgcccucagccugcuggccauccucaaggggaucuacaacgucgcgaccugcggccuguucgggcugaucuccuuccuccugcugugcggccgcagcugcuccgugacguacaaggggguguacgagcuccagacccuggagcugaacauggccaaccucaacaugaccaugccgcugagcugcaccaagaacaacucccaccacuacaucauggucggcaacgagacgggccuggagcucacccugaccaacaccagcaucaucaaccacaaguucugcaaccuguccgacgcccacaagaagaaccucuacgaccacgcccugaugagcaucaucuccacguuccaccugagcauccccaacuucaaccaguacgaggccauguccugcgacuucaacgggggcaagaucagcgugcaguacaaccucucccacagcuucgcgguggacgccgccaaccacugcgggaccaucgccaacggcguccugcagaccuucaugcggauggcguggggcggguccuacaucgcccuggacagcggcaaggggaacugggacugcaucaugaccuccuaccaguaccucaucauccagaacacgaccugggaggaccacugccaguucagccgccccucccccaucggcuaccuggggcugcucagccagcggacccgcgacaucuacaucagccggcgccugcugggcaccuucacguggacccucuccgacagcgagggcaacgaggcccccgggggcuacugccugacccgguggaugcugaucgaggccgagcucaagugcuucgggaacaccgccguggcgaagugcaacgagaagcacgacgaggaguucugcgacaugcugcgccuguucgacuucaacaagcaggccaucaagcggcucaagacggaggcccagauguccauccagcugaucaacaaggccgugaacgcccugaucaacgaccagcucaucaugaagaaccaccuccgcgacaucaugggcauccccuacugcaacuacagccgguacugcuaccugaaccacaccgucaccgggaagaccucccugccccgcugcugccuggugagcaacggcuccuaccugaacgagacgcacuucagcgacgacaucgagcagcaggcggacaacaugaucaccgagaugcuccagaaggaguacauggaccggcagggcaagaccccgcuggggcugguggaccuguucgucuucuccaccagcuucuaccucaucuccaucuuccugcaccuggugaagaucccgacgcaccgccacaucgugggcaagcccugccccaagccccaccggcucaaccacauggggaucugcagcugcggccuguacaagcacccggggguccccgugaaguggaagcgcugaggacuaguuauaagacugacuagcccgaugggccucccaacgggcccuccuccccuccuugcaccgagauuaaucaaaggcucuuuucagagccaccaaaaaaaaaaaaaaaaaaaaaaaaaaaaaaaaaaaaaaaaaaaaaaaaaaaaaaaaaaaaaaaaagaauu

SEQ ID NO: 39560 - RNA, 1655 nt, Artificial Sequence
  mRNA product Design i-3 (hSL-A64-N5) comprising derived and/or modified sequence from LASV(GA391;Clade III)__CAA36645__GPCmut11 (opt1)
aggagaaagcuuaccaugggccagaucgugaccuucuuccaggaggucccccacgugaucgaggaggugaugaacaucguccugaucgcccucagcauccuggccauccugaaggggcucuacaacguggcgaccugcggccugaucgggcuggugacguuccuccugcuguccggccgcagcugcucccucaucuacaaggggaccuacgagcugcagacccuggagcucaacauggagacccugaacaugacgaugccgcugagcugcaccaagaacaacucccaccacuacauccgggucggcaacgagaccggccucgagcugacccugacgaacaccagcauccucaaccacaaguucugcaaccuguccgacgcccacaagcgcaaccuguacgaccacagccucauguccaucaucagcaccuuccaccuguccauccccaacuucaaccaguacgaggccaugagcugcgacuucaacgggggcaagaucaccgugcaguacaaccugucccacagcuucgccguggacgccgcggggcacugcggcacgcucgccaacgggguccugcagaccuucaugcggauggccuggggcggcuccuacaucgcccuggacagcgggcgcggcaacugggacugcaucaugaccuccuaccaguaccucaucauccagaacaccacgugggacgaccacugccaguucagccggcccucccccaucggguaccugggccugcucagccagcgcacccgggacaucuacaucagccgccggcugcugggcaccuucaccuggacgcucuccgacagcgaggggaacgagaccccgggcggguacugccugacccgcuggaugcugaucgaggcggagcucaagugcuucggcaacaccgccguggccaagugcaacgagaagcacgacgaggaguucugcgacaugcugcggcuguucgacuucaacaagcaggccauccgccggcucaagacggaggcccagauguccauccagcugaucaacaaggcggugaacgcccugaucaacgaccagcucaucaugaagaaccaccuccgcgacaucauggggauccccuacugcaacuacagccgguacugcuaccugaaccacaccuccaccggcaagaccagccugccccgcugcugccugaucuccaacggcagcuaccugaacgagacgaaguucuccgacgacaucgagcagcaggccgacaacaugaucaccgagaugcugcagaaggaguacaucgaccggcaggggaagacgccccucggccuggucgaccuguucguguucagcaccuccuucuaccucaucagcaucuuccugcaccuggugaagaucccgacccaccgccacaucgucgggaagcccugccccaagccccaccggcucaaccacaugggcaucugcuccugcgggcuguacaagcagccgggcgugcccgugcgcuggaagcggugaggacuaguuauaagacugacuagcccgaugggccucccaacgggcccuccuccccuccuugcaccgagauuaaucaaaggcucuuuucagagccaccaaaaaaaaaaaaaaaaaaaaaaaaaaaaaaaaaaaaaaaaaaaaaaaaaaaaaaaaaaaaaaaaagaauu

SEQ ID NO: 39561 - RNA, 1658 nt, Artificial Sequence
  mRNA product Design i-3 (hSL-A64-N5) comprising derived and/or modified sequence from LASV(AV;Clade V)__CCA30314__GPCmut11 (opt1)
aggagaaagcuuaccaugggccagaucgugaccuucuuccaggaggucccccacgugaucgaggaggugaugaacaucguccugaucgcccucagcauccuggccgugcugaaggggcucuacaacaucgcgaccugcggccugaucgggcugaucacguuccuccugcugugcggccgcuccugcagcuccaaccucuacaaggggguguacgagcugcagagccuggaccucaacauggagacccugaacaugaccaugccgcuguccugcaccaagaacaacagccaccacuacauccgggucggcaacgacacgggccucgagcugacccugaccaacaccuccauccucaaccacaaguucugcaaccugagcgacgcccacaagaaggaccuguacgaccacgcccucauguccaucaucagcacguuccaccuguccauccccaacuucaaccaguacgaggccaugagcugcgacuucaacgggggcaagaucuccgugcaguacaaccugagccacuccuacgccaucgacgcggccaaccacugcgggaccguggccaacggcauccuccagaccuucaugcgcauggccuggggcgggagcuacaucgcgcuggacuccggccgggggaacugggacugcaucaugaccagcuaccaguaccugaucauccagaacacgaccugggagaaccacugccaguucucccgccccagccccaucggcuaccucgggcugcugagccagcggacccgcgacaucuacaucucccggcgccuccugggcaccuucacguggacccugagcgacuccgagggcaacgccacccccgggggcuacugccucacccgguggaugcugaucgaggccgagcugaagugcuucgggaacacggccgucgccaagugcaacgagaagcacgacgaggaguucugcgacaugcuccgccuguucgacuucaacaagcaggcgaucagccggcugaaguccgaggcccagaugagcauccagcucaucaacaaggccgugaacgcccugaucaacgaccagcugaucaugaagaaccaccuccgcgacaucaugggcauccccuacugcaacuacuccaaguacugcuaccugaaccacaccaucaccgggaagaccagccugcccaagugcugccucguguccaacggcagcuaccugaacgagacgcacuucuccgacgacaucgagcagcaggccgacaacaugaucaccgagaugcugcagaaggaguacauggagcggcagggcaagaccccgcuggggcucgucgaccuguucguguucagcaccuccuucuaccugaucagcaucuuccuccgccuggugaagaucccgacgcaccggcacaucgucggcaagcccugccccaagccccaccgccugaaccacauggggaucugcuccugcggccucuacaagcagccgggggugcccgugcgguggaagcgcugaggacuaguuauaagacugacuagcccgaugggccucccaacgggcccuccuccccuccuugcaccgagauuaaucaaaggcucuuuucagagccaccaaaaaaaaaaaaaaaaaaaaaaaaaaaaaaaaaaaaaaaaaaaaaaaaaaaaaaaaaaaaaaaaagaauu

SEQ ID NO: 39562 - RNA, 1655 nt, Artificial Sequence
  mRNA product Design i-3 (hSL-A64-N5) comprising derived and/or modified sequence from LASV(Togo/2016/7082;Clade VI)__AMR44577__GPCmut11 (opt1)
aggagaaagcuuaccaugggccagaucaucaccuucuuccaggaggugccccacgucaucgaggaggugaugaacaucgugcugaucgcccucagccugcuggccauccucaagggggucuacaacguggcgaccugcggcaucaucgggcuggugacguuccuguuccucugcggccgcuccugcagccugaucuacaagggguccuacgagcugcagacccucgagcugaacauggagacccugaacaugaccaugccgcucagcugcacgaagaacuccagccaccacuacauccgggucggcaacgagaccggccuggagcugacccucaccaacacguccaucaucaaccacaaguucugcaaccugagcgacgcccacaagcgcaaccuguacgaccacgcccucauguccauccugagcaccuuccaccuguccauccccaacuucaaccaguacgaggccaugagcugcgacuucaacgggggcaagaucuccgugcaguacaaccucagccacgccuacgcgguggacgccgccgagcacugcgggaccgucgccaacggcgugcugcagaccuucaugcggauggcguggggcggguccuacaucgcccuggacagcggccgcgggaacugggacugcaucaugacguccuaccaguaccucaucauccagaacaccaccugggaggaccacugccaguucagccggcccucccccaucggcuaccuggggcugcucagccagcgcacccgggacaucuacaucagccgccggcugcugggcacguucaccuggacccucuccgacagcgagggcaacgagacccccgggggcuacugccugacgcgcuggaugcugaucgaggccgagcucaagugcuucgggaacaccgccguggccaagugcaacgagaagcacgacgaggaguucugcgacaugcugcggcuguucgacuucaacaagcaggcgauccagcgccucaaguccgaggcccagaugagcauccagcugaucaacaaggccgucaacgcccugaucaacgaccagcucaucaugaagaaccaccuccgggacaugaugggcauccccuacugcaacuacuccaaguacugcuaccugaaccacaccagcuccgggcgcaccagccugcccaagugcugccugguguccaacggcagcuaccugaacgagacgcacuucuccgacgacaucgagcagcaggccgacaacaugaucaccgagaugcuccagaaggaguacaucgaccggcagggcaagaccccgcuggggcugguggaccuguucgucuucagcaccuccuucuaccucaucagcaucuuccugcaccugaucaagaucccgacgcaccgccacaucgugggcaagcccugccccaagccccaccggcucaaccacauggggaucugcuccugcggccuguacaagcagccgggggugcccacccgcuggaagcggugaggacuaguuauaagacugacuagcccgaugggccucccaacgggcccuccuccccuccuugcaccgagauuaaucaaaggcucuuuucagagccaccaaaaaaaaaaaaaaaaaaaaaaaaaaaaaaaaaaaaaaaaaaaaaaaaaaaaaaaaaaaaaaaaagaauu

SEQ ID NO: 39563 - RNA, 1655 nt, Artificial Sequence
  mRNA product Design i-3 (hSL-A64-N5) comprising derived and/or modified sequence from LASV(KAK-428;Clade n.d. (VII))__ANH09740__GPCmut11 (opt1)
aggagaaagcuuaccaugggccagaucgugaccuucuuccaggaggucccccacgugaucgaggaggugaugaacaucguccugaucgcccucagccugcuggccauccucaaggggcuguacaacuucgcgaccugcggcgugaucgggcugaucacguuccuccugcugugcggccgcuccugcagcgccaccuacaaggggcaguacgagcuccagacccuggagcugaacauggagucccucaacaugaccaugccgcugagcugcacgaagaacaacucccaccacuacauccgggccggcaacaacaccggccuggagcucacccugaccaacacgagcaucaucucccacaaguucugcaaccugagcgacgcccacaagaagaaccucuacgaccacacccugauguccaucaucaccaccuuccaccugagcauccccaacuucaaccaguacgaggccauguccugcgacuucaacgggggcaagaucagcauccaguacaaccucucccacagcuacgcgggggacgccgcccagcacugcggcacgguggccaacgggguccugcagaccuucaugcgcauggcguggggcggcuccuaccuggcccucgacagcgggcggcgcggcugggacugcaucaucuccagcuaccaguaccugaucauccagaacaccaccugggacgaccacugccaguucucccggcccagccccaucggguaccugggcuucgugagccagaagacgcgcgacaucuacaucucccggcgccuccugggcaccuucaccuggacccugagcgacuccgaggggcacgacaugccgggcggguacugccucacgcgguggaugcugaucgaggccgaccugaagugcuucggcaacaccgccguggccaagugcaacgagaagcacgacgaggaguucugcgacauguggcgccucuucgacuucaacaagcaggcgauccagcggcugaaggccgaggcccagaugaacauccagcugaucaacaaggccgucaacgcccucaucaacgaccagcugaugaugaagaaccaccuccgcgacaucauggggauccccuacugcaacuacagcaaguucugcuaccugaacaacaccaccacgggccggaccucccugccccgcugcugccugaucagcaacggcuccuaccucaacgagacccacuucagcgacgacaucgagcagcaggcggacaacaugaucaccgagaugcugcagaaggaguacauggaccggcaggggaagacgccccugggccucguggaccuguucguguucuccaccagcuucuaccugaucaccaucuuccugcaccucgucaagaucccgacccaccgccacaucguggggaagcccugccccaagccccaccggcugaaccacaugggcaucugcuccugcgggcuguacaagcagccgggcgugcccguccgcuggaagcggugaggacuaguuauaagacugacuagcccgaugggccucccaacgggcccuccuccccuccuugcaccgagauuaaucaaaggcucuuuucagagccaccaaaaaaaaaaaaaaaaaaaaaaaaaaaaaaaaaaaaaaaaaaaaaaaaaaaaaaaaaaaaaaaaagaauu

SEQ ID NO: 39564 - RNA, 1655 nt, Artificial Sequence; identical to SEQ ID NO: 39558
  mRNA product Design i-3 (hSL-A64-N5) comprising derived and/or modified sequence from LASV(Pinneo-NIG-1969;Clade I)__AIT17836__GPCmut11 (opt1)

SEQ ID NO: 39565 - RNA, 1655 nt, Artificial Sequence
  mRNA product Design i-3 (hSL-A64-N5) comprising derived and/or modified sequence from LASV(ISTH0009-NIG-2011;Clade II)__AIT17404__GPCmut11 (opt1)
aggagaaagcuuaccaugggccagaucaucaccuucuuccaggaggugccccacgucaucgaggaggugaugaacaucgugcugaucgcccucagccugcuggccauccucaaggggaucuacaacgucgcgaccugcggccuguucgggcugguguccuuccuccugcugugcggccgcagcugcuccacgaccuacaaggggguguacgagcuccagacccuggagcuggacauggccagccucaacaugaccaugccgcuguccugcacgaagaacaacagccaccacuacaucauggucggcaacgagaccggccuggagcucacccugaccaacacguccaucaucaaccacaaguucugcaaccugagcgacgcccacaagaagaaccucuacgaccacgcccugauguccaucaucagcaccuuccaccuguccauccccaacuucaaccaguacgaggccaugagcugcgacuucaacgggggcaagaucuccgugcaguacaaccucagccacgcguacgccguggacgccgccaaccacugcgggaccaucgcgaacggcguccugcagaccuucaugcggauggccuggggcggguccuacaucgcccuggacagcggcaagggguccugggacugcaucaugacgagcuaccaguaccucaucauccagaacaccaccugggaggaccacugccaguucucccgccccagccccaucggcuaccuggggcugcucagccagcggacccgcgacaucuacaucucccggcgccugcugggcacguucaccuggacccucagcgacuccgagggcaacgagacccccgggggcuacugccugacgcgguggaugcugaucgaggccgagcucaagugcuucgggaacaccgccguggcgaagugcaacgagaagcacgacgaggaguucugcgacaugcugcgccuguucgacuucaacaagcaggccauccggcgccucaagaccgaggcccagaugagcauccagcugaucaacaaggccgugaacgcccugaucaacgaccagcucaucaugaagaaccaccuccgggacaucaugggcaucccguacugcaacuacuccaaguacugcuaccugaaccacaccgucacggggaagaccagccugccccgcugcugccugguguccaacggcagcuaccugaacgagacccacuucuccgacgacaucgagcagcaggcggacaacaugaucaccgagcuccugcagaaggaguacauggaccggcagggcaagacgccccuggggcugguggaccucuucgucuucagcaccuccuucuaccugaucagcaucuuccugcaccucaucaagaucccgacccaccgccacaucaccggcaagcccugccccaagccccaccggcugaaccacauggggaucugcuccugcggccuguacaagcacccgggggugcccgugaaguggaagcgcugaggacuaguuauaagacugacuagcccgaugggccucccaacgggcccuccuccccuccuugcaccgagauuaaucaaaggcucuuuucagagccaccaaaaaaaaaaaaaaaaaaaaaaaaaaaaaaaaaaaaaaaaaaaaaaaaaaaaaaaaaaaaaaaaagaauu

SEQ ID NO: 39566 - RNA, 1655 nt, Artificial Sequence
  mRNA product Design i-3 (hSL-A64-N5) comprising derived and/or modified sequence from LASV(ISTH2010-NIG-2012;Clade II)__AIT17482__GPCmut11 (opt1)
aggagaaagcuuaccaugggccagaucaucaccuucuuccaggaggugccccacgucaucgaggaggugaugaacaucgugcugaucgcccucagccugcuggccauccucaaggggaucuacaacgucgcgaccugcggccuguucgggcugguguccuuccuccugcugugcggccgcagcugcuccacgaccuacaaggggguguacgagcuccagacccuggagcuggacauggccagccucaacaugaccaugccgcuguccugcacgaagaacaacagccaccacuacaucauggucggcaacgagaccggccuggagcucacccugaccaacacguccaucaucaaccacaaguucugcaaccugagcgacgcccacaagaagaaccucuacgaccacgcccugauguccaucaucagcaccuuccaccuguccauccccaacuucaaccaguacgaggccaugagcugcgacuucaacgggggcaagaucuccgugcaguacaaccucagccacgcguacgccguggacgccgccaaccacugcgggaccaucgcgaacggcguccugcagaccuucaugcggauggccuggggcggguccuacaucgcccuggacagcggcaagggguccugggacugcaucaugacgagcuaccaguaccucaucauccagaacaucaccugggaggaccacugccaguucucccgccccagccccaucggcuaccuggggcugcucagccagcggacccgcgacaucuacaucucccggcgccugcugggcaccuucacguggacccucagcgacuccgagggcaacgagacccccgggggcuacugccugacccgguggaugcugaucgaggccgagcucaagugcuucgggaacacggccguggcgaagugcaacgagaagcacgacgaggaguucugcgacaugcugcgccuguucgacuucaacaagcaggccauccggcgccucaagaccgaggcccagaugagcauccagcugaucaacaaggccgugaacgcccugaucaacgaccagcucaucaugaagaaccaccuccgggacaucaugggcauccccuacugcaacuacuccaaguacugcuaccugaaccacaccgucaccgggaagacgagccugccccgcugcugccugguguccaacggcagcuaccugaacgagacccacuucuccgacgacaucgagcagcaggcggacaacaugaucaccgagcuccugcagaaggaguacaucgaccggcagggcaagaccccgcuggggcugguggaccucuucgucuucagcacguccuucuaccugaucagcaucuuccugcaccucgugaagaucccgacccaccgccacguggucggcaagcccugccccaagccccaccggcugaaccacauggggaucugcuccugcggccuguacaagcacccgggggugcccgugaaguggaagcgcugaggacuaguuauaagacugacuagcccgaugggccucccaacgggcccuccuccccuccuugcaccgagauuaaucaaaggcucuuuucagagccaccaaaaaaaaaaaaaaaaaaaaaaaaaaaaaaaaaaaaaaaaaaaaaaaaaaaaaaaaaaaaaaaaagaauu

SEQ ID NO: 39567 - RNA, 1655 nt, Artificial Sequence
  mRNA product Design i-3 (hSL-A64-N5) comprising derived and/or modified sequence from LASV(Lassa virus/H.sapiens-wt/NGA/2015/ISTH_0543;Clade II)__AVO03639__GPCmut11 (opt1)
aggagaaagcuuaccaugggccagaucaucaccuucuuccaggaggugccccacgucaucgaggaggugaugaacaucgugcugaucgcccucagccugcuggccauccucaaggggaucuacaacgucgcgaccugcggccuguucgggcugguguccuuccuccugcugugcggccgcagcugcuccacgaccuacaaggggguguacgagcuccagacccuggagcuggacauggccaaccucaacaugaccaugccgcugagcugcacgaagaacaacucccaccacuacaucauggucggcaacgagaccggccuggagcucacccugaccaacacgagcaucaucaaccacaaguucugcaaccuguccgacgcccacaagaagaaccucuacgaccacgcccugaugagcaucaucuccaccuuccaccugagcauccccaacuucaaccaguacgaggccauguccugcgacuucaacgggggcaagaucagcgugcaguacaaccucucccacaccuacgcgguggacgccgccaaccacugcgggaccaucgccaacggcguccugcagacguucaugcggauggcguggggcgggagcuacaucgcccuggacuccggcaaggggagcugggacugcaucaugaccuccuaccaguaccucgugauccagaacaccaccugggaggaccacugccaguucagccgccccucccccaucggcuaccuggggcugcucagccagcggacgcgcgacaucuacaucagccggcgccugcugggcaccuucaccuggacccucuccgacagcgagggcaacgagacgcccgggggcuacugccugacccgguggaugcugaucgaggccgagcucaagugcuucgggaacaccgccguggccaagugcaacgagaagcacgacgaggaguucugcgacaugcugcgccuguucgacuucaacaagcaggcgauccggcgccucaagaccgaggcccagauguccauccagcugaucaacaaggccgucaacgcccugaucaacgaccagcucaucaugaagaaccaccuccgggacaucaugggcauccccuacugcaacuacagcaaguacugcuaccugaaccacacggugaccgggaagaccucccugccccgcugcugccuggugagcaacggcuccuaccugaacgagacccacuucagcgacgacaucgagcagcaggccgacaacaugaucacggagcuccugcagaaggaguacaucgaccggcagggcaagaccccgcuggggcuggucgaccucuucguguucuccaccagcuucuaccugaucuccaucuuccugcaccucgugaagaucccgacccaccgccacaucacgggcaagcccugccccaagccccaccggcugaaccacauggggaucugcagcugcggccuguacaagcacccggggguccccgugaaguggaagcgcugaggacuaguuauaagacugacuagcccgaugggccucccaacgggcccuccuccccuccuugcaccgagauuaaucaaaggcucuuuucagagccaccaaaaaaaaaaaaaaaaaaaaaaaaaaaaaaaaaaaaaaaaaaaaaaaaaaaaaaaaaaaaaaaaagaauu

SEQ ID NO: 39568 - RNA, 1655 nt, Artificial Sequence
  mRNA product Design i-3 (hSL-A64-N5) comprising derived and/or modified sequence from LASV(Lassa virus/H.sapiens-wt/NGA/2016/ISTH_0009;Clade II)__AVO03571__GPCmut11 (opt1)
aggagaaagcuuaccaugggccagaucaucaccuucuuccaggaggugccccacgucaucgaggaggugaugaacaucgugcugaucgcccucagccugcuggccauccucaaggggaucuacaacgucgcgaccugcggccugcuggggcucguguccuuccugcugcucugcggccgcagcugcuccacgaccuacaaggggguguacgagcugcagacccuggagcucgacauggccagccugaacaugaccaugccgcuguccugcacgaagaacaacagccaccacuacaucauggucggcaacgagaccggccucgagcugacccugaccaacacguccaucaucaaccacaaguucugcaaccucagcgacgcccacaagaagaaccuguacgaccacgcccugauguccaucaucagcaccuuccaccucuccauccccaacuucaaccaguacgaggccaugagcugcgacuucaacgggggccggaucuccgugcaguacaaccugagccacuccuacgcgguggacgccgccaaccacugcgggaccaucgccaacggcguccugcagaccuucaugcgcauggcguggggcgggagcuacaucgcccucgacuccggcaaggggagcugggacugcaucaugacguccuaccaguaccugaucauccagaacaccaccugggaggaccacugccaguucagccggcccagccccaucggcuaccuggggcuccugucccagcgcacccgggacaucuacaucagccgccggcugcucggcacguucaccuggacccuguccgacagcgagggcaacgagacccccgggggcuacugccugacgcgcuggaugcucaucgaggccgagcugaagugcuucgggaacaccgccguggccaagugcaacgagaagcacgacgaggaguucugcgacaugcugcggcuguucgacuucaacaagcaggcgauccgccggcugaagaccgaggcccagauguccauccagcugaucaacaaggccgugaacgcccucaucaacgaccagcugaucaugaagaaccaccuccgcgacaucaugggcaucccguacugcaacuacagcaaguacugcuaccucaaccacaccgucacggggaagaccucccugccccggugcugccuggugagcaacggcuccuaccucaacgagacccacuucagcgacgacaucgagcagcaggccgacaacaugaucaccgagcugcugcagaaggaguacaucgaccgccagggcaagacgccccuggggcucguggaccuguucgucuucuccaccagcuucuaccugaucuccaucuuccuccaccuggugaagaucccgacccaccggcacaucaccggcaagcccugccccaagccccaccgccugaaccacauggggaucugcagcugcggccucuacaaccacccgggggugcccgucaaguggaagcggugaggacuaguuauaagacugacuagcccgaugggccucccaacgggcccuccuccccuccuugcaccgagauuaaucaaaggcucuuuucagagccaccaaaaaaaaaaaaaaaaaaaaaaaaaaaaaaaaaaaaaaaaaaaaaaaaaaaaaaaaaaaaaaaaagaauu

SEQ ID NO: 39569 - RNA, 1655 nt, Artificial Sequence
  mRNA product Design i-3 (hSL-A64-N5) comprising derived and/or modified sequence from LASV(Lassa virus/H.sapiens-wt/NGA/2016/ISTH_0017;Clade II)__AVO03567__GPCmut11 (opt1)
aggagaaagcuuaccaugggccagaucaucaccuucuuccaggaggugccccacgucaucgaggaggugaugaacaucgugcugaucgcccucagccugcuggccauccucaaggggaucuacaacgucgcgaccugcggccuguucgggcugguguccuuccuccugcugugcggccgcagcugcuccacgaccuacaaggggguguacgagcuccagacccuggagcuggacauggccagccucaacaugaccaugccgcuguccugcacgaagaacaacagccaccacuacaucauggucggcaacgagaccggccuggagcucacccugaccaacacguccaucaucaaccacaaguucugcaaccugagcgacgcccacaagaagaaccucuacgaccacgcccugauguccaucaucagcaccuuccaccuguccauccccaacuucaaccaguacgaggccaugagcugcgacuucaacgggggcaagaucuccgugcaguacaaccucagccacaccuacgcgaucgacgccgccaaccacugcgggaccaucgccaacggcgugcugcagacguucaugcggauggcguggggcggguccuacaucgcccuggacagcggcaagggguccugggacugcaucaugaccagcuaccaguaccucaucauccagaacaccaccugggaggaccacugccaguucucccgccccagccccaucggcuaccuggggcugcucagccagcggacgcgcgacaucuacaucucccggcgccugcugggcaccuucaccuggacccucagcgacuccgagggcaacgagacgcccgggggcuacugccugacccgguggaugcugaucgaggccgagcucaagugcuucgggaacaccgccgucgccaagugcaacgagaagcacgacgaggaguucugcgacaugcugcgccuguucgacuucaacaagcaggcgauccggcgccucaagaccgaggcccagaugagcauccagcugaucaacaaggccgugaacgcccugaucaacgaccagcucaucaugaagaaccaccuccgggacaucaugggcauccccuacugcaacuacuccaaguacugcuaccugaaccacacggugaccgggaagaccagccugccccgcugcugccuggucuccaacggcagcuaccugaacgagacccacuucuccgacgacaucgagcagcaggccgacaacaugaucacggagcuccugcagaaggaguacauggaccggcagggcaagaccccgcuggggcugguggaccucuucguguucagcaccuccuucuaccugaucagcaucuuccugcaccucguccgcaucccgacccaccggcacgugaucggcaagcccugccccaagccccaccgccugaaccacauggggaucugcuccugcggccuguacaagcacccgggggugcccgucaaguggaagcggugaggacuaguuauaagacugacuagcccgaugggccucccaacgggcccuccuccccuccuugcaccgagauuaaucaaaggcucuuuucagagccaccaaaaaaaaaaaaaaaaaaaaaaaaaaaaaaaaaaaaaaaaaaaaaaaaaaaaaaaaaaaaaaaaagaauu

SEQ ID NO: 39570 - RNA, 1655 nt, Artificial Sequence
  mRNA product Design i-3 (hSL-A64-N5) comprising derived and/or modified sequence from LASV(Lassa virus/H.sapiens-wt/NGA/2018/ISTH_0959;Clade II)__AVV65099__GPCmut11 (opt1)
aggagaaagcuuaccaugggccagaucaucaccuucuuccaggaggugccccacgucaucgaggaggugaugaacaucgugcugaucgcccucagccugcuggccauccucaaggggaucuacaacgucgugaccugcggccuguucgggcugguguccuuccuccugcugugcggccgcagcugcuccacgaccuacaagggggucuacgagcuccagacccuggagcuggacauggcgagccucaacaugaccaugccgcuguccugcacgaagaacaacagccaccacuacaucauggugggcaacgagaccggccuggagcucacccugaccaacacguccaucaucaaccacaaguucugcaaccugagcgacgcccacaagaagaaccucuacgaccacgcccugauguccaucaucagcaccuuccaccuguccauccccaacuucaaccaguacgaggccaugagcugcgacuucaacgggggcaagaucuccgugcaguacaaccucagccacgccuacgcgaucgacgccgccaaccacugcgggaccaucgccaacggcguccugcagaccuucaugcggauggcguggggcggguccuacaucgcccuggacagcggcaagggguccugggacugcaucaugacgagcuaccaguaccucaucauccagaacaccaccugggaggaccacugccaguucucccgccccagccccaucggcuaccuggggcugcucagccagcggacccgcgacaucuacaucucccggcgccugcugggcacguucaccuggacccucagcgacuccgagggcaacgagacccccgggggcuacugccugacgcgguggaugcugaucgaggccgagcucaagugcuucgggaacaccgccguggccaagugcaacgagaagcacgacgaggaguucugcgacaugcugcgccuguucgacuucaacaagcaggcgauccggcgccucaagaccgaggcccagaugagcauccagcugaucaacaaggccgugaacgcccugaucaacgaccagcucaucaugaagaaccaccuccgggacaucaugggcaucccguacugcaacuacuccaaguacugcuaccugaaccacaccgucacggggaagaccagccugccccgcugcugccugguguccaacggcagcuaccugaacgagacccacuucuccgacgacaucgagcagcaggccgacaacaugaucaccgagcuccugcagaaggaguacaucgaccggcagggcaagacgccccuggggcugguggaccucuucgucuucagcaccuccuucuaccugaucagcaucuuccugcaccucgugaagaucccgacccaccgccacgugaucggcaagcccugccccaagccccaccggcugaaccacauggggaucugcuccugcggccuguacaagcacccggggguccccgugaaguggaagcgcugaggacuaguuauaagacugacuagcccgaugggccucccaacgggcccuccuccccuccuugcaccgagauuaaucaaaggcucuuuucagagccaccaaaaaaaaaaaaaaaaaaaaaaaaaaaaaaaaaaaaaaaaaaaaaaaaaaaaaaaaaaaaaaaaagaauu

SEQ ID NO: 39571 - RNA, 1655 nt, Artificial Sequence
  mRNA product Design i-3 (hSL-A64-N5) comprising derived and/or modified sequence from LASV(LASV003-NIG-2008;Clade II)__AIT17580__GPCmut11 (opt1)
aggagaaagcuuaccaugggccagaucaucaccuucuuccaggaggugccccacgucaucgaggaggugaugaacaucgugcugaucgcccucagccugcuggccauccucaaggggaucuacaacgucgcgaccugcggccuguucgggcugguguccuuccuccugcugugcggccgcagcugcuccacgaccuacaaggggguguacgagcuccagacccuggagcuggacauggccagccucaacaugaccaugccgcuguccugcacgaagaacaacagccaccacuacaucauggucggcaacgagaccggccuggagcucacccugaccaacacguccaucaucaaccacaaguucugcaaccugagcgacgcccacaagaagaaccucuacgaccacgcccugauguccaucaucagcaccuuccaccuguccauccccaacuucaaccaguacgaggccaugagcugcgacuucaacgggggcaagaucuccgugcaguacaaccucagccacaccuacgcgguggacgccgccaaccacugcgggaccaucgccaacggcguccugcagacguucaugcggauggcguggggcggguccuacaucgcccuggacagcggcaagggguccugggacugcaucaugaccagcuaccaguaccucaucauccagaacaccaccugggaggaccacugccaguucucccgccccagccccaucggcuaccuggggcugcucagccagcggacgcgcgacaucuacaucucccggcgccugcugggcaccuucaccuggacccucagcgacuccgagagcaacgagacgccgggcggguacugccugacccgguggaugcugaucgaggccgagcucaagugcuucggcaacaccgccguggccaagugcaacgagaagcacgacgaggaguucugcgacaugcugcgccuguucgacuucaacaagcaggcgauccggcgccucaaggccgaggcccagauguccauccagcugaucaacaaggccgugaacgcccugaucaacgaccagcucaucaugaagaaccaccuccgggacaucauggggauccccuacugcaacuacagcaaguacugcuaccugaaccacaccgucacgggccgcaccucccugccccggugcugccuggugagcaacggguccuaccugaacgagacccacuucagcgacgacaucgagcagcaggcggacaacaugaucaccgagcuccugcagaaggaguacauggaccgccagggcaagacgccccugggccugguggaccucuucgucuucuccaccagcuucuaccugaucuccaucuuccugcaccucgugaagaucccgacccaccggcacgugaucgggaagcccugccccaagccccaccgccugaaccacaugggcaucugcagcugcgggcuguacaagcacccgggcguccccgugaaguggaagcggugaggacuaguuauaagacugacuagcccgaugggccucccaacgggcccuccuccccuccuugcaccgagauuaaucaaaggcucuuuucagagccaccaaaaaaaaaaaaaaaaaaaaaaaaaaaaaaaaaaaaaaaaaaaaaaaaaaaaaaaaaaaaaaaaagaauu

SEQ ID NO: 39572 - RNA, 1655 nt, Artificial Sequence
  mRNA product Design i-3 (hSL-A64-N5) comprising derived and/or modified sequence from LASV(LASV035-NIG-2009;Clade II)__AIT17588__GPCmut11 (opt1)
aggagaaagcuuaccaugggccagaucaucaccuucuuccaggaggugccccacgucaucgaggaggugaugaacaucgugcugaucgcccucagccugcuggccauccucaaggggaucuacaacgucgcgaccugcggccuguucgggcugguguccuuccuccugcugugcggccgcagcugcuccacgaccuacaaggggguguacgagcuccagacccuggagcuggacauggccagccucaacaugaccaugccgcuguccugcacgaagaacaacagccaccacuacaucauggucggcaacgagaccggccuggagcucacccugaccaacacguccaucaucaaccacaaguucugcaaccugagcgacgcccacaagaagaaccucuacgaccacgcccugauguccaucaucagcaccuuccaccuguccauccccaacuucaaccaguacgaggccaugagcugcgacuucaacgggggcaagaucuccgugcaguacaaccucagccacgcguacgccguggacgccgccaaccacugcgggaccaucgcgaacggcguccugcagaccuucaugcggauggccuggggcggguccuacaucgcccuggacagcggcaagggguccugggacugcaucaugacgagcuaccaguaccucaucauccagaacaccaccugggaggaccacugccaguucucccgccccagccccaucggcuaccuggggcugcucagccagcggacccgcgacaucuacaucucccggcgccugcugggcacguucaccuggacccucagcgacuccgagggcaacgagacccccgggggcuacugccugacgcgguggaugcugaucgaggccgagcucaagugcuucgggaacaccgccguggcgaagugcaacgagaagcacgacgaggaguucugcgacaugcugcgccuguucgacuucaacaagcaggccauccggcgccucaaggccgaggcccagaugagcauccagcugaucaacaaggccgugaacgcgcugaucaacgaccagcucaucaugaagaaccaccuccgggacaucaugggcauccccuacugcaacuacuccaaguacugcuaccugaaccacaccgucaccgggaagacgagccugccccgcugcugccugguguccaacggcagcuaccugaacgagacccacuucuccgacgacaucgagcagcaggccgacaacaugaucaccgagcuccugcagaaggaguacaucgaccggcagggcaagaccccgcuggggcugguggaccucuucgucuucagcacguccuucuaccugaucagcaucuuccugcaccucgugaagaucccgacccaccgccacgugaucggcaagcccugccccaagccccaccggcugaaccacauggggaucugcuccugcggccuguacaagcacccggggguccccgugaaguggaagcgcugaggacuaguuauaagacugacuagcccgaugggccucccaacgggcccuccuccccuccuugcaccgagauuaaucaaaggcucuuuucagagccaccaaaaaaaaaaaaaaaaaaaaaaaaaaaaaaaaaaaaaaaaaaaaaaaaaaaaaaaaaaaaaaaaagaauu

SEQ ID NO: 39573 - RNA, 1655 nt, Artificial Sequence
  mRNA product Design i-3 (hSL-A64-N5) comprising derived and/or modified sequence from LASV(LASV1000-NIG-2009;Clade II)__AIT17782__GPCmut11 (opt1)
aggagaaagcuuaccaugggccagaucaucaccuucuuccaggaggugccccacgucaucgaggaggugaugaacaucgugcugaucgcccucagccugcuggccauccucaaggggaucuacaacgucgcgaccugcggccuguucgggcugguguccuuccuccugcugugcggccgcagcugcuccacgaccuacaaggggguguacgagcuccagacccuggagcuggacauggccagccucaacaugaccaugccgcuguccugcacgaagaacaacagccaccacuacaucauggucggcaacgagaccggccuggagcucacccugaccaacacguccaucaucaaccacaaguucugcaaccugagcgacgcccacaagaagaaccucuacgaccacgcccugauguccaucaucagcaccuuccaccuguccauccccaacuucaaccaguacgaggccaugagcugcgacuucaacgggggcaagaucuccgugcaguacaaccucagccacaccuacgcgguggacgccgccaaccacugcgggaccaucgccaacggcguccugcagacguucaugcggauggcguggggcggguccuacaucgcccuggacagcggcaagggguccugggacugcaucaugaccagcuaccaguaccucaucauccagaacaccaccugggaggaccacugccaguucucccgccccagccccaucggcuaccuggggcugcucagccagcggacgcgcgacaucuacaucucccggcgccugcugggcaccuucaccuggacccucagcgacuccgagggcaacgagacgcccgggggcuacugccugacccgguggaugcugaucgaggccgagcucaagugcuucgggaacaccgccguggccaagugcaacgagaagcacgacgaggaguucugcgacaugcugcgccuguucgacuucaacaagcaggcgaucaagcggcucaagaccgaggcccagaugagcauccagcugaucaacaaggccgugaacgcccugaucaacgaccagcucaucaugaagaaccaccuccgcgacaucaugggcauccccuacugcaacuacuccaaguacugcuaccugaaccacacggucaccgggaagaccagccugccccggugcugccugguguccaacggcagcuaccugaacgagacccacuucuccgacgacaucgagcagcaggccgacaacaugaucacggagcuccugcagaaggaguacaucgaccgccagggcaagaccccgcuggggcugguggaccucuucgucuucagcaccuccuucuaccugaucagcaucuuccugcaccucgugaagaucccgacccaccggcacguggucggcaagcccugccccaagccccaccgccugaaccacauggggaucugcuccugcggccuguacaagcacccgggggugcccgugaaguggaagcggugaggacuaguuauaagacugacuagcccgaugggccucccaacgggcccuccuccccuccuugcaccgagauuaaucaaaggcucuuuucagagccaccaaaaaaaaaaaaaaaaaaaaaaaaaaaaaaaaaaaaaaaaaaaaaaaaaaaaaaaaaaaaaaaaagaauu

SEQ ID NO: 39574 - RNA, 1655 nt, Artificial Sequence
  mRNA product Design i-3 (hSL-A64-N5) comprising derived and/or modified sequence from LASV(LASV221-NIG-2010;Clade II)__AIT17624__GPCmut11 (opt1)
aggagaaagcuuaccaugggccagaucaucaccuucuuccaggaggugccccacgucaucgaggaggugaugaacaucgugcugaucgcccucagccugcuggccauccucaaggggaucuacaacgucgcgaccugcggccuguucgggcugguguccuuccuccugcugugcggccgcagcugcuccacgaccuacaaggggguguacgagcuccagacccuggagcuggacauggccagccucaacaugaccaugccgcuguccugcacgaagaacaacagccaccacuacaucauggucggcaacgagaccggccuggagcucacccugaccaacacguccaucaucaaccacaaguucugcaaccugagcgacgcccacaagaagaaccucuacgaccacgcccugauguccaucaucagcaccuuccaccuguccauccccaacuucaaccaguacgaggccaugagcugcgacuucaacgggggcaagaucuccgugcaguacaaccucagccacaccuacgcgaucgacgccgccaaccacugcgggaccaucgccaacggcgugcugcagacguucaugcggauggcguggggcggguccuacaucgcccuggacagcggcaagggguccugggacugcaucaugaccagcuaccaguaccucaucauccagaacaccaccugggaggaccacugccaguucucccgccccagccccaucggcuaccuggggcugcucagccagcggacgcgcgacaucuacaucucccggcgccugcugggcaccuucaccuggacccucagcgacuccgagggcaacgagacgcccgggggcuacugccugacccgguggaugcugaucgaggccgagcucaagugcuucgggaacaccgccgucgccaagugcaacgagaagcacgacgaggaguucugcgacaugcugcgccuguucgacuucaacaagcaggcgauccggcgccucaagaccgaggcccagaugagcauccagcugaucaacaaggccgugaacgcccugaucaacgaccagcucaucaugaagaaccaccuccgggacaucaugggcauccccuacugcaacuacuccaaguacugcuaccugaaccacacggugaccgggaagaccagccugccccgcugcugccuggucuccaacggcagcuaccugaacgagacccacuucuccgacgacaucgagcagcaggccgacaacaugaucacggagaugcuccagaaggaguacauggaccggcagggcaagaccccgcuggggcugguggaccuguucguguucagcaccuccuucuaccucaucagcaucuuccugcaccuggucaagaucccgacccaccgccacgugaucggcaagcccugccccaagccccaccggcucaaccacauggggaucugcuccugcggccuguacaagcacccgggggugcccgucaaguggaagcgcugaggacuaguuauaagacugacuagcccgaugggccucccaacgggcccuccuccccuccuugcaccgagauuaaucaaaggcucuuuucagagccaccaaaaaaaaaaaaaaaaaaaaaaaaaaaaaaaaaaaaaaaaaaaaaaaaaaaaaaaaaaaaaaaaagaauu

SEQ ID NO: 39575 - RNA, 1655 nt, Artificial Sequence
  mRNA product Design i-3 (hSL-A64-N5) comprising derived and/or modified sequence from LASV(LASV237-NIG-2010;Clade II)__AIT17638__GPCmut11 (opt1)
aggagaaagcuuaccaugggccagaucaucaccuucuuccaggaggugccccacgucaucgaggaggugaugaacaucgugcugaucgcccucagccugcuggccauccucaaggggaucuacaacgucgcgaccugcggccuguucgggcugguguccuuccuccugcugugcggccgcagcugcuccacgaccuacaaggggguguacgagcuccagacccuggagcuggacauggccagccucaacaugaccaugccgcuguccugcacgaagaacaacagccaccacuacaucauggucggcaacgagaccggccuggagcucacccugaccaacacguccaucaucaaccacaaguucugcaaccugagcgacgcccacaagaaggaccucuacgaccacgcccugauguccaucaucagcaccuuccaccuguccauccccaacuucaaccaguacgaggccaugagcugcgacuucaacgggggcaagaucuccgugcaguacaaccucagccacaccuacgcgguggacgccgccaaccacugcgggaccaucgccaacggcguccugcagacguucaugcggauggcguggggcggguccuacaucgcccuggacagcggcaagggguccugggacugcaucaugaccagcuaccaguaccucaucauccagaacaccaccugggaggaccacugccaguucucccgccccagccccaucggcuaccuggggcugcucagccagcggacgcgcgacaucuacaucucccggcgccugcugggcaccuucaccuggacccucagcgacuccgagggcaacgagacgcccgggggcuacugccugacccgguggaugcugaucgaggccgagcucaagugcuucgggaacaccgccguggccaagugcaacgagaagcacgacgaggaguucugcgacaugcugcgccuguucgacuucaacaagcaggcgauccggcgccucaagaccgaggcccagaugagcauccagcugaucaacaaggccgugaacgcccugaucaacgaccagcucaucaugaagaaccaccuccgggacaucaugggcauccccuacugcaacuacuccaaguacugcuaccugaaccacacggucaccgggaagaccagccugccccgcugcugccugguguccaacggcagcuaccugaacgagacccacuucuccgacgacaucgagcagcaggccgacaacaugaucacggagcuccugcagaaggaguacauggaccggcagggcaagaccccgcuggggcugguggaccucuucgucuucagcaccuccuucuaccugaucagcaucuuccugcaccucaucaagaucccgacccaccgccacaucacgggcaagcccugccccaagccccaccggcugaaccacauggggaucugcuccugcggccuguacaagcacccgggggugcccgugaaguggaagcgcugaggacuaguuauaagacugacuagcccgaugggccucccaacgggcccuccuccccuccuugcaccgagauuaaucaaaggcucuuuucagagccaccaaaaaaaaaaaaaaaaaaaaaaaaaaaaaaaaaaaaaaaaaaaaaaaaaaaaaaaaaaaaaaaaagaauu

SEQ ID NO: 39576 - RNA, 1655 nt, Artificial Sequence
  mRNA product Design i-3 (hSL-A64-N5) comprising derived and/or modified sequence from LASV(LASV253-NIG-2011;Clade II)__AIT17670__GPCmut11 (opt1)
aggagaaagcuuaccaugggccagaucaucaccuucuuccaggaggugccccacgucaucgaggaggugaugaacaucgugcugaucgcccucagccugcuggccauccucaaggggaucuacaacgucgcgaccugcggccuguucgggcugguguccuuccuccugcugugcggccgcagcugcuccacgaccuacaaggggguguacgagcuccagacccuggagcuggacauggccagccucaacaugaccaugccgcuguccugcacgaagaacaacagccaccacuacaucauggucggcaacgagaccggccuggagcucacccugaccaacacguccaucaucaaccacaaguucugcaaccugagcgacgcccacaagaagaaccucuacgaccacgcccugauguccaucaucagcaccuuccaccuguccauccccaacuucaaccaguacgaggccaugagcugcgacuucaacgggggcaagaucuccgugcaguacaaccucagccacaccuacgcgguggacgccgccaaccacugcgggaccaucgccaacggcguccugcagacguucaugcggauggcguggggcggguccuacaucgcccuggacagcggcaagggguccugggacugcaucaugaccagcuaccaguaccucaucauccagaacaccaccugggaggaccacugccaguucucccgccccagccccaucggcuaccuggggcugcucagccagcggacgcgcgacaucuacaucucccggcgccugcugggcaccuucaccuggacccucagcgacuccgagggcaacgagacgcccgggggcuacugccugacccgguggaugcugaucgaggccgagcucaagugcuucgggaacaccgccguggccaagugcaacgagaagcacgacgaggaguucugcgacaugcugcgccuguucgacuucaacaagcaggcgauccggcgccucaaggccgaggcccagaugagcauccagcugaucaacaaggccgugaacgcccugaucaacgaccagcucaucaugaagaaccaccuccgggacaucaugggcaucccguacugcaacuacuccaaguacugcuaccugaaccacaccgucacggggcgcaccagccugccccggugcugccugguguccaacggcagcuaccugaacgagacccacuucuccgacgacaucgagcagcaggcggacaacaugaucaccgagcuccugcagaaggaguacaucgaccgccagggcaagacgccccuggggcugguggaccucuucgucuucagcaccuccuucuaccugaucagcaucuuccugcaccucgugaagaucccgacccaccggcacaucaucggcaagcccugccccaagccccaccgccugaaccacauggggaucugcuccugcggccuguacaagcacccgggggugcccgucaaguggaagcggugaggacuaguuauaagacugacuagcccgaugggccucccaacgggcccuccuccccuccuugcaccgagauuaaucaaaggcucuuuucagagccaccaaaaaaaaaaaaaaaaaaaaaaaaaaaaaaaaaaaaaaaaaaaaaaaaaaaaaaaaaaaaaaaaagaauu

SEQ ID NO: 39577 - RNA, 1655 nt, Artificial Sequence
  mRNA product Design i-3 (hSL-A64-N5) comprising derived and/or modified sequence from LASV(LASV254-NIG-2011;Clade II)__AIT17674__GPCmut11 (opt1)
aggagaaagcuuaccaugggccagaucaucaccuucuuccaggaggugccccacgucaucgaggaggugaugaacaucgugcugaucgcccucagccugcuggccauccucaaggggaucuacaacgucgcgaccugcggccuguucgggcugguguccuuccuccugcugugcggccgcagcugcuccacgaccuacaaggggguguacgagcuccagacccuggagcuggacaugaccaaccucaacaugacgaugccgcugagcugcaccaagaacaacucccaccacuacaucauggucggcaacgagaccggccuggagcucacccugacgaacaccagcaucaucaaccacaaguucugcaaccuguccgacgcccacaagaagaaccucuacaaccacgcccugaugagcaucaucuccaccuuccaccugagcauccccaacuucaaccaguacgaggccauguccugcgacuucaacgggggcaagaucagcgugcaguacaaccucucccacagcuacgccguggacgcggccaaccacugcgggaccaucgccaacggcguccugcagacguucaugcggauggccuggggcggguccuacaucgcgcuggacagcggcaaggggaacugggacugcaucaugaccuccuaccaguaccucaucauccagaacaccaccugggaggaccacugccaguucagccgccccucccccaucggcuaccuggggcugcucagccagcggacgcgcgacaucuacaucagccggcgccugcugggcaccuucaccuggacccucuccgacagcgagggcaacgagacgcccgggggcuacugccugacccgguggaugcugaucgaggccgagcucaagugcuucgggaacaccgccguggccaagugcaacgagaagcacgacgaggaguucugcgacaugcugcgccuguucgacuucaacaagcaggccauccggcgccucaagaccgaggcgcaggccaacauccagcugaucaacaaggccgugaacgcccugaucaacgaccagcucaucaugaagaaccaccuccgggacaucaugggcauccccuacugcaacuacuccaaguacugcuaccugaaccacacggucaccgggaagaccagccugccccgcugcugccugguguccaacggcagcuaccugaacgagacccacuucuccgacgacaucgagcagcaggccgacaacaugaucacggagcuccugcagaaggaguacauggaccggcagggcaagaccccgcuggggcugguggaccucuucgucuucagcaccuccuucuaccugaucagcaucuuccugcaccucgugaagaucccgacccaccgccacgugaucggcaagcccugccccaagccccaccggcugaaccacauggggaucugcuccugcggccuguacaagcacccggggguccccgugaaguggaagcgcugaggacuaguuauaagacugacuagcccgaugggccucccaacgggcccuccuccccuccuugcaccgagauuaaucaaaggcucuuuucagagccaccaaaaaaaaaaaaaaaaaaaaaaaaaaaaaaaaaaaaaaaaaaaaaaaaaaaaaaaaaaaaaaaaagaauu

SEQ ID NO: 39578 - RNA, 1655 nt, Artificial Sequence
  mRNA product Design i-3 (hSL-A64-N5) comprising derived and/or modified sequence from LASV(Nig08-A19;Clade III)__ADU56618__GPCmut11 (opt1)
aggagaaagcuuaccaugggccagaucgugaccuucuuccaggaggucccccacgugaucgaggaggugaugaacaucguccugaucgcccucagcauccuggccauccugaaggggcucuacaacaucgcgaccugcggccugaucgggcuggugacguuccuccugcuguccggccgcagcugcuccaugaccuacaaggggguguacgagcuccagacccuggagcugaacaugaacacccucaacaugacgaugccgcugagcugcaccaagaacaacucccaccacuacaucauggucggcaacgagaccggccuggagcucacccugacgaacaccagccugcuccaccacaaguucugcaaccuguccgacgcccacaagaagaaccuguacgaccacacccucaugagcaucaucuccaccuuccaccugagcauccccaacuucaaccaguacgaggccauguccugcgacuucaacgggggcaagaucacggugcaguacaaccugagccacuccuacgccaucgacgccgcgaaccacugcgggaccguggccaacggcguccuccagaccuucaugcggauggccuggggcgggagcuacaucgcccuggacuccggccgcgggaagugggacugcaucaugaccagcuaccaguaccugaucauccagaacacgaccugggaggaccacugccaguucucccggcccagccccaucggcuaccucgggcugcugucccagcgcacccgggacaucuacaucagccgccggcuccugggcaccuucacguggacccugagcgacuccgagggcaacgagacccccgggggcuacugccucacccgcuggaugcugaucgaggcggagcugaagugcuucgggaacacggccguggccaagugcaacgagaagcacgacgaggaguucugcgacaugcuccggcuguucgacuucaacaagcaggccauccgccggcugaaggccgaggcgcagaugagcauccagcucaucaacaaggccgugaacgcccugaucaacgaccagcugaucaugaagaaccaccuccgcgacaucaugggcauccccuacugcaacuacuccaaguacugcuaccugaaccacaccagcaccgggcggaccucccugccccgcugcugccucgucagcaacggcuccuaccugaacgagacgcacuucagcgacgacaucgagcagcaggccgacaacaugaucaccgagaugcugcagaaggaguaccuggaccggcagggcaagaccccgcucgggcugguggaccuguucguguucuccaccagcuucuaccucaucuccaucuuccugcaccuggucaagaucccgacgcaccgccacaucgugggcaagcccugccccaagccccaccggcucaaccacauggggaucugcagcugcggccuguacaagcagccgggggugcccguccgcuggaagcggugaggacuaguuauaagacugacuagcccgaugggccucccaacgggcccuccuccccuccuugcaccgagauuaaucaaaggcucuuuucagagccaccaaaaaaaaaaaaaaaaaaaaaaaaaaaaaaaaaaaaaaaaaaaaaaaaaaaaaaaaaaaaaaaaagaauu

SEQ ID NO: 39579 - RNA, 1658 nt, Artificial Sequence
  mRNA product Design i-3 (hSL-A64-N5) comprising derived and/or modified sequence from LASV(G1180-SLE-2010;Clade IV)__AIT17168__GPCmut11 (opt1)
aggagaaagcuuaccaugggccagaucgugaccuucuuccaggaggucccccacgugaucgaggaggugaugaacaucguccugaucgcccucagcauccuggccgugcugaaggggcucuacaacuucgcgaccugcggccugguggggcugcucaccuuccugcugcucugcggccgcuccugcaccgccagccgguacaagggggucuacgagcugcagacccuggagcucaacauggagacccugaacaugacgaugccgcuguccugcaccaagaacaacagccaccacuacaucauggugggcaacgagaccggccucgagcugacccugacgaacaccuccaucaucaaccacaaguucugcaaccucagcgacgcccacaagaagaaccuguacgaccacgcccugauguccaucaucagcaccuuccaccucuccauccccaacuucaaccaguacgaggccaugagcugcgacuucaacgggggcaagaucuccgugcaguacaaccugagccacuccuacgcgggggacgccgccaaccacugcggcaccgucgccaacggggugcugcagacguucaugcgcauggcguggggcggcagcuacaucgcccucgacuccgggcacggcagcugggacugcaucaugaccuccuaccaguaccugaucauccagaacaccaccugggaggaccacugccaguucagccggcccucccccaucggguaccugggccuccugagccagcgcacgcgggacaucuacaucagccgccggcugcucggcaccuucaccuggacccuguccgacagcgaggggaaggacacgccgggcggguacugccugacccgcuggaugcucaucgaggccgagcugaagugcuucggcaacaccgccguggccaagugcaacgagaagcacgacgaggaguucugcgacaugcugcggcuguucgacuucaacaagcaggcgauccagcgccugaaggccgaggcccagauguccauccagcugaucaacaaggccgucaacgcccucaucaacgaccagcugaucaugaagaaccaccuccgggacaucauggggauccccuacugcaacuacagcaaguacugcuaccucaaccacaccacgaccggcaagaccucccugcccaagugcugccuggugagcaacggcuccuaccucaacgagacccacuucagcgacgacaucgagcagcaggcggacaacaugaucacggagaugcugcagaaggaguacauggagcgccaggggaagacgccccugggccugguggaccucuucgucuucuccaccagcuucuaccugaucuccaucuuccugcaccucgugaagaucccgacccaccggcacaucgugggcaagagcugccccaagccccaccgccugaaccacauggggaucugcuccugcgggcuguacaagcagcccggcgucccggugaaguggaagcggugaggacuaguuauaagacugacuagcccgaugggccucccaacgggcccuccuccccuccuugcaccgagauuaaucaaaggcucuuuucagagccaccaaaaaaaaaaaaaaaaaaaaaaaaaaaaaaaaaaaaaaaaaaaaaaaaaaaaaaaaaaaaaaaaagaauu

SEQ ID NO: 39580 - RNA, 1658 nt, Artificial Sequence
  mRNA product Design i-3 (hSL-A64-N5) comprising derived and/or modified sequence from LASV(G1442-SLE-2011;Clade IV)__AIT17180__GPCmut11 (opt1)
aggagaaagcuuaccaugggccagaucgugaccuucuuccaggaggucccccacgugaucgaggaggugaugaacaucguccugaucgcccucagcauccuggccgugcugaaggggcucuacaacguggcgaccugcggccugaucgggcuggucacguuccuccugcugugcggccgcuccugcaccaccacccucuacaaggggguguacgagcugcagacgcuggagcucaacauggagacccugaacaugaccaugccgcugagcugcaccaagaacaacucccaccacuacauccgggugggcaacgagacgggccucgagcugacccugaccaacaccagcaucaucaaccacaaguucugcaaccucuccgacgcccacaagaagaaccuguacgaccacgcccugaugagcaucaucuccacguuccaccucagcauccccaacuucaaccaguacgaggccauguccugcgacuucaacgggggcaagaucagcguccaguacaaccugucccacagcuacgccggggacgcggccaaccacugcggcaccguggccaacggggugcugcagaccuucaugcgcauggccuggggcggcuccuacaucgcgcucgacagcgggcggggcaacugggacugcaucaugaccuccuaccaguaccugaucauccagaacacgaccugggacgaccacugccaguucagccgccccucccccaucggguaccugggccuccugagccagcggacccgcgacgucuacaucucccggcgccugcucggcaccuucacguggacccugagcgacagcgaggggaaggacaccccgggcggguacugccugacccgguggaugcucaucgaggccgagcugaagugcuucggcaacacggccguggccaagugcaacgagaagcacgacgaggaguucugcgacaugcugcgccucuucgacuucaacaagcaggccauccagcggcugaaggcggaggcccagauguccauccagcugaucaacaaggccgugaacgcccucaucaacgaccagcugaucaugaagaaccaccuccgcgacaucauggggauccccuacugcaacuacagcaaguacugcuaccugaacaacaccgccaccggcaagaccucccugcccaagugcugccugaucagcaacggcuccuaccucaacgagacgcacuucagcgacgacaucgagcaggaggcggacaacaugaucaccgagaugcugcagaaggaguacauggagcggcaggggaagacgccccugggccuggucgaccucuucguguucuccaccagcuucuaccugaucuccaucuuccugcaccucgugaagaucccgacccaccgccacaucgucggcaagagcugccccaagccccaccggcugaaccacauggggaucugcuccugcgggcuguacaagcagcccggcgugccggugcgcuggaagcggugaggacuaguuauaagacugacuagcccgaugggccucccaacgggcccuccuccccuccuugcaccgagauuaaucaaaggcucuuuucagagccaccaaaaaaaaaaaaaaaaaaaaaaaaaaaaaaaaaaaaaaaaaaaaaaaaaaaaaaaaaaaaaaaaagaauu

SEQ ID NO: 39581 - RNA, 1658 nt, Artificial Sequence
  mRNA product Design i-3 (hSL-A64-N5) comprising derived and/or modified sequence from LASV(G3010-SLE-2013;Clade IV)__AIT17344__GPCmut11 (opt1)
aggagaaagcuuaccaugggccagaucgugaccuucuuccaggaggucccccacgugaucgaggaggugaugaacaucguccugaucgcccucagcauccuggccgugcugaaggggcucuacaacuucgcgaccugcggccugguggggcuggucacguuccuccugcugugcggccgcuccugcaccaccagccucuacaaggggguguacgagcugcagacccuggagcucaacauggagacgcugaacaugaccaugccgcuguccugcaccaagaacaacagccaccacuacaucauggugggcaacgagaccggccucgagcugacgcugaccaacaccuccaucaucaaccacaaguucugcaaccucagcgacgcccacaagaagaaccuguacaaccacgcccugauguccaucaucagcaccuuccaccucuccauccccaacuucaaccaguacgaggccaugagcugcgacuucaacgggggcaagaucuccguccaguacaaccugagccacuccuacgccggggacgcggccagccacugcggcacgguggccaacggggugcugcagaccuucaugcggauggccuggggcggcuccuacaucgcgcucgacagcggguacggcaagugggacugcaucaugaccuccuaccaguaccugaucauccagaacaccacgugggaggaccacugccaguucagccgccccucccccaucggguaccugggccuccugagccagcggacccgcgacaucuacaucagccggcgccugcucggcaccuucaccuggacgcuguccgacagcgaggggaaggacaccccgggcggguacugccugacccgguggaugcucaucgaggccgagcugaagugcuucggcaacaccgccgucgccaagugcaacgagaagcacgacgaggaguucugcgacaugcugcgccucuucgacuucaacaagcaggccauccagcggcugaagacggaggcgcagauguccauccagcugaucaacaaggccgugaacgcccucaucaacgaccagcugaucaugaagaaccaccuccgcgacaucauggggauccccuacugcaacuacagcaaguacugcuaccugaaccacaccaccaccggcaagacgucccugcccaagugcugccuggugagcaacggcuccuaccucaacgagacccacuucagcgacgacaucgagcagcaggccgacaacaugaucaccgagaugcugcagaaggaguacauggagcggcaggggaagacgccccugggccuggucgaccucuucguguucuccaccagcuucuaccugaucuccaucuuccugcaccucgugaagaucccgacccaccgccacaucgucggcaagagcugccccaagccccaccggcugaaccacauggggaucugcuccugcgggcuguacaagcagcccggcgugccggugcgcuggaagcggugaggacuaguuauaagacugacuagcccgaugggccucccaacgggcccuccuccccuccuugcaccgagauuaaucaaaggcucuuuucagagccaccaaaaaaaaaaaaaaaaaaaaaaaaaaaaaaaaaaaaaaaaaaaaaaaaaaaaaaaaaaaaaaaaagaauu

SEQ ID NO: 39582 - RNA, 1658 nt, Artificial Sequence
  mRNA product Design i-3 (hSL-A64-N5) comprising derived and/or modified sequence from LASV(G502-SLE-2009;Clade IV)__AIT17126__GPCmut11 (opt1)
aggagaaagcuuaccaugggccagaucgugaccuucuuccaggaggucccccacgugaucgaggaggugaugaacaucguccugaucgcccucagcauccuggccgugcugaaggggcucuacaacuucgcgaccugcggccugguggggcugcucacguuccugcugcucugcggccgcuccugcaccaccgggcuguacaagggcgucuacgagcugcagacccucgagcugaacauggagacgcugaacaugaccaugccgcucagcugcaccaagaacaacucccaccacuacaucauggugggcaacgagaccgggcuggagcugacgcucaccaacaccagcaucaucaaccacaaguucugcaaccuguccgacgcccacaagaagaaccuguacgaccacgcccucaugagcaucaucuccaccuuccaccugagcauccccaacuucaaccaguacgaggccauguccugcgacuucaacggcgggaagaucagcgugcaguacaaccugucccacagcuacgccggcgacgcggccgaccacugcgggacggucgccaacggcgugcuccagaccuucaugcggauggccuggggcggguccuacaucgcgcuggacagcggccgcgggcggugggacugcaucaugaccuccuaccaguaccugaucauccagaacaccacgugggaggaccacugccaguucagccgccccucccccaucggcuaccucggccugcugagccagcggacccgcgacaucuacaucucccggcgccuccuggggaccuucaccuggacgcugagcgacagcgagggcaaggacacccccgggggcuacugccucacccgguggaugcugaucgaggccgagcugaagugcuucgggaacaccgccguggccaagugcaacgagaagcacgacgaggaguucugcgacaugcuccgccuguucgacuucaacaagcaggccauccagcggcugaaggcggaggcccagauguccauccagcucaucaacaaggccgucaacgcccugaucaacgaccagcuggugaugaagaaccaccuccgcgacaucaugggcauccccuacugcaacuacagccgguacugcuaccugaaccacacgaccaccggccgcaccucccugcccaagugcugccucgugagcaacggguccuaccugaacgagacgcacuucagcgacgacaucgagcagcaggccgacaacaugaucaccgagaugcugcagaaggaguacauggagcggcagggcaagaccccgcuggggcucgucgaccuguucguguucuccaccagcuucuaccugaucuccaucuuccuccaccuggugaagaucccgacgcaccgccacaucgucggcaagagcugccccaagccccaccggcugaaccacauggggaucugcuccugcggccucuacaagcagcccggcgugccggugaaguggaagcgcugaggacuaguuauaagacugacuagcccgaugggccucccaacgggcccuccuccccuccuugcaccgagauuaaucaaaggcucuuuucagagccaccaaaaaaaaaaaaaaaaaaaaaaaaaaaaaaaaaaaaaaaaaaaaaaaaaaaaaaaaaaaaaaaaagaauu

SEQ ID NO: 39583 - RNA, 1658 nt, Artificial Sequence
  mRNA product Design i-3 (hSL-A64-N5) comprising derived and/or modified sequence from LASV(G733-SLE-2010;Clade IV)__AIT17154__GPCmut11 (opt1)
aggagaaagcuuaccaugggccagaucgugaccuucuuccaggaggucccccacgugaucgaggaggugaugaacaucguccugaucgcccucagcauccuggccgugcugaaggggcucuacaacuucgcgaccugcggcaucguggggcuggucuccuuccugcuccugugcggccgcagcugcacgaccucccuguacaaggggguguacgagcuccagacccuggagcugaacauggagacccucaacaugacgaugccgcugagcugcaccaagaacaacucccaccacuacaucauggugggcaacgagaccggccuggagcucacccugacgaacaccagcaucaucaaccacaaguucugcaaccuguccgacgcccacaagaagaaccucuacgaccacgcccugaugagcaucaucuccaccuuccaccugagcauccccaacuucaaccaguacgaggccauguccugcgacuucaacgggggcaagaucagcguccaguacaaccucucccacagcuacgccggggacgcggccaaccacugcggcaccaucgccaacggggugcugcagacguucaugcggauggccuggggcggcuccuacaucgcgcuggacagcgggcgcgaccggugggacugcaucaugaccuccuaccaguaccucaucauccagaacaccaccugggaggaccacugccaguucagccgccccucccccaucggcuaccuggggcugcucagccagcggacgcgcgacaucuacaucagccggcgccugcugggcaccuucaccuggacccucuccgacagcgagggcaaggacacgcccgggggcuacugccugacccgguggaugcugaucgaggccgagcucaagugcuucgggaacaccgccguggccaagugcaacgagaagcacgacgaggaguucugcgacaugcugcgccuguucgacuucaacaagcaggccauccagcggcucaaggcggaggcccagauguccauccagcugaucaacaaggccgucaacgcccugaucaacgaccagcucaucaugaagaaccaccuccgcgacaucaugggcauccccuacugcaacuacagcaaguacugcuaccugaaccacaccacgaccgggaagaccucccugcccaagugcugccuggugagcaacggcuccuaccugaacgagacccacuucagcgacgacaucgagcagcaggccgacaacaugaucacggagaugcuccagaaggaguacauggagcggcagggcaagaccccgcuggggcugguggaccuguucgucuucuccaccagcuucuaccucaucuccaucuuccugcaccuggugaagaucccgacccaccgccacguggucggcaagagcugccccaagccccaccggcucaaccacauggggaucugcuccugcggccuguacgggcagcccggcgugccggugaaguggaagcgcugaggacuaguuauaagacugacuagcccgaugggccucccaacgggcccuccuccccuccuugcaccgagauuaaucaaaggcucuuuucagagccaccaaaaaaaaaaaaaaaaaaaaaaaaaaaaaaaaaaaaaaaaaaaaaaaaaaaaaaaaaaaaaaaaagaauu

SEQ ID NO: 39584 - RNA, 1658 nt, Artificial Sequence
  mRNA product Design i-3 (hSL-A64-N5) comprising derived and/or modified sequence from MOPV/LASV reassortant(IGS-1;Clade IV)__AFY05576__GPCmut11 (opt1)
aggagaaagcuuaccaugggccagaucgugaccuucuuccaggaggucccccacgugaucgaggaggugaugaacaucguccugaucgcccucagcgugcuggccgugcugaaggggcucuacaacuucgcgaccugcggccuggucgggcuggugacguuccuccugcugugcggccgcuccugcaccaccagccucuacaaggggguguacgagcugcagacccuggagcucaacauggagacgcugaacaugaccaugccgcuguccugcaccaagaacaacagccaccacuacaucauggucggcaacgagaccggccucgagcugacgcugaccaacaccuccaucaucaaccacaaguucugcaaccucagcgacgcccacaagaagaaccuguacgaccacgcccugauguccaucaucagcaccuuccaccucuccauccccaacuucaaccaguacgaggccaugagcugcgacuucaacgggggcaagaucuccgugcaguacaaccugagccacuccuacgccggggacgcggccaaccacugcggcacgguggccaacgggguccugcagaccuucaugcggauggccuggggcggcagcuacaucgcgcucgacuccgggcgcggcaacugggacugcaucaugaccagcuaccaguaccugaucauccagaacaccacgugggaggaccacugccaguucucccggcccagccccaucggguaccugggccuccugucccagcgcacccgggacaucuacaucagccgccggcugcucggcaccuucaccuggacgcugagcgacuccgagggggaggacaccccgggcggguacugccugacccgcuggaugcucaucgaggccgagcugaagugcuucggcaacaccgccguggccaagugcaacgagaagcacgacgaggaguucugcgacaugcugcggcuguucgacuucaacaagcaggccauccagcgccugaaggcggaggcccagaugagcauccagcugaucaacaaggccgugaacgcccucaucaacgaccagcugaucaugaagaaccaccuccgggacaucauggggauccccuacugcaacuacuccaaguacugcuaccucaaccacacgaccaccggccgcaccagccugcccaagugcugccuggucuccaacggcagcuaccucaacgagacgcacuucuccgacgacaucgagcagcaggccgacaacaugaucaccgagaugcugcagaaggaguacauggagcggcaggggaagacgccccugggccugguggaccucuucguguucagcaccuccuucuaccugaucagcaucuuccugcaccucgucaagaucccgacccaccgccacaucguggggaaguccugccccaagccccaccggcugaaccacaugggcaucugcagcugcgggcuguacaagcagcccggcgugccggucaaguggaagcgcugaggacuaguuauaagacugacuagcccgaugggccucccaacgggcccuccuccccuccuugcaccgagauuaaucaaaggcucuuuucagagccaccaaaaaaaaaaaaaaaaaaaaaaaaaaaaaaaaaaaaaaaaaaaaaaaaaaaaaaaaaaaaaaaaagaauu

SEQ ID NO: 39585 - RNA, 1658 nt, Artificial Sequence
  mRNA product Design i-3 (hSL-A64-N5) comprising derived and/or modified sequence from LASV(LM765-SLE-2012;Clade IV)__AIT17814__GPCmut11 (opt1)
aggagaaagcuuaccaugggccagaucgugaccuucuuccaggaggucccccacgugaucgaggaggugaugaacaucguccugaucgcccucagcauccuggccgugcugaaggggcucuacaacuucgcgaccugcggccugguggggcuggucacguuccuccugcugugcggccgcuccugcaccaccagccucuacaaggggguguacgagcugcagacccuggagcucaacauggagacgcugaacaugaccaugccgcuguccugcaccaagaacaacagccaccacuacaucauggugggcaacgagaccggccucgagcugacgcugaccaacaccuccaucaucgaccacaaguucugcaaccucagcgacgcccaccggaagaaccuguacgaccacgcccugauguccaucaucagcaccuuccaccucuccauccccaacuucaaccaguacgaggccaugagcugcgacuucaacgggggcaagaucuccguccaguacaaccugagccacuccuacgccaaggacgcggccgaccacugcgggacgguggccaacggcgugcugcagaccuucaugcgcauggccuggggcgggagcuacaucgcgcucgacuccggccgggggcgcugggacugcaucaugaccagcuaccaguaccugaucauccagaacaccacgugggaggaccacugccaguucucccggcccagccccaucggcuaccuggggcuccugucccagcgcacccgggacaucuacaucagccgccggcugcucggcaccuucaccuggacgcugagcgacuccgagggcaaggacacccccgggggcuacugccugacccgcuggaugcucaucgaggccgagcugaagugcuucgggaacaccgccgucgccaagugcaacgagaagcacgacgaggaguucugcgacaugcugcggcuguucgacuucaacaagcaggccauccagcgccugaaggcggaggcccagaugagcauccagcugaucaacaaggccgugaacgcccucaucaacgaccagcugaucaugaagaaccaccuccgggacaucaugggcauccccuacugcaacuacuccaaguacugcuaccucaaccacacgaccaccgggaagaccagccugcccaagugcugccugguguccaacggcagcuaccucaacgagacgcacuucuccgacgacaucgagcagcaggccgacaacaugaucaccgagaugcugcagaaggaguacauggagcgccagggcaagaccccgcuggggcuggucgaccucuucguguucagcaccuccuucuaccugaucagcaucuuccugcaccucgugaagaucccgacgcaccggcacaucgucggcaagcccugccccaagccccaccgccugaaccacauggggaucugcuccugcggccuguacaagcagccgggggugcccgugaaguggaagcggugaggacuaguuauaagacugacuagcccgaugggccucccaacgggcccuccuccccuccuugcaccgagauuaaucaaaggcucuuuucagagccaccaaaaaaaaaaaaaaaaaaaaaaaaaaaaaaaaaaaaaaaaaaaaaaaaaaaaaaaaaaaaaaaaagaauu

SEQ ID NO: 39586 - RNA, 1658 nt, Artificial Sequence
  mRNA product Design i-3 (hSL-A64-N5) comprising derived and/or modified sequence from LASV(LM776-SLE-2012;Clade IV)__AIT17824__GPCmut11 (opt1)
aggagaaagcuuaccaugggccagaucgugaccuucuuccaggaggucccccacgugaucgaggaggugaugaacaucguccugaucgcccucagcauccuggccgugcugaaggggcucuacaacuucgcgaccugcggccugguggggcuggucacguuccuccugcugugcggccgcuccugcaccaccagcguguacaaggggguguacgagcuccagacccuggagcugaacauggagacgcucaacaugaccaugccgcuguccugcaccaagaacaacagccaccacuacaucauggucggcaacgagaccggccuggagcucacgcugaccaacaccuccaucaucaaccacaaguucugcaaccugagcgacgcccacaagaagaaccucuacgaccacgcccugauguccaucaucagcaccuuccaccuguccauccccaacuucaaccaguacgaggccaugagcugcgacuucaacgggggcaagaucuccgugcaguacaaccucagccacuccuacgccggggacgcggccaaccacugcggcacgguggccaacgggguccugcagaccuucaugcggauggccuggggcggcagcuacaucgcgcuggacuccgggcacggcaagugggacugcaucaugaccagcuaccaguaccucaucauccagaacaccacgugggaggaccacugccaguucucccgccccagccccaucggguaccugggccugcucucccagcggacccgcgacaucuacaucagccggcgccugcugggcaccuucaccuggacgcucagcgacuccgaggggaaggacaccccgggcggguacugccugacccgguggaugcugaucgaggccgagcucaagugcuucggcaacaccgccguggccaagugcaacgagaagcacgacgaggaguucugcgacaugcugcgccuguucgacuucaacaagcaggccauccagcggcucaaggcggaggcccagaugagcauccagcugaucaacaaggccgugaacgcccugaucaacgaccagcucaucaugaagaaccaccuccgcgacaucauggggauccccuacugcaacuacuccaaguacugcuaccugaaccacacgaccaccggcaagaccagccugcccaagugcugccuggucuccaacggcagcuaccugaacgagacgcacuucuccgacgacaucgagcagcaggccgacaacaugaucaccgagaugcuccagaaggaguacauggagcggcaggggaagacgccccugggccugguggaccuguucguguucagcaccuccuucuaccucaucagcaucuuccugcaccuggucaagaucccgacccaccgccacaucguggggaaguccugccccaagccccaccggcucaaccacaugggcaucugcagcugcgggcuguacaagcagcccggcgugccgguccgcuggaagcggugaggacuaguuauaagacugacuagcccgaugggccucccaacgggcccuccuccccuccuugcaccgagauuaaucaaaggcucuuuucagagccaccaaaaaaaaaaaaaaaaaaaaaaaaaaaaaaaaaaaaaaaaaaaaaaaaaaaaaaaaaaaaaaaaagaauu

SEQ ID NO: 39587 - RNA, 1658 nt, Artificial Sequence
  mRNA product Design i-3 (hSL-A64-N5) comprising derived and/or modified sequence from LASV(Mad39;Clade IV)__ANH09722__GPCmut11 (opt1)
aggagaaagcuuaccaugggccagaucgugaccuucuuccaggaggucccccacgugaucgaggaggugaugaacaucguccugaucgcccucagcauccuggccgugcugaaggggcucuacaacguggcgaccugcggccugaucgggcuggucacguuccuccugcugugcggccgcuccugcaccaccacccucuacaaggggguguacgagcugcaggcccuggagcucaacauggagacgcugaacaugaccaugccgcugagcugcaccaagaacaacucccaccacuacauccgggugggcaacgagaccggccucgagcugacgcugaccaacaccagccucaucaaccacaaguucugcaaccuguccgacgcccacaagaagaaccuguacgaccacgcccucaugagcaucaucuccaccuuccaccugagcauccccaacuucaaccaguacgaggccauguccugcgacuucaacgacgggaagaucagcguccaguacaaccugucccacacguacgcgggcgacaccgccaaccacugcgggaccguggccaacggcgugcuccagaccuucaugcgcauggccuggggcgggagcuacaucgcgcuggacuccggccgcgggggcugggacugcaucaugacgagcuaccaguaccugaucauccagaacaccaccugggaggaccacugccaguucucccggcccagccccaucggguaccucggccugcugucccagcggacccgcgacaucuacaucagccggcgccuccugggcacguucaccuggacccuguccgacagcgaggggaaggacaccccgggcggguacugccucacgcgguggaugcugaucgaggccgagcugaagugcuucggcaacaccgccgucgccaagugcaacgagaagcacgacgaggaguucugcgacaugcuccgccuguucgacuucaacaagcaggccauccagcggcugaaggcggaggcccagaugagcauccagcucaucaacaaggccgugaacgcccugaucaacgaccagcugaucaugaagaaccaccuccgcgacaucauggggauccccuacugcaacuacuccaaguacugcuaccugaaccacaccgugaccggcaagacgagccugcccaagugcugccucgucuccaacggcagcuaccugaacgagacccacuucuccgacgacaucgagcagcaggccgacaacaugaucaccgagaugcugcagaaggaguacauggagcggcaggggaagacgccccugggccucguggaccuguucguguucagcaccuccuucuaccugaucagcaucuuccuccaccuggucaagaucccgacccaccgccacgugguggggaagcccugccccaagccccaccggcugaaccacaugggcaucugcuccugcggguucuacaagcagccgggcguccccgugcgcuggaagcggugaggacuaguuauaagacugacuagcccgaugggccucccaacgggcccuccuccccuccuugcaccgagauuaaucaaaggcucuuuucagagccaccaaaaaaaaaaaaaaaaaaaaaaaaaaaaaaaaaaaaaaaaaaaaaaaaaaaaaaaaaaaaaaaaagaauu

SEQ ID NO: 39588 - RNA, 1658 nt, Artificial Sequence
  mRNA product Design i-3 (hSL-A64-N5) comprising derived and/or modified sequence from LASV(Z0947-SLE-2011;Clade IV)__AIT17840__GPCmut11 (opt1)
aggagaaagcuuaccaugggccagaucgugaccuucuuccaggaggucccccacgugaucgaggaggugaugaacaucguccugaucgcccucagcauccuggccgugcugaaggggcucuacaacuucgcgaccugcggccugguggggcuggucacguuccuccugcugugcggccgcuccugcaccaucagccucuacaaggggguguacgagcugcagacccuggagcucaacauggagacccugaacaugacgaugccgcuguccugcaccaagaacaacagccaccacuacaucauggugggcaacgagaccggccucgagcugacccugacgaacaccuccaucaucaaccacaaguucugcaaccucagcgacgcccacaagaagaaccuguacgaccacgcccugauguccaucaucagcaccuuccaccucuccauccccaacuucaaccaguacgaggccaugagcugcgacuucaacgggggcaagaucuccguccaguacaaccugagccacuccuacgccggggacgcggccaaccacugcggcaccguggccaacggggugcugcagacguucaugcggauggccuggggcggcagcuacaucgcgcucgacuccgggcgcgaccggugggacugcaucaugaccagcuaccaguaccugaucauccagaacaccaccugggaggaccacugccaguucucccgccccagccccaucggcuaccuggggcuccugucccagcggacgcgcgacaucuacaucagccggcgccugcucggcaccuucaccuggacccugagcgacuccgagggcaaggacacgcccgggggcuacugccugacccgguggaugcucaucgaggccgagcugaagugcuucgggaacaccgccgucgccaagugcaacgagaagcacgacgaggaguucugcgacaugcugcgccucuucgacuucaacaagcaggccauccagcggcugaaggcggaggcccagaugagcauccagcugaucaacaaggccgugaacgcccucaucaacgaccagcugaucaugaagaaccaccuccgcgacaucaugggcauccccuacugcaacuacuccaaguacugcuaccugaaccacaccacgaccgggaagaccagccugcccaagugcugccugguguccaacggcagcuaccucaacgagacccacuucuccgacgacaucgagcagcaggccgacaacaugaucacggagaugcugcagaaggaguacauggagcggcagggcaagaccccgcuggggcuggucgaccucuucguguucagcaccuccuucuaccugaucagcaucuuccugcaccucgugaagaucccgacccaccgccacaucgucggcaagcccugccccaagccccaccggcugaaccacauggggaucugcuccugcggccuguacaagcagccgggggugcccgugaaguggaagcgcugaggacuaguuauaagacugacuagcccgaugggccucccaacgggcccuccuccccuccuugcaccgagauuaaucaaaggcucuuuucagagccaccaaaaaaaaaaaaaaaaaaaaaaaaaaaaaaaaaaaaaaaaaaaaaaaaaaaaaaaaaaaaaaaaagaauu

SEQ ID NO: 39589 - RNA, 1658 nt, Artificial Sequence
  mRNA product Design i-3 (hSL-A64-N5) comprising derived and/or modified sequence from LASV(Josiah;Clade IV)__NP_694870__GPCmut11 (opt4)
aggagaaagcuuaccaugggccagaucgugaccuucuuccaggaggugccccacgugaucgaggaggugaugaacaucgugcugaucgcccugagcgugcuggccgugcugaagggccuguacaacuucgccaccugcggccuggugggccuggugaccuuccugcugcugugcggcagaagcugcaccaccagccuguacaagggcguguacgagcugcagacccuggagcugaacauggagacccugaacaugaccaugccccugagcugcaccaagaacaacagccaccacuacaucauggugggcaacgagaccggccuggagcugacccugaccaacaccagcaucaucaaccacaaguucugcaaccugagcgacgcccacaagaagaaccuguacgaccacgcccugaugagcaucaucagcaccuuccaccugagcauccccaacuucaaccaguacgaggccaugagcugcgacuucaacggcggcaagaucagcgugcaguacaaccugagccacagcuacgccggcgacgccgccaaccacugcggcaccguggccaacggcgugcugcagaccuucaugagaauggccuggggcggcagcuacaucgcccuggacagcggcagaggcaacugggacugcaucaugaccagcuaccaguaccugaucauccagaacaccaccugggaggaccacugccaguucagcagacccagccccaucggcuaccugggccugcugagccagagaaccagagacaucuacaucagcagaagacugcugggcaccuucaccuggacccugagcgacagcgagggcaaggacacccccggcggcuacugccugaccagauggaugcugaucgaggccgagcugaagugcuucggcaacaccgccguggccaagugcaacgagaagcacgacgaggaguucugcgacaugcugagacuguucgacuucaacaagcaggccauccagagacugaaggccgaggcccagaugagcauccagcugaucaacaaggccgugaacgcccugaucaacgaccagcugaucaugaagaaccaccugagagacaucaugggcauccccuacugcaacuacagcaaguacugcuaccugaaccacaccaccaccggcagaaccagccugcccaagugcugccuggugagcaacggcagcuaccugaacgagacccacuucagcgacgacaucgagcagcaggccgacaacaugaucaccgagaugcugcagaaggaguacauggagagacagggcaagaccccccugggccugguggaccuguucguguucagcaccagcuucuaccugaucagcaucuuccugcaccuggugaagauccccacccacagacacaucgugggcaagagcugccccaagccccacagacugaaccacaugggcaucugcagcugcggccuguacaagcagcccggcgugcccgugaaguggaagagaugaggacuaguuauaagacugacuagcccgaugggccucccaacgggcccuccuccccuccuugcaccgagauuaaucaaaggcucuuuucagagccaccaaaaaaaaaaaaaaaaaaaaaaaaaaaaaaaaaaaaaaaaaaaaaaaaaaaaaaaaaaaaaaaaagaauu

SEQ ID NO: 39590 - RNA, 1655 nt, Artificial Sequence
  mRNA product Design i-3 (hSL-A64-N5) comprising derived and/or modified sequence from LASV(LP;Clade I)__AAF86701__GPCmut11 (opt4)
aggagaaagcuuaccaugggccagaucaucaccuucuuccaggaggugccccacgugaucgaggaggugaugaacaucgugcugaucgcccugagccugcuggccauccugaagggccuguacaacaucgccaccugcggcaucaucggccugguggccuuccuguuccugugcggcaagagcugcagccugacccugaagggcggcuacgagcugcagacccuggagcugaacauggagacccugaacaugaccaugccccugagcugcaccaagaacagcagccaccacuacaucagagugggcaacgagaccggccuggagcugacccugaccaacaccagcaucaucaaccacaaguucugcaaccugagcgacgcccacaagaagaaccuguacgaccacgcccugaugagcaucaucagcaccuuccaccugagcauccccaacuucaaccaguacgaggccaugagcugcgacuucaacggcggcaagaucagcgugcaguacaaccugagccacagcuacgccggcgacgccgccgagcacugcggcaccguggccaacggcgugcugcagaccuucaugagaauggccuggggcggcagauacaucgcccuggacagcggcaagggcaacugggacugcaucaugaccagcuaccaguaccugaucauccagaacaccaccugggaggaccacugccaguucagcagacccagccccaucggcuaccugggccugcugagccagagaaccagagacaucuacaucagcagaagacugcugggcaccuucaccuggacccugagcgacagcgagggcaacgagacccccggcggcuacugccugaccagauggaugcugaucgaggccgagcugaagugcuucggcaacaccgccguggccaagugcaacgagaagcacgacgaggaguucugcgacaugcugagacuguucgacuucaacaagcaggccaucagaagacugaaggccgaggcccagaugagcauccagcugaucaacaaggccgugaacgcccugaucaacgaccagcugaucaugaagaaccaccugagagacaucaugggcauccccuacugcaacuacagcaaguacugcuaccugaaccacaccagcagcggcagaaccagccugcccaagugcugccugaucagcaacggcagcuaccugaacgagacccaguucagcgacgacaucgagcagcaggccgacaacaugaucaccgagaugcugcagaaggaguacaucgagagacagggcaagaccccccugggccugguggacaucuucaucuucagcaccagcuucuaccugaucagcaucuuccugcaccugaucaagauccccacccacagacacaucgugggcaagcccugccccaagccccacagacugaaccacaugggcgugugcagcugcggccuguacaagcaccccggcgugcccaccaaguggaagagaugaggacuaguuauaagacugacuagcccgaugggccucccaacgggcccuccuccccuccuugcaccgagauuaaucaaaggcucuuuucagagccaccaaaaaaaaaaaaaaaaaaaaaaaaaaaaaaaaaaaaaaaaaaaaaaaaaaaaaaaaaaaaaaaaagaauu

SEQ ID NO: 39591 - RNA, 1655 nt, Artificial Sequence
  mRNA product Design i-3 (hSL-A64-N5) comprising derived and/or modified sequence from LASV(803213;Clade II)__AAF86703__GPCmut11 (opt4)
aggagaaagcuuaccaugggccagaucaucaccuucuuccaggaggugccccacgugaucgaggaggugaugaacaucgugcugaucgcccugagccugcuggccauccugaagggcaucuacaacguggccaccugcggccuguucggccugaucagcuuccugcugcugugcggcagaagcugcagcgugaccuacaagggcguguacgagcugcagacccuggagcugaacauggccaaccugaacaugaccaugccccugagcugcaccaagaacaacagccaccacuacaucauggugggcaacgagaccggccuggagcugacccugaccaacaccagcaucaucaaccacaaguucugcaaccugagcgacgcccacaagaagaaccuguacgaccacgcccugaugagcaucaucagcaccuuccaccugagcauccccaacuucaaccaguacgaggccaugagcugcgacuucaacggcggcaagaucagcgugcaguacaaccugagccacagcuucgccguggacgccgccaaccacugcggcaccaucgccaacggcgugcugcagaccuucaugagaauggccuggggcggcagcuacaucgcccuggacagcggcaagggcaacugggacugcaucaugaccagcuaccaguaccugaucauccagaacaccaccugggaggaccacugccaguucagcagacccagccccaucggcuaccugggccugcugagccagagaaccagagacaucuacaucagcagaagacugcugggcaccuucaccuggacccugagcgacagcgagggcaacgaggcccccggcggcuacugccugaccagauggaugcugaucgaggccgagcugaagugcuucggcaacaccgccguggccaagugcaacgagaagcacgacgaggaguucugcgacaugcugagacuguucgacuucaacaagcaggccaucaagagacugaagaccgaggcccagaugagcauccagcugaucaacaaggccgugaacgcccugaucaacgaccagcugaucaugaagaaccaccugagagacaucaugggcauccccuacugcaacuacagcagauacugcuaccugaaccacaccgugaccggcaagaccagccugcccagaugcugccuggugagcaacggcagcuaccugaacgagacccacuucagcgacgacaucgagcagcaggccgacaacaugaucaccgagaugcugcagaaggaguacauggacagacagggcaagaccccccugggccugguggaccuguucguguucagcaccagcuucuaccugaucagcaucuuccugcaccuggugaagauccccacccacagacacaucgugggcaagcccugccccaagccccacagacugaaccacaugggcaucugcagcugcggccuguacaagcaccccggcgugcccgugaaguggaagagaugaggacuaguuauaagacugacuagcccgaugggccucccaacgggcccuccuccccuccuugcaccgagauuaaucaaaggcucuuuucagagccaccaaaaaaaaaaaaaaaaaaaaaaaaaaaaaaaaaaaaaaaaaaaaaaaaaaaaaaaaaaaaaaaaagaauu

SEQ ID NO: 39592 - RNA, 1655 nt, Artificial Sequence
  mRNA product Design i-3 (hSL-A64-N5) comprising derived and/or modified sequence from LASV(GA391;Clade III)__CAA36645__GPCmut11 (opt4)
aggagaaagcuuaccaugggccagaucgugaccuucuuccaggaggugccccacgugaucgaggaggugaugaacaucgugcugaucgcccugagcauccuggccauccugaagggccuguacaacguggccaccugcggccugaucggccuggugaccuuccugcugcugagcggcagaagcugcagccugaucuacaagggcaccuacgagcugcagacccuggagcugaacauggagacccugaacaugaccaugccccugagcugcaccaagaacaacagccaccacuacaucagagugggcaacgagaccggccuggagcugacccugaccaacaccagcauccugaaccacaaguucugcaaccugagcgacgcccacaagagaaaccuguacgaccacagccugaugagcaucaucagcaccuuccaccugagcauccccaacuucaaccaguacgaggccaugagcugcgacuucaacggcggcaagaucaccgugcaguacaaccugagccacagcuucgccguggacgccgccggccacugcggcacccuggccaacggcgugcugcagaccuucaugagaauggccuggggcggcagcuacaucgcccuggacagcggcagaggcaacugggacugcaucaugaccagcuaccaguaccugaucauccagaacaccaccugggacgaccacugccaguucagcagacccagccccaucggcuaccugggccugcugagccagagaaccagagacaucuacaucagcagaagacugcugggcaccuucaccuggacccugagcgacagcgagggcaacgagacccccggcggcuacugccugaccagauggaugcugaucgaggccgagcugaagugcuucggcaacaccgccguggccaagugcaacgagaagcacgacgaggaguucugcgacaugcugagacuguucgacuucaacaagcaggccaucagaagacugaagaccgaggcccagaugagcauccagcugaucaacaaggccgugaacgcccugaucaacgaccagcugaucaugaagaaccaccugagagacaucaugggcauccccuacugcaacuacagcagauacugcuaccugaaccacaccagcaccggcaagaccagccugcccagaugcugccugaucagcaacggcagcuaccugaacgagaccaaguucagcgacgacaucgagcagcaggccgacaacaugaucaccgagaugcugcagaaggaguacaucgacagacagggcaagaccccccugggccugguggaccuguucguguucagcaccagcuucuaccugaucagcaucuuccugcaccuggugaagauccccacccacagacacaucgugggcaagcccugccccaagccccacagacugaaccacaugggcaucugcagcugcggccuguacaagcagcccggcgugcccgugagauggaagagaugaggacuaguuauaagacugacuagcccgaugggccucccaacgggcccuccuccccuccuugcaccgagauuaaucaaaggcucuuuucagagccaccaaaaaaaaaaaaaaaaaaaaaaaaaaaaaaaaaaaaaaaaaaaaaaaaaaaaaaaaaaaaaaaaagaauu

SEQ ID NO: 39593 - RNA, 1658 nt, Artificial Sequence
  mRNA product Design i-3 (hSL-A64-N5) comprising derived and/or modified sequence from LASV(AV;Clade V)__CCA30314__GPCmut11 (opt4)
aggagaaagcuuaccaugggccagaucgugaccuucuuccaggaggugccccacgugaucgaggaggugaugaacaucgugcugaucgcccugagcauccuggccgugcugaagggccuguacaacaucgccaccugcggccugaucggccugaucaccuuccugcugcugugcggcagaagcugcagcagcaaccuguacaagggcguguacgagcugcagagccuggaccugaacauggagacccugaacaugaccaugccccugagcugcaccaagaacaacagccaccacuacaucagagugggcaacgacaccggccuggagcugacccugaccaacaccagcauccugaaccacaaguucugcaaccugagcgacgcccacaagaaggaccuguacgaccacgcccugaugagcaucaucagcaccuuccaccugagcauccccaacuucaaccaguacgaggccaugagcugcgacuucaacggcggcaagaucagcgugcaguacaaccugagccacagcuacgccaucgacgccgccaaccacugcggcaccguggccaacggcauccugcagaccuucaugagaauggccuggggcggcagcuacaucgcccuggacagcggcagaggcaacugggacugcaucaugaccagcuaccaguaccugaucauccagaacaccaccugggagaaccacugccaguucagcagacccagccccaucggcuaccugggccugcugagccagagaaccagagacaucuacaucagcagaagacugcugggcaccuucaccuggacccugagcgacagcgagggcaacgccacccccggcggcuacugccugaccagauggaugcugaucgaggccgagcugaagugcuucggcaacaccgccguggccaagugcaacgagaagcacgacgaggaguucugcgacaugcugagacuguucgacuucaacaagcaggccaucagcagacugaagagcgaggcccagaugagcauccagcugaucaacaaggccgugaacgcccugaucaacgaccagcugaucaugaagaaccaccugagagacaucaugggcauccccuacugcaacuacagcaaguacugcuaccugaaccacaccaucaccggcaagaccagccugcccaagugcugccuggugagcaacggcagcuaccugaacgagacccacuucagcgacgacaucgagcagcaggccgacaacaugaucaccgagaugcugcagaaggaguacauggagagacagggcaagaccccccugggccugguggaccuguucguguucagcaccagcuucuaccugaucagcaucuuccugagacuggugaagauccccacccacagacacaucgugggcaagcccugccccaagccccacagacugaaccacaugggcaucugcagcugcggccuguacaagcagcccggcgugcccgugagauggaagagaugaggacuaguuauaagacugacuagcccgaugggccucccaacgggcccuccuccccuccuugcaccgagauuaaucaaaggcucuuuucagagccaccaaaaaaaaaaaaaaaaaaaaaaaaaaaaaaaaaaaaaaaaaaaaaaaaaaaaaaaaaaaaaaaaagaauu

SEQ ID NO: 39594 - RNA, 1655 nt, Artificial Sequence
  mRNA product Design i-3 (hSL-A64-N5) comprising derived and/or modified sequence from LASV(Togo/2016/7082;Clade VI)__AMR44577__GPCmut11 (opt4)
aggagaaagcuuaccaugggccagaucaucaccuucuuccaggaggugccccacgugaucgaggaggugaugaacaucgugcugaucgcccugagccugcuggccauccugaagggcguguacaacguggccaccugcggcaucaucggccuggugaccuuccuguuccugugcggcagaagcugcagccugaucuacaagggcagcuacgagcugcagacccuggagcugaacauggagacccugaacaugaccaugccccugagcugcaccaagaacagcagccaccacuacaucagagugggcaacgagaccggccuggagcugacccugaccaacaccagcaucaucaaccacaaguucugcaaccugagcgacgcccacaagagaaaccuguacgaccacgcccugaugagcauccugagcaccuuccaccugagcauccccaacuucaaccaguacgaggccaugagcugcgacuucaacggcggcaagaucagcgugcaguacaaccugagccacgccuacgccguggacgccgccgagcacugcggcaccguggccaacggcgugcugcagaccuucaugagaauggccuggggcggcagcuacaucgcccuggacagcggcagaggcaacugggacugcaucaugaccagcuaccaguaccugaucauccagaacaccaccugggaggaccacugccaguucagcagacccagccccaucggcuaccugggccugcugagccagagaaccagagacaucuacaucagcagaagacugcugggcaccuucaccuggacccugagcgacagcgagggcaacgagacccccggcggcuacugccugaccagauggaugcugaucgaggccgagcugaagugcuucggcaacaccgccguggccaagugcaacgagaagcacgacgaggaguucugcgacaugcugagacuguucgacuucaacaagcaggccauccagagacugaagagcgaggcccagaugagcauccagcugaucaacaaggccgugaacgcccugaucaacgaccagcugaucaugaagaaccaccugagagacaugaugggcauccccuacugcaacuacagcaaguacugcuaccugaaccacaccagcagcggcagaaccagccugcccaagugcugccuggugagcaacggcagcuaccugaacgagacccacuucagcgacgacaucgagcagcaggccgacaacaugaucaccgagaugcugcagaaggaguacaucgacagacagggcaagaccccccugggccugguggaccuguucguguucagcaccagcuucuaccugaucagcaucuuccugcaccugaucaagauccccacccacagacacaucgugggcaagcccugccccaagccccacagacugaaccacaugggcaucugcagcugcggccuguacaagcagcccggcgugcccaccagauggaagagaugaggacuaguuauaagacugacuagcccgaugggccucccaacgggcccuccuccccuccuugcaccgagauuaaucaaaggcucuuuucagagccaccaaaaaaaaaaaaaaaaaaaaaaaaaaaaaaaaaaaaaaaaaaaaaaaaaaaaaaaaaaaaaaaaagaauu

SEQ ID NO: 39595 - RNA, 1655 nt, Artificial Sequence
  mRNA product Design i-3 (hSL-A64-N5) comprising derived and/or modified sequence from LASV(KAK-428;Clade n.d. (VII))__ANH09740__GPCmut11 (opt4)
aggagaaagcuuaccaugggccagaucgugaccuucuuccaggaggugccccacgugaucgaggaggugaugaacaucgugcugaucgcccugagccugcuggccauccugaagggccuguacaacuucgccaccugcggcgugaucggccugaucaccuuccugcugcugugcggcagaagcugcagcgccaccuacaagggccaguacgagcugcagacccuggagcugaacauggagagccugaacaugaccaugccccugagcugcaccaagaacaacagccaccacuacaucagagccggcaacaacaccggccuggagcugacccugaccaacaccagcaucaucagccacaaguucugcaaccugagcgacgcccacaagaagaaccuguacgaccacacccugaugagcaucaucaccaccuuccaccugagcauccccaacuucaaccaguacgaggccaugagcugcgacuucaacggcggcaagaucagcauccaguacaaccugagccacagcuacgccggcgacgccgcccagcacugcggcaccguggccaacggcgugcugcagaccuucaugagaauggccuggggcggcagcuaccuggcccuggacagcggcagaagaggcugggacugcaucaucagcagcuaccaguaccugaucauccagaacaccaccugggacgaccacugccaguucagcagacccagccccaucggcuaccugggcuucgugagccagaagaccagagacaucuacaucagcagaagacugcugggcaccuucaccuggacccugagcgacagcgagggccacgacaugcccggcggcuacugccugaccagauggaugcugaucgaggccgaccugaagugcuucggcaacaccgccguggccaagugcaacgagaagcacgacgaggaguucugcgacauguggagacuguucgacuucaacaagcaggccauccagagacugaaggccgaggcccagaugaacauccagcugaucaacaaggccgugaacgcccugaucaacgaccagcugaugaugaagaaccaccugagagacaucaugggcauccccuacugcaacuacagcaaguucugcuaccugaacaacaccaccaccggcagaaccagccugcccagaugcugccugaucagcaacggcagcuaccugaacgagacccacuucagcgacgacaucgagcagcaggccgacaacaugaucaccgagaugcugcagaaggaguacauggacagacagggcaagaccccccugggccugguggaccuguucguguucagcaccagcuucuaccugaucaccaucuuccugcaccuggugaagauccccacccacagacacaucgugggcaagcccugccccaagccccacagacugaaccacaugggcaucugcagcugcggccuguacaagcagcccggcgugcccgugagauggaagagaugaggacuaguuauaagacugacuagcccgaugggccucccaacgggcccuccuccccuccuugcaccgagauuaaucaaaggcucuuuucagagccaccaaaaaaaaaaaaaaaaaaaaaaaaaaaaaaaaaaaaaaaaaaaaaaaaaaaaaaaaaaaaaaaaagaauu

SEQ ID NO: 39596 - RNA, 1655 nt, Artificial Sequence; identical to SEQ ID NO: 39590
  mRNA product Design i-3 (hSL-A64-N5) comprising derived and/or modified sequence from LASV(Pinneo-NIG-1969;Clade I)__AIT17836__GPCmut11 (opt4)

SEQ ID NO: 39597 - RNA, 1655 nt, Artificial Sequence
  mRNA product Design i-3 (hSL-A64-N5) comprising derived and/or modified sequence from LASV(ISTH0009-NIG-2011;Clade II)__AIT17404__GPCmut11 (opt4)
aggagaaagcuuaccaugggccagaucaucaccuucuuccaggaggugccccacgugaucgaggaggugaugaacaucgugcugaucgcccugagccugcuggccauccugaagggcaucuacaacguggccaccugcggccuguucggccuggugagcuuccugcugcugugcggcagaagcugcagcaccaccuacaagggcguguacgagcugcagacccuggagcuggacauggccagccugaacaugaccaugccccugagcugcaccaagaacaacagccaccacuacaucauggugggcaacgagaccggccuggagcugacccugaccaacaccagcaucaucaaccacaaguucugcaaccugagcgacgcccacaagaagaaccuguacgaccacgcccugaugagcaucaucagcaccuuccaccugagcauccccaacuucaaccaguacgaggccaugagcugcgacuucaacggcggcaagaucagcgugcaguacaaccugagccacgccuacgccguggacgccgccaaccacugcggcaccaucgccaacggcgugcugcagaccuucaugagaauggccuggggcggcagcuacaucgcccuggacagcggcaagggcagcugggacugcaucaugaccagcuaccaguaccugaucauccagaacaccaccugggaggaccacugccaguucagcagacccagccccaucggcuaccugggccugcugagccagagaaccagagacaucuacaucagcagaagacugcugggcaccuucaccuggacccugagcgacagcgagggcaacgagacccccggcggcuacugccugaccagauggaugcugaucgaggccgagcugaagugcuucggcaacaccgccguggccaagugcaacgagaagcacgacgaggaguucugcgacaugcugagacuguucgacuucaacaagcaggccaucagaagacugaagaccgaggcccagaugagcauccagcugaucaacaaggccgugaacgcccugaucaacgaccagcugaucaugaagaaccaccugagagacaucaugggcauccccuacugcaacuacagcaaguacugcuaccugaaccacaccgugaccggcaagaccagccugcccagaugcugccuggugagcaacggcagcuaccugaacgagacccacuucagcgacgacaucgagcagcaggccgacaacaugaucaccgagcugcugcagaaggaguacauggacagacagggcaagaccccccugggccugguggaccuguucguguucagcaccagcuucuaccugaucagcaucuuccugcaccugaucaagauccccacccacagacacaucaccggcaagcccugccccaagccccacagacugaaccacaugggcaucugcagcugcggccuguacaagcaccccggcgugcccgugaaguggaagagaugaggacuaguuauaagacugacuagcccgaugggccucccaacgggcccuccuccccuccuugcaccgagauuaaucaaaggcucuuuucagagccaccaaaaaaaaaaaaaaaaaaaaaaaaaaaaaaaaaaaaaaaaaaaaaaaaaaaaaaaaaaaaaaaaagaauu

SEQ ID NO: 39598 - RNA, 1655 nt, Artificial Sequence
  mRNA product Design i-3 (hSL-A64-N5) comprising derived and/or modified sequence from LASV(ISTH2010-NIG-2012;Clade II)__AIT17482__GPCmut11 (opt4)
aggagaaagcuuaccaugggccagaucaucaccuucuuccaggaggugccccacgugaucgaggaggugaugaacaucgugcugaucgcccugagccugcuggccauccugaagggcaucuacaacguggccaccugcggccuguucggccuggugagcuuccugcugcugugcggcagaagcugcagcaccaccuacaagggcguguacgagcugcagacccuggagcuggacauggccagccugaacaugaccaugccccugagcugcaccaagaacaacagccaccacuacaucauggugggcaacgagaccggccuggagcugacccugaccaacaccagcaucaucaaccacaaguucugcaaccugagcgacgcccacaagaagaaccuguacgaccacgcccugaugagcaucaucagcaccuuccaccugagcauccccaacuucaaccaguacgaggccaugagcugcgacuucaacggcggcaagaucagcgugcaguacaaccugagccacgccuacgccguggacgccgccaaccacugcggcaccaucgccaacggcgugcugcagaccuucaugagaauggccuggggcggcagcuacaucgcccuggacagcggcaagggcagcugggacugcaucaugaccagcuaccaguaccugaucauccagaacaucaccugggaggaccacugccaguucagcagacccagccccaucggcuaccugggccugcugagccagagaaccagagacaucuacaucagcagaagacugcugggcaccuucaccuggacccugagcgacagcgagggcaacgagacccccggcggcuacugccugaccagauggaugcugaucgaggccgagcugaagugcuucggcaacaccgccguggccaagugcaacgagaagcacgacgaggaguucugcgacaugcugagacuguucgacuucaacaagcaggccaucagaagacugaagaccgaggcccagaugagcauccagcugaucaacaaggccgugaacgcccugaucaacgaccagcugaucaugaagaaccaccugagagacaucaugggcauccccuacugcaacuacagcaaguacugcuaccugaaccacaccgugaccggcaagaccagccugcccagaugcugccuggugagcaacggcagcuaccugaacgagacccacuucagcgacgacaucgagcagcaggccgacaacaugaucaccgagcugcugcagaaggaguacaucgacagacagggcaagaccccccugggccugguggaccuguucguguucagcaccagcuucuaccugaucagcaucuuccugcaccuggugaagauccccacccacagacacguggugggcaagcccugccccaagccccacagacugaaccacaugggcaucugcagcugcggccuguacaagcaccccggcgugcccgugaaguggaagagaugaggacuaguuauaagacugacuagcccgaugggccucccaacgggcccuccuccccuccuugcaccgagauuaaucaaaggcucuuuucagagccaccaaaaaaaaaaaaaaaaaaaaaaaaaaaaaaaaaaaaaaaaaaaaaaaaaaaaaaaaaaaaaaaaagaauu

SEQ ID NO: 39599 - RNA, 1655 nt, Artificial Sequence
  mRNA product Design i-3 (hSL-A64-N5) comprising derived and/or modified sequence from LASV(Lassa virus/H.sapiens-wt/NGA/2015/ISTH_0543;Clade II)__AVO03639__GPCmut11 (opt4)
aggagaaagcuuaccaugggccagaucaucaccuucuuccaggaggugccccacgugaucgaggaggugaugaacaucgugcugaucgcccugagccugcuggccauccugaagggcaucuacaacguggccaccugcggccuguucggccuggugagcuuccugcugcugugcggcagaagcugcagcaccaccuacaagggcguguacgagcugcagacccuggagcuggacauggccaaccugaacaugaccaugccccugagcugcaccaagaacaacagccaccacuacaucauggugggcaacgagaccggccuggagcugacccugaccaacaccagcaucaucaaccacaaguucugcaaccugagcgacgcccacaagaagaaccuguacgaccacgcccugaugagcaucaucagcaccuuccaccugagcauccccaacuucaaccaguacgaggccaugagcugcgacuucaacggcggcaagaucagcgugcaguacaaccugagccacaccuacgccguggacgccgccaaccacugcggcaccaucgccaacggcgugcugcagaccuucaugagaauggccuggggcggcagcuacaucgcccuggacagcggcaagggcagcugggacugcaucaugaccagcuaccaguaccuggugauccagaacaccaccugggaggaccacugccaguucagcagacccagccccaucggcuaccugggccugcugagccagagaaccagagacaucuacaucagcagaagacugcugggcaccuucaccuggacccugagcgacagcgagggcaacgagacccccggcggcuacugccugaccagauggaugcugaucgaggccgagcugaagugcuucggcaacaccgccguggccaagugcaacgagaagcacgacgaggaguucugcgacaugcugagacuguucgacuucaacaagcaggccaucagaagacugaagaccgaggcccagaugagcauccagcugaucaacaaggccgugaacgcccugaucaacgaccagcugaucaugaagaaccaccugagagacaucaugggcauccccuacugcaacuacagcaaguacugcuaccugaaccacaccgugaccggcaagaccagccugcccagaugcugccuggugagcaacggcagcuaccugaacgagacccacuucagcgacgacaucgagcagcaggccgacaacaugaucaccgagcugcugcagaaggaguacaucgacagacagggcaagaccccccugggccugguggaccuguucguguucagcaccagcuucuaccugaucagcaucuuccugcaccuggugaagauccccacccacagacacaucaccggcaagcccugccccaagccccacagacugaaccacaugggcaucugcagcugcggccuguacaagcaccccggcgugcccgugaaguggaagagaugaggacuaguuauaagacugacuagcccgaugggccucccaacgggcccuccuccccuccuugcaccgagauuaaucaaaggcucuuuucagagccaccaaaaaaaaaaaaaaaaaaaaaaaaaaaaaaaaaaaaaaaaaaaaaaaaaaaaaaaaaaaaaaaaagaauu

SEQ ID NO: 39600 - RNA, 1655 nt, Artificial Sequence
  mRNA product Design i-3 (hSL-A64-N5) comprising derived and/or modified sequence from LASV(Lassa virus/H.sapiens-wt/NGA/2016/ISTH_0009;Clade II)__AVO03571__GPCmut11 (opt4)
aggagaaagcuuaccaugggccagaucaucaccuucuuccaggaggugccccacgugaucgaggaggugaugaacaucgugcugaucgcccugagccugcuggccauccugaagggcaucuacaacguggccaccugcggccugcugggccuggugagcuuccugcugcugugcggcagaagcugcagcaccaccuacaagggcguguacgagcugcagacccuggagcuggacauggccagccugaacaugaccaugccccugagcugcaccaagaacaacagccaccacuacaucauggugggcaacgagaccggccuggagcugacccugaccaacaccagcaucaucaaccacaaguucugcaaccugagcgacgcccacaagaagaaccuguacgaccacgcccugaugagcaucaucagcaccuuccaccugagcauccccaacuucaaccaguacgaggccaugagcugcgacuucaacggcggcagaaucagcgugcaguacaaccugagccacagcuacgccguggacgccgccaaccacugcggcaccaucgccaacggcgugcugcagaccuucaugagaauggccuggggcggcagcuacaucgcccuggacagcggcaagggcagcugggacugcaucaugaccagcuaccaguaccugaucauccagaacaccaccugggaggaccacugccaguucagcagacccagccccaucggcuaccugggccugcugagccagagaaccagagacaucuacaucagcagaagacugcugggcaccuucaccuggacccugagcgacagcgagggcaacgagacccccggcggcuacugccugaccagauggaugcugaucgaggccgagcugaagugcuucggcaacaccgccguggccaagugcaacgagaagcacgacgaggaguucugcgacaugcugagacuguucgacuucaacaagcaggccaucagaagacugaagaccgaggcccagaugagcauccagcugaucaacaaggccgugaacgcccugaucaacgaccagcugaucaugaagaaccaccugagagacaucaugggcauccccuacugcaacuacagcaaguacugcuaccugaaccacaccgugaccggcaagaccagccugcccagaugcugccuggugagcaacggcagcuaccugaacgagacccacuucagcgacgacaucgagcagcaggccgacaacaugaucaccgagcugcugcagaaggaguacaucgacagacagggcaagaccccccugggccugguggaccuguucguguucagcaccagcuucuaccugaucagcaucuuccugcaccuggugaagauccccacccacagacacaucaccggcaagcccugccccaagccccacagacugaaccacaugggcaucugcagcugcggccuguacaaccaccccggcgugcccgugaaguggaagagaugaggacuaguuauaagacugacuagcccgaugggccucccaacgggcccuccuccccuccuugcaccgagauuaaucaaaggcucuuuucagagccaccaaaaaaaaaaaaaaaaaaaaaaaaaaaaaaaaaaaaaaaaaaaaaaaaaaaaaaaaaaaaaaaaagaauu

SEQ ID NO: 39601 - RNA, 1655 nt, Artificial Sequence
  mRNA product Design i-3 (hSL-A64-N5) comprising derived and/or modified sequence from LASV(Lassa virus/H.sapiens-wt/NGA/2016/ISTH_0017;Clade II)__AVO03567__GPCmut11 (opt4)
aggagaaagcuuaccaugggccagaucaucaccuucuuccaggaggugccccacgugaucgaggaggugaugaacaucgugcugaucgcccugagccugcuggccauccugaagggcaucuacaacguggccaccugcggccuguucggccuggugagcuuccugcugcugugcggcagaagcugcagcaccaccuacaagggcguguacgagcugcagacccuggagcuggacauggccagccugaacaugaccaugccccugagcugcaccaagaacaacagccaccacuacaucauggugggcaacgagaccggccuggagcugacccugaccaacaccagcaucaucaaccacaaguucugcaaccugagcgacgcccacaagaagaaccuguacgaccacgcccugaugagcaucaucagcaccuuccaccugagcauccccaacuucaaccaguacgaggccaugagcugcgacuucaacggcggcaagaucagcgugcaguacaaccugagccacaccuacgccaucgacgccgccaaccacugcggcaccaucgccaacggcgugcugcagaccuucaugagaauggccuggggcggcagcuacaucgcccuggacagcggcaagggcagcugggacugcaucaugaccagcuaccaguaccugaucauccagaacaccaccugggaggaccacugccaguucagcagacccagccccaucggcuaccugggccugcugagccagagaaccagagacaucuacaucagcagaagacugcugggcaccuucaccuggacccugagcgacagcgagggcaacgagacccccggcggcuacugccugaccagauggaugcugaucgaggccgagcugaagugcuucggcaacaccgccguggccaagugcaacgagaagcacgacgaggaguucugcgacaugcugagacuguucgacuucaacaagcaggccaucagaagacugaagaccgaggcccagaugagcauccagcugaucaacaaggccgugaacgcccugaucaacgaccagcugaucaugaagaaccaccugagagacaucaugggcauccccuacugcaacuacagcaaguacugcuaccugaaccacaccgugaccggcaagaccagccugcccagaugcugccuggugagcaacggcagcuaccugaacgagacccacuucagcgacgacaucgagcagcaggccgacaacaugaucaccgagcugcugcagaaggaguacauggacagacagggcaagaccccccugggccugguggaccuguucguguucagcaccagcuucuaccugaucagcaucuuccugcaccuggugagaauccccacccacagacacgugaucggcaagcccugccccaagccccacagacugaaccacaugggcaucugcagcugcggccuguacaagcaccccggcgugcccgugaaguggaagagaugaggacuaguuauaagacugacuagcccgaugggccucccaacgggcccuccuccccuccuugcaccgagauuaaucaaaggcucuuuucagagccaccaaaaaaaaaaaaaaaaaaaaaaaaaaaaaaaaaaaaaaaaaaaaaaaaaaaaaaaaaaaaaaaaagaauu

SEQ ID NO: 39602 - RNA, 1655 nt, Artificial Sequence
  mRNA product Design i-3 (hSL-A64-N5) comprising derived and/or modified sequence from LASV(Lassa virus/H.sapiens-wt/NGA/2018/ISTH_0959;Clade II)__AVV65099__GPCmut11 (opt4)
aggagaaagcuuaccaugggccagaucaucaccuucuuccaggaggugccccacgugaucgaggaggugaugaacaucgugcugaucgcccugagccugcuggccauccugaagggcaucuacaacguggugaccugcggccuguucggccuggugagcuuccugcugcugugcggcagaagcugcagcaccaccuacaagggcguguacgagcugcagacccuggagcuggacauggccagccugaacaugaccaugccccugagcugcaccaagaacaacagccaccacuacaucauggugggcaacgagaccggccuggagcugacccugaccaacaccagcaucaucaaccacaaguucugcaaccugagcgacgcccacaagaagaaccuguacgaccacgcccugaugagcaucaucagcaccuuccaccugagcauccccaacuucaaccaguacgaggccaugagcugcgacuucaacggcggcaagaucagcgugcaguacaaccugagccacgccuacgccaucgacgccgccaaccacugcggcaccaucgccaacggcgugcugcagaccuucaugagaauggccuggggcggcagcuacaucgcccuggacagcggcaagggcagcugggacugcaucaugaccagcuaccaguaccugaucauccagaacaccaccugggaggaccacugccaguucagcagacccagccccaucggcuaccugggccugcugagccagagaaccagagacaucuacaucagcagaagacugcugggcaccuucaccuggacccugagcgacagcgagggcaacgagacccccggcggcuacugccugaccagauggaugcugaucgaggccgagcugaagugcuucggcaacaccgccguggccaagugcaacgagaagcacgacgaggaguucugcgacaugcugagacuguucgacuucaacaagcaggccaucagaagacugaagaccgaggcccagaugagcauccagcugaucaacaaggccgugaacgcccugaucaacgaccagcugaucaugaagaaccaccugagagacaucaugggcauccccuacugcaacuacagcaaguacugcuaccugaaccacaccgugaccggcaagaccagccugcccagaugcugccuggugagcaacggcagcuaccugaacgagacccacuucagcgacgacaucgagcagcaggccgacaacaugaucaccgagcugcugcagaaggaguacaucgacagacagggcaagaccccccugggccugguggaccuguucguguucagcaccagcuucuaccugaucagcaucuuccugcaccuggugaagauccccacccacagacacgugaucggcaagcccugccccaagccccacagacugaaccacaugggcaucugcagcugcggccuguacaagcaccccggcgugcccgugaaguggaagagaugaggacuaguuauaagacugacuagcccgaugggccucccaacgggcccuccuccccuccuugcaccgagauuaaucaaaggcucuuuucagagccaccaaaaaaaaaaaaaaaaaaaaaaaaaaaaaaaaaaaaaaaaaaaaaaaaaaaaaaaaaaaaaaaaagaauu

SEQ ID NO: 39603 - RNA, 1655 nt, Artificial Sequence
  mRNA product Design i-3 (hSL-A64-N5) comprising derived and/or modified sequence from LASV(LASV003-NIG-2008;Clade II)__AIT17580__GPCmut11 (opt4)
aggagaaagcuuaccaugggccagaucaucaccuucuuccaggaggugccccacgugaucgaggaggugaugaacaucgugcugaucgcccugagccugcuggccauccugaagggcaucuacaacguggccaccugcggccuguucggccuggugagcuuccugcugcugugcggcagaagcugcagcaccaccuacaagggcguguacgagcugcagacccuggagcuggacauggccagccugaacaugaccaugccccugagcugcaccaagaacaacagccaccacuacaucauggugggcaacgagaccggccuggagcugacccugaccaacaccagcaucaucaaccacaaguucugcaaccugagcgacgcccacaagaagaaccuguacgaccacgcccugaugagcaucaucagcaccuuccaccugagcauccccaacuucaaccaguacgaggccaugagcugcgacuucaacggcggcaagaucagcgugcaguacaaccugagccacaccuacgccguggacgccgccaaccacugcggcaccaucgccaacggcgugcugcagaccuucaugagaauggccuggggcggcagcuacaucgcccuggacagcggcaagggcagcugggacugcaucaugaccagcuaccaguaccugaucauccagaacaccaccugggaggaccacugccaguucagcagacccagccccaucggcuaccugggccugcugagccagagaaccagagacaucuacaucagcagaagacugcugggcaccuucaccuggacccugagcgacagcgagagcaacgagacccccggcggcuacugccugaccagauggaugcugaucgaggccgagcugaagugcuucggcaacaccgccguggccaagugcaacgagaagcacgacgaggaguucugcgacaugcugagacuguucgacuucaacaagcaggccaucagaagacugaaggccgaggcccagaugagcauccagcugaucaacaaggccgugaacgcccugaucaacgaccagcugaucaugaagaaccaccugagagacaucaugggcauccccuacugcaacuacagcaaguacugcuaccugaaccacaccgugaccggcagaaccagccugcccagaugcugccuggugagcaacggcagcuaccugaacgagacccacuucagcgacgacaucgagcagcaggccgacaacaugaucaccgagcugcugcagaaggaguacauggacagacagggcaagaccccccugggccugguggaccuguucguguucagcaccagcuucuaccugaucagcaucuuccugcaccuggugaagauccccacccacagacacgugaucggcaagcccugccccaagccccacagacugaaccacaugggcaucugcagcugcggccuguacaagcaccccggcgugcccgugaaguggaagagaugaggacuaguuauaagacugacuagcccgaugggccucccaacgggcccuccuccccuccuugcaccgagauuaaucaaaggcucuuuucagagccaccaaaaaaaaaaaaaaaaaaaaaaaaaaaaaaaaaaaaaaaaaaaaaaaaaaaaaaaaaaaaaaaaagaauu

SEQ ID NO: 39604 - RNA, 1655 nt, Artificial Sequence
  mRNA product Design i-3 (hSL-A64-N5) comprising derived and/or modified sequence from LASV(LASV035-NIG-2009;Clade II)__AIT17588__GPCmut11 (opt4)
aggagaaagcuuaccaugggccagaucaucaccuucuuccaggaggugccccacgugaucgaggaggugaugaacaucgugcugaucgcccugagccugcuggccauccugaagggcaucuacaacguggccaccugcggccuguucggccuggugagcuuccugcugcugugcggcagaagcugcagcaccaccuacaagggcguguacgagcugcagacccuggagcuggacauggccagccugaacaugaccaugccccugagcugcaccaagaacaacagccaccacuacaucauggugggcaacgagaccggccuggagcugacccugaccaacaccagcaucaucaaccacaaguucugcaaccugagcgacgcccacaagaagaaccuguacgaccacgcccugaugagcaucaucagcaccuuccaccugagcauccccaacuucaaccaguacgaggccaugagcugcgacuucaacggcggcaagaucagcgugcaguacaaccugagccacgccuacgccguggacgccgccaaccacugcggcaccaucgccaacggcgugcugcagaccuucaugagaauggccuggggcggcagcuacaucgcccuggacagcggcaagggcagcugggacugcaucaugaccagcuaccaguaccugaucauccagaacaccaccugggaggaccacugccaguucagcagacccagccccaucggcuaccugggccugcugagccagagaaccagagacaucuacaucagcagaagacugcugggcaccuucaccuggacccugagcgacagcgagggcaacgagacccccggcggcuacugccugaccagauggaugcugaucgaggccgagcugaagugcuucggcaacaccgccguggccaagugcaacgagaagcacgacgaggaguucugcgacaugcugagacuguucgacuucaacaagcaggccaucagaagacugaaggccgaggcccagaugagcauccagcugaucaacaaggccgugaacgcccugaucaacgaccagcugaucaugaagaaccaccugagagacaucaugggcauccccuacugcaacuacagcaaguacugcuaccugaaccacaccgugaccggcaagaccagccugcccagaugcugccuggugagcaacggcagcuaccugaacgagacccacuucagcgacgacaucgagcagcaggccgacaacaugaucaccgagcugcugcagaaggaguacaucgacagacagggcaagaccccccugggccugguggaccuguucguguucagcaccagcuucuaccugaucagcaucuuccugcaccuggugaagauccccacccacagacacgugaucggcaagcccugccccaagccccacagacugaaccacaugggcaucugcagcugcggccuguacaagcaccccggcgugcccgugaaguggaagagaugaggacuaguuauaagacugacuagcccgaugggccucccaacgggcccuccuccccuccuugcaccgagauuaaucaaaggcucuuuucagagccaccaaaaaaaaaaaaaaaaaaaaaaaaaaaaaaaaaaaaaaaaaaaaaaaaaaaaaaaaaaaaaaaaagaauu

SEQ ID NO: 39605 - RNA, 1655 nt, Artificial Sequence
  mRNA product Design i-3 (hSL-A64-N5) comprising derived and/or modified sequence from LASV(LASV1000-NIG-2009;Clade II)__AIT17782__GPCmut11 (opt4)
aggagaaagcuuaccaugggccagaucaucaccuucuuccaggaggugccccacgugaucgaggaggugaugaacaucgugcugaucgcccugagccugcuggccauccugaagggcaucuacaacguggccaccugcggccuguucggccuggugagcuuccugcugcugugcggcagaagcugcagcaccaccuacaagggcguguacgagcugcagacccuggagcuggacauggccagccugaacaugaccaugccccugagcugcaccaagaacaacagccaccacuacaucauggugggcaacgagaccggccuggagcugacccugaccaacaccagcaucaucaaccacaaguucugcaaccugagcgacgcccacaagaagaaccuguacgaccacgcccugaugagcaucaucagcaccuuccaccugagcauccccaacuucaaccaguacgaggccaugagcugcgacuucaacggcggcaagaucagcgugcaguacaaccugagccacaccuacgccguggacgccgccaaccacugcggcaccaucgccaacggcgugcugcagaccuucaugagaauggccuggggcggcagcuacaucgcccuggacagcggcaagggcagcugggacugcaucaugaccagcuaccaguaccugaucauccagaacaccaccugggaggaccacugccaguucagcagacccagccccaucggcuaccugggccugcugagccagagaaccagagacaucuacaucagcagaagacugcugggcaccuucaccuggacccugagcgacagcgagggcaacgagacccccggcggcuacugccugaccagauggaugcugaucgaggccgagcugaagugcuucggcaacaccgccguggccaagugcaacgagaagcacgacgaggaguucugcgacaugcugagacuguucgacuucaacaagcaggccaucaagagacugaagaccgaggcccagaugagcauccagcugaucaacaaggccgugaacgcccugaucaacgaccagcugaucaugaagaaccaccugagagacaucaugggcauccccuacugcaacuacagcaaguacugcuaccugaaccacaccgugaccggcaagaccagccugcccagaugcugccuggugagcaacggcagcuaccugaacgagacccacuucagcgacgacaucgagcagcaggccgacaacaugaucaccgagcugcugcagaaggaguacaucgacagacagggcaagaccccccugggccugguggaccuguucguguucagcaccagcuucuaccugaucagcaucuuccugcaccuggugaagauccccacccacagacacguggugggcaagcccugccccaagccccacagacugaaccacaugggcaucugcagcugcggccuguacaagcaccccggcgugcccgugaaguggaagagaugaggacuaguuauaagacugacuagcccgaugggccucccaacgggcccuccuccccuccuugcaccgagauuaaucaaaggcucuuuucagagccaccaaaaaaaaaaaaaaaaaaaaaaaaaaaaaaaaaaaaaaaaaaaaaaaaaaaaaaaaaaaaaaaaagaauu

SEQ ID NO: 39606 - RNA, 1655 nt, Artificial Sequence
  mRNA product Design i-3 (hSL-A64-N5) comprising derived and/or modified sequence from LASV(LASV221-NIG-2010;Clade II)__AIT17624__GPCmut11 (opt4)
aggagaaagcuuaccaugggccagaucaucaccuucuuccaggaggugccccacgugaucgaggaggugaugaacaucgugcugaucgcccugagccugcuggccauccugaagggcaucuacaacguggccaccugcggccuguucggccuggugagcuuccugcugcugugcggcagaagcugcagcaccaccuacaagggcguguacgagcugcagacccuggagcuggacauggccagccugaacaugaccaugccccugagcugcaccaagaacaacagccaccacuacaucauggugggcaacgagaccggccuggagcugacccugaccaacaccagcaucaucaaccacaaguucugcaaccugagcgacgcccacaagaagaaccuguacgaccacgcccugaugagcaucaucagcaccuuccaccugagcauccccaacuucaaccaguacgaggccaugagcugcgacuucaacggcggcaagaucagcgugcaguacaaccugagccacaccuacgccaucgacgccgccaaccacugcggcaccaucgccaacggcgugcugcagaccuucaugagaauggccuggggcggcagcuacaucgcccuggacagcggcaagggcagcugggacugcaucaugaccagcuaccaguaccugaucauccagaacaccaccugggaggaccacugccaguucagcagacccagccccaucggcuaccugggccugcugagccagagaaccagagacaucuacaucagcagaagacugcugggcaccuucaccuggacccugagcgacagcgagggcaacgagacccccggcggcuacugccugaccagauggaugcugaucgaggccgagcugaagugcuucggcaacaccgccguggccaagugcaacgagaagcacgacgaggaguucugcgacaugcugagacuguucgacuucaacaagcaggccaucagaagacugaagaccgaggcccagaugagcauccagcugaucaacaaggccgugaacgcccugaucaacgaccagcugaucaugaagaaccaccugagagacaucaugggcauccccuacugcaacuacagcaaguacugcuaccugaaccacaccgugaccggcaagaccagccugcccagaugcugccuggugagcaacggcagcuaccugaacgagacccacuucagcgacgacaucgagcagcaggccgacaacaugaucaccgagaugcugcagaaggaguacauggacagacagggcaagaccccccugggccugguggaccuguucguguucagcaccagcuucuaccugaucagcaucuuccugcaccuggugaagauccccacccacagacacgugaucggcaagcccugccccaagccccacagacugaaccacaugggcaucugcagcugcggccuguacaagcaccccggcgugcccgugaaguggaagagaugaggacuaguuauaagacugacuagcccgaugggccucccaacgggcccuccuccccuccuugcaccgagauuaaucaaaggcucuuuucagagccaccaaaaaaaaaaaaaaaaaaaaaaaaaaaaaaaaaaaaaaaaaaaaaaaaaaaaaaaaaaaaaaaaagaauu

SEQ ID NO: 39607 - RNA, 1655 nt, Artificial Sequence
  mRNA product Design i-3 (hSL-A64-N5) comprising derived and/or modified sequence from LASV(LASV237-NIG-2010;Clade II)__AIT17638__GPCmut11 (opt4)
aggagaaagcuuaccaugggccagaucaucaccuucuuccaggaggugccccacgugaucgaggaggugaugaacaucgugcugaucgcccugagccugcuggccauccugaagggcaucuacaacguggccaccugcggccuguucggccuggugagcuuccugcugcugugcggcagaagcugcagcaccaccuacaagggcguguacgagcugcagacccuggagcuggacauggccagccugaacaugaccaugccccugagcugcaccaagaacaacagccaccacuacaucauggugggcaacgagaccggccuggagcugacccugaccaacaccagcaucaucaaccacaaguucugcaaccugagcgacgcccacaagaaggaccuguacgaccacgcccugaugagcaucaucagcaccuuccaccugagcauccccaacuucaaccaguacgaggccaugagcugcgacuucaacggcggcaagaucagcgugcaguacaaccugagccacaccuacgccguggacgccgccaaccacugcggcaccaucgccaacggcgugcugcagaccuucaugagaauggccuggggcggcagcuacaucgcccuggacagcggcaagggcagcugggacugcaucaugaccagcuaccaguaccugaucauccagaacaccaccugggaggaccacugccaguucagcagacccagccccaucggcuaccugggccugcugagccagagaaccagagacaucuacaucagcagaagacugcugggcaccuucaccuggacccugagcgacagcgagggcaacgagacccccggcggcuacugccugaccagauggaugcugaucgaggccgagcugaagugcuucggcaacaccgccguggccaagugcaacgagaagcacgacgaggaguucugcgacaugcugagacuguucgacuucaacaagcaggccaucagaagacugaagaccgaggcccagaugagcauccagcugaucaacaaggccgugaacgcccugaucaacgaccagcugaucaugaagaaccaccugagagacaucaugggcauccccuacugcaacuacagcaaguacugcuaccugaaccacaccgugaccggcaagaccagccugcccagaugcugccuggugagcaacggcagcuaccugaacgagacccacuucagcgacgacaucgagcagcaggccgacaacaugaucaccgagcugcugcagaaggaguacauggacagacagggcaagaccccccugggccugguggaccuguucguguucagcaccagcuucuaccugaucagcaucuuccugcaccugaucaagauccccacccacagacacaucaccggcaagcccugccccaagccccacagacugaaccacaugggcaucugcagcugcggccuguacaagcaccccggcgugcccgugaaguggaagagaugaggacuaguuauaagacugacuagcccgaugggccucccaacgggcccuccuccccuccuugcaccgagauuaaucaaaggcucuuuucagagccaccaaaaaaaaaaaaaaaaaaaaaaaaaaaaaaaaaaaaaaaaaaaaaaaaaaaaaaaaaaaaaaaaagaauu

SEQ ID NO: 39608 - RNA, 1655 nt, Artificial Sequence
  mRNA product Design i-3 (hSL-A64-N5) comprising derived and/or modified sequence from LASV(LASV253-NIG-2011;Clade II)__AIT17670__GPCmut11 (opt4)
aggagaaagcuuaccaugggccagaucaucaccuucuuccaggaggugccccacgugaucgaggaggugaugaacaucgugcugaucgcccugagccugcuggccauccugaagggcaucuacaacguggccaccugcggccuguucggccuggugagcuuccugcugcugugcggcagaagcugcagcaccaccuacaagggcguguacgagcugcagacccuggagcuggacauggccagccugaacaugaccaugccccugagcugcaccaagaacaacagccaccacuacaucauggugggcaacgagaccggccuggagcugacccugaccaacaccagcaucaucaaccacaaguucugcaaccugagcgacgcccacaagaagaaccuguacgaccacgcccugaugagcaucaucagcaccuuccaccugagcauccccaacuucaaccaguacgaggccaugagcugcgacuucaacggcggcaagaucagcgugcaguacaaccugagccacaccuacgccguggacgccgccaaccacugcggcaccaucgccaacggcgugcugcagaccuucaugagaauggccuggggcggcagcuacaucgcccuggacagcggcaagggcagcugggacugcaucaugaccagcuaccaguaccugaucauccagaacaccaccugggaggaccacugccaguucagcagacccagccccaucggcuaccugggccugcugagccagagaaccagagacaucuacaucagcagaagacugcugggcaccuucaccuggacccugagcgacagcgagggcaacgagacccccggcggcuacugccugaccagauggaugcugaucgaggccgagcugaagugcuucggcaacaccgccguggccaagugcaacgagaagcacgacgaggaguucugcgacaugcugagacuguucgacuucaacaagcaggccaucagaagacugaaggccgaggcccagaugagcauccagcugaucaacaaggccgugaacgcccugaucaacgaccagcugaucaugaagaaccaccugagagacaucaugggcauccccuacugcaacuacagcaaguacugcuaccugaaccacaccgugaccggcagaaccagccugcccagaugcugccuggugagcaacggcagcuaccugaacgagacccacuucagcgacgacaucgagcagcaggccgacaacaugaucaccgagcugcugcagaaggaguacaucgacagacagggcaagaccccccugggccugguggaccuguucguguucagcaccagcuucuaccugaucagcaucuuccugcaccuggugaagauccccacccacagacacaucaucggcaagcccugccccaagccccacagacugaaccacaugggcaucugcagcugcggccuguacaagcaccccggcgugcccgugaaguggaagagaugaggacuaguuauaagacugacuagcccgaugggccucccaacgggcccuccuccccuccuugcaccgagauuaaucaaaggcucuuuucagagccaccaaaaaaaaaaaaaaaaaaaaaaaaaaaaaaaaaaaaaaaaaaaaaaaaaaaaaaaaaaaaaaaaagaauu

SEQ ID NO: 39609 - RNA, 1655 nt, Artificial Sequence
  mRNA product Design i-3 (hSL-A64-N5) comprising derived and/or modified sequence from LASV(LASV254-NIG-2011;Clade II)__AIT17674__GPCmut11 (opt4)
aggagaaagcuuaccaugggccagaucaucaccuucuuccaggaggugccccacgugaucgaggaggugaugaacaucgugcugaucgcccugagccugcuggccauccugaagggcaucuacaacguggccaccugcggccuguucggccuggugagcuuccugcugcugugcggcagaagcugcagcaccaccuacaagggcguguacgagcugcagacccuggagcuggacaugaccaaccugaacaugaccaugccccugagcugcaccaagaacaacagccaccacuacaucauggugggcaacgagaccggccuggagcugacccugaccaacaccagcaucaucaaccacaaguucugcaaccugagcgacgcccacaagaagaaccuguacaaccacgcccugaugagcaucaucagcaccuuccaccugagcauccccaacuucaaccaguacgaggccaugagcugcgacuucaacggcggcaagaucagcgugcaguacaaccugagccacagcuacgccguggacgccgccaaccacugcggcaccaucgccaacggcgugcugcagaccuucaugagaauggccuggggcggcagcuacaucgcccuggacagcggcaagggcaacugggacugcaucaugaccagcuaccaguaccugaucauccagaacaccaccugggaggaccacugccaguucagcagacccagccccaucggcuaccugggccugcugagccagagaaccagagacaucuacaucagcagaagacugcugggcaccuucaccuggacccugagcgacagcgagggcaacgagacccccggcggcuacugccugaccagauggaugcugaucgaggccgagcugaagugcuucggcaacaccgccguggccaagugcaacgagaagcacgacgaggaguucugcgacaugcugagacuguucgacuucaacaagcaggccaucagaagacugaagaccgaggcccaggccaacauccagcugaucaacaaggccgugaacgcccugaucaacgaccagcugaucaugaagaaccaccugagagacaucaugggcauccccuacugcaacuacagcaaguacugcuaccugaaccacaccgugaccggcaagaccagccugcccagaugcugccuggugagcaacggcagcuaccugaacgagacccacuucagcgacgacaucgagcagcaggccgacaacaugaucaccgagcugcugcagaaggaguacauggacagacagggcaagaccccccugggccugguggaccuguucguguucagcaccagcuucuaccugaucagcaucuuccugcaccuggugaagauccccacccacagacacgugaucggcaagcccugccccaagccccacagacugaaccacaugggcaucugcagcugcggccuguacaagcaccccggcgugcccgugaaguggaagagaugaggacuaguuauaagacugacuagcccgaugggccucccaacgggcccuccuccccuccuugcaccgagauuaaucaaaggcucuuuucagagccaccaaaaaaaaaaaaaaaaaaaaaaaaaaaaaaaaaaaaaaaaaaaaaaaaaaaaaaaaaaaaaaaaagaauu

SEQ ID NO: 39610 - RNA, 1655 nt, Artificial Sequence
  mRNA product Design i-3 (hSL-A64-N5) comprising derived and/or modified sequence from LASV(Nig08-A19;Clade III)__ADU56618__GPCmut11 (opt4)
aggagaaagcuuaccaugggccagaucgugaccuucuuccaggaggugccccacgugaucgaggaggugaugaacaucgugcugaucgcccugagcauccuggccauccugaagggccuguacaacaucgccaccugcggccugaucggccuggugaccuuccugcugcugagcggcagaagcugcagcaugaccuacaagggcguguacgagcugcagacccuggagcugaacaugaacacccugaacaugaccaugccccugagcugcaccaagaacaacagccaccacuacaucauggugggcaacgagaccggccuggagcugacccugaccaacaccagccugcugcaccacaaguucugcaaccugagcgacgcccacaagaagaaccuguacgaccacacccugaugagcaucaucagcaccuuccaccugagcauccccaacuucaaccaguacgaggccaugagcugcgacuucaacggcggcaagaucaccgugcaguacaaccugagccacagcuacgccaucgacgccgccaaccacugcggcaccguggccaacggcgugcugcagaccuucaugagaauggccuggggcggcagcuacaucgcccuggacagcggcagaggcaagugggacugcaucaugaccagcuaccaguaccugaucauccagaacaccaccugggaggaccacugccaguucagcagacccagccccaucggcuaccugggccugcugagccagagaaccagagacaucuacaucagcagaagacugcugggcaccuucaccuggacccugagcgacagcgagggcaacgagacccccggcggcuacugccugaccagauggaugcugaucgaggccgagcugaagugcuucggcaacaccgccguggccaagugcaacgagaagcacgacgaggaguucugcgacaugcugagacuguucgacuucaacaagcaggccaucagaagacugaaggccgaggcccagaugagcauccagcugaucaacaaggccgugaacgcccugaucaacgaccagcugaucaugaagaaccaccugagagacaucaugggcauccccuacugcaacuacagcaaguacugcuaccugaaccacaccagcaccggcagaaccagccugcccagaugcugccuggugagcaacggcagcuaccugaacgagacccacuucagcgacgacaucgagcagcaggccgacaacaugaucaccgagaugcugcagaaggaguaccuggacagacagggcaagaccccccugggccugguggaccuguucguguucagcaccagcuucuaccugaucagcaucuuccugcaccuggugaagauccccacccacagacacaucgugggcaagcccugccccaagccccacagacugaaccacaugggcaucugcagcugcggccuguacaagcagcccggcgugcccgugagauggaagagaugaggacuaguuauaagacugacuagcccgaugggccucccaacgggcccuccuccccuccuugcaccgagauuaaucaaaggcucuuuucagagccaccaaaaaaaaaaaaaaaaaaaaaaaaaaaaaaaaaaaaaaaaaaaaaaaaaaaaaaaaaaaaaaaaagaauu

SEQ ID NO: 39611 - RNA, 1658 nt, Artificial Sequence
  mRNA product Design i-3 (hSL-A64-N5) comprising derived and/or modified sequence from LASV(G1180-SLE-2010;Clade IV)__AIT17168__GPCmut11 (opt4)
aggagaaagcuuaccaugggccagaucgugaccuucuuccaggaggugccccacgugaucgaggaggugaugaacaucgugcugaucgcccugagcauccuggccgugcugaagggccuguacaacuucgccaccugcggccuggugggccugcugaccuuccugcugcugugcggcagaagcugcaccgccagcagauacaagggcguguacgagcugcagacccuggagcugaacauggagacccugaacaugaccaugccccugagcugcaccaagaacaacagccaccacuacaucauggugggcaacgagaccggccuggagcugacccugaccaacaccagcaucaucaaccacaaguucugcaaccugagcgacgcccacaagaagaaccuguacgaccacgcccugaugagcaucaucagcaccuuccaccugagcauccccaacuucaaccaguacgaggccaugagcugcgacuucaacggcggcaagaucagcgugcaguacaaccugagccacagcuacgccggcgacgccgccaaccacugcggcaccguggccaacggcgugcugcagaccuucaugagaauggccuggggcggcagcuacaucgcccuggacagcggccacggcagcugggacugcaucaugaccagcuaccaguaccugaucauccagaacaccaccugggaggaccacugccaguucagcagacccagccccaucggcuaccugggccugcugagccagagaaccagagacaucuacaucagcagaagacugcugggcaccuucaccuggacccugagcgacagcgagggcaaggacacccccggcggcuacugccugaccagauggaugcugaucgaggccgagcugaagugcuucggcaacaccgccguggccaagugcaacgagaagcacgacgaggaguucugcgacaugcugagacuguucgacuucaacaagcaggccauccagagacugaaggccgaggcccagaugagcauccagcugaucaacaaggccgugaacgcccugaucaacgaccagcugaucaugaagaaccaccugagagacaucaugggcauccccuacugcaacuacagcaaguacugcuaccugaaccacaccaccaccggcaagaccagccugcccaagugcugccuggugagcaacggcagcuaccugaacgagacccacuucagcgacgacaucgagcagcaggccgacaacaugaucaccgagaugcugcagaaggaguacauggagagacagggcaagaccccccugggccugguggaccuguucguguucagcaccagcuucuaccugaucagcaucuuccugcaccuggugaagauccccacccacagacacaucgugggcaagagcugccccaagccccacagacugaaccacaugggcaucugcagcugcggccuguacaagcagcccggcgugcccgugaaguggaagagaugaggacuaguuauaagacugacuagcccgaugggccucccaacgggcccuccuccccuccuugcaccgagauuaaucaaaggcucuuuucagagccaccaaaaaaaaaaaaaaaaaaaaaaaaaaaaaaaaaaaaaaaaaaaaaaaaaaaaaaaaaaaaaaaaagaauu

SEQ ID NO: 39612 - RNA, 1658 nt, Artificial Sequence
  mRNA product Design i-3 (hSL-A64-N5) comprising derived and/or modified sequence from LASV(G1442-SLE-2011;Clade IV)__AIT17180__GPCmut11 (opt4)
aggagaaagcuuaccaugggccagaucgugaccuucuuccaggaggugccccacgugaucgaggaggugaugaacaucgugcugaucgcccugagcauccuggccgugcugaagggccuguacaacguggccaccugcggccugaucggccuggugaccuuccugcugcugugcggcagaagcugcaccaccacccuguacaagggcguguacgagcugcagacccuggagcugaacauggagacccugaacaugaccaugccccugagcugcaccaagaacaacagccaccacuacaucagagugggcaacgagaccggccuggagcugacccugaccaacaccagcaucaucaaccacaaguucugcaaccugagcgacgcccacaagaagaaccuguacgaccacgcccugaugagcaucaucagcaccuuccaccugagcauccccaacuucaaccaguacgaggccaugagcugcgacuucaacggcggcaagaucagcgugcaguacaaccugagccacagcuacgccggcgacgccgccaaccacugcggcaccguggccaacggcgugcugcagaccuucaugagaauggccuggggcggcagcuacaucgcccuggacagcggcagaggcaacugggacugcaucaugaccagcuaccaguaccugaucauccagaacaccaccugggacgaccacugccaguucagcagacccagccccaucggcuaccugggccugcugagccagagaaccagagacguguacaucagcagaagacugcugggcaccuucaccuggacccugagcgacagcgagggcaaggacacccccggcggcuacugccugaccagauggaugcugaucgaggccgagcugaagugcuucggcaacaccgccguggccaagugcaacgagaagcacgacgaggaguucugcgacaugcugagacuguucgacuucaacaagcaggccauccagagacugaaggccgaggcccagaugagcauccagcugaucaacaaggccgugaacgcccugaucaacgaccagcugaucaugaagaaccaccugagagacaucaugggcauccccuacugcaacuacagcaaguacugcuaccugaacaacaccgccaccggcaagaccagccugcccaagugcugccugaucagcaacggcagcuaccugaacgagacccacuucagcgacgacaucgagcaggaggccgacaacaugaucaccgagaugcugcagaaggaguacauggagagacagggcaagaccccccugggccugguggaccuguucguguucagcaccagcuucuaccugaucagcaucuuccugcaccuggugaagauccccacccacagacacaucgugggcaagagcugccccaagccccacagacugaaccacaugggcaucugcagcugcggccuguacaagcagcccggcgugcccgugagauggaagagaugaggacuaguuauaagacugacuagcccgaugggccucccaacgggcccuccuccccuccuugcaccgagauuaaucaaaggcucuuuucagagccaccaaaaaaaaaaaaaaaaaaaaaaaaaaaaaaaaaaaaaaaaaaaaaaaaaaaaaaaaaaaaaaaaagaauu

SEQ ID NO: 39613 - RNA, 1658 nt, Artificial Sequence
  mRNA product Design i-3 (hSL-A64-N5) comprising derived and/or modified sequence from LASV(G3010-SLE-2013;Clade IV)__AIT17344__GPCmut11 (opt4)
aggagaaagcuuaccaugggccagaucgugaccuucuuccaggaggugccccacgugaucgaggaggugaugaacaucgugcugaucgcccugagcauccuggccgugcugaagggccuguacaacuucgccaccugcggccuggugggccuggugaccuuccugcugcugugcggcagaagcugcaccaccagccuguacaagggcguguacgagcugcagacccuggagcugaacauggagacccugaacaugaccaugccccugagcugcaccaagaacaacagccaccacuacaucauggugggcaacgagaccggccuggagcugacccugaccaacaccagcaucaucaaccacaaguucugcaaccugagcgacgcccacaagaagaaccuguacaaccacgcccugaugagcaucaucagcaccuuccaccugagcauccccaacuucaaccaguacgaggccaugagcugcgacuucaacggcggcaagaucagcgugcaguacaaccugagccacagcuacgccggcgacgccgccagccacugcggcaccguggccaacggcgugcugcagaccuucaugagaauggccuggggcggcagcuacaucgcccuggacagcggcuacggcaagugggacugcaucaugaccagcuaccaguaccugaucauccagaacaccaccugggaggaccacugccaguucagcagacccagccccaucggcuaccugggccugcugagccagagaaccagagacaucuacaucagcagaagacugcugggcaccuucaccuggacccugagcgacagcgagggcaaggacacccccggcggcuacugccugaccagauggaugcugaucgaggccgagcugaagugcuucggcaacaccgccguggccaagugcaacgagaagcacgacgaggaguucugcgacaugcugagacuguucgacuucaacaagcaggccauccagagacugaagaccgaggcccagaugagcauccagcugaucaacaaggccgugaacgcccugaucaacgaccagcugaucaugaagaaccaccugagagacaucaugggcauccccuacugcaacuacagcaaguacugcuaccugaaccacaccaccaccggcaagaccagccugcccaagugcugccuggugagcaacggcagcuaccugaacgagacccacuucagcgacgacaucgagcagcaggccgacaacaugaucaccgagaugcugcagaaggaguacauggagagacagggcaagaccccccugggccugguggaccuguucguguucagcaccagcuucuaccugaucagcaucuuccugcaccuggugaagauccccacccacagacacaucgugggcaagagcugccccaagccccacagacugaaccacaugggcaucugcagcugcggccuguacaagcagcccggcgugcccgugagauggaagagaugaggacuaguuauaagacugacuagcccgaugggccucccaacgggcccuccuccccuccuugcaccgagauuaaucaaaggcucuuuucagagccaccaaaaaaaaaaaaaaaaaaaaaaaaaaaaaaaaaaaaaaaaaaaaaaaaaaaaaaaaaaaaaaaaagaauu

SEQ ID NO: 39614 - RNA, 1658 nt, Artificial Sequence
  mRNA product Design i-3 (hSL-A64-N5) comprising derived and/or modified sequence from LASV(G502-SLE-2009;Clade IV)__AIT17126__GPCmut11 (opt4)
aggagaaagcuuaccaugggccagaucgugaccuucuuccaggaggugccccacgugaucgaggaggugaugaacaucgugcugaucgcccugagcauccuggccgugcugaagggccuguacaacuucgccaccugcggccuggugggccugcugaccuuccugcugcugugcggcagaagcugcaccaccggccuguacaagggcguguacgagcugcagacccuggagcugaacauggagacccugaacaugaccaugccccugagcugcaccaagaacaacagccaccacuacaucauggugggcaacgagaccggccuggagcugacccugaccaacaccagcaucaucaaccacaaguucugcaaccugagcgacgcccacaagaagaaccuguacgaccacgcccugaugagcaucaucagcaccuuccaccugagcauccccaacuucaaccaguacgaggccaugagcugcgacuucaacggcggcaagaucagcgugcaguacaaccugagccacagcuacgccggcgacgccgccgaccacugcggcaccguggccaacggcgugcugcagaccuucaugagaauggccuggggcggcagcuacaucgcccuggacagcggcagaggcagaugggacugcaucaugaccagcuaccaguaccugaucauccagaacaccaccugggaggaccacugccaguucagcagacccagccccaucggcuaccugggccugcugagccagagaaccagagacaucuacaucagcagaagacugcugggcaccuucaccuggacccugagcgacagcgagggcaaggacacccccggcggcuacugccugaccagauggaugcugaucgaggccgagcugaagugcuucggcaacaccgccguggccaagugcaacgagaagcacgacgaggaguucugcgacaugcugagacuguucgacuucaacaagcaggccauccagagacugaaggccgaggcccagaugagcauccagcugaucaacaaggccgugaacgcccugaucaacgaccagcuggugaugaagaaccaccugagagacaucaugggcauccccuacugcaacuacagcagauacugcuaccugaaccacaccaccaccggcagaaccagccugcccaagugcugccuggugagcaacggcagcuaccugaacgagacccacuucagcgacgacaucgagcagcaggccgacaacaugaucaccgagaugcugcagaaggaguacauggagagacagggcaagaccccccugggccugguggaccuguucguguucagcaccagcuucuaccugaucagcaucuuccugcaccuggugaagauccccacccacagacacaucgugggcaagagcugccccaagccccacagacugaaccacaugggcaucugcagcugcggccuguacaagcagcccggcgugcccgugaaguggaagagaugaggacuaguuauaagacugacuagcccgaugggccucccaacgggcccuccuccccuccuugcaccgagauuaaucaaaggcucuuuucagagccaccaaaaaaaaaaaaaaaaaaaaaaaaaaaaaaaaaaaaaaaaaaaaaaaaaaaaaaaaaaaaaaaaagaauu

SEQ ID NO: 39615 - RNA, 1658 nt, Artificial Sequence
  mRNA product Design i-3 (hSL-A64-N5) comprising derived and/or modified sequence from LASV(G733-SLE-2010;Clade IV)__AIT17154__GPCmut11 (opt4)
aggagaaagcuuaccaugggccagaucgugaccuucuuccaggaggugccccacgugaucgaggaggugaugaacaucgugcugaucgcccugagcauccuggccgugcugaagggccuguacaacuucgccaccugcggcaucgugggccuggugagcuuccugcugcugugcggcagaagcugcaccaccagccuguacaagggcguguacgagcugcagacccuggagcugaacauggagacccugaacaugaccaugccccugagcugcaccaagaacaacagccaccacuacaucauggugggcaacgagaccggccuggagcugacccugaccaacaccagcaucaucaaccacaaguucugcaaccugagcgacgcccacaagaagaaccuguacgaccacgcccugaugagcaucaucagcaccuuccaccugagcauccccaacuucaaccaguacgaggccaugagcugcgacuucaacggcggcaagaucagcgugcaguacaaccugagccacagcuacgccggcgacgccgccaaccacugcggcaccaucgccaacggcgugcugcagaccuucaugagaauggccuggggcggcagcuacaucgcccuggacagcggcagagacagaugggacugcaucaugaccagcuaccaguaccugaucauccagaacaccaccugggaggaccacugccaguucagcagacccagccccaucggcuaccugggccugcugagccagagaaccagagacaucuacaucagcagaagacugcugggcaccuucaccuggacccugagcgacagcgagggcaaggacacccccggcggcuacugccugaccagauggaugcugaucgaggccgagcugaagugcuucggcaacaccgccguggccaagugcaacgagaagcacgacgaggaguucugcgacaugcugagacuguucgacuucaacaagcaggccauccagagacugaaggccgaggcccagaugagcauccagcugaucaacaaggccgugaacgcccugaucaacgaccagcugaucaugaagaaccaccugagagacaucaugggcauccccuacugcaacuacagcaaguacugcuaccugaaccacaccaccaccggcaagaccagccugcccaagugcugccuggugagcaacggcagcuaccugaacgagacccacuucagcgacgacaucgagcagcaggccgacaacaugaucaccgagaugcugcagaaggaguacauggagagacagggcaagaccccccugggccugguggaccuguucguguucagcaccagcuucuaccugaucagcaucuuccugcaccuggugaagauccccacccacagacacguggugggcaagagcugccccaagccccacagacugaaccacaugggcaucugcagcugcggccuguacggccagcccggcgugcccgugaaguggaagagaugaggacuaguuauaagacugacuagcccgaugggccucccaacgggcccuccuccccuccuugcaccgagauuaaucaaaggcucuuuucagagccaccaaaaaaaaaaaaaaaaaaaaaaaaaaaaaaaaaaaaaaaaaaaaaaaaaaaaaaaaaaaaaaaaagaauu

SEQ ID NO: 39616 - RNA, 1658 nt, Artificial Sequence
  mRNA product Design i-3 (hSL-A64-N5) comprising derived and/or modified sequence from MOPV/LASV reassortant(IGS-1;Clade IV)__AFY05576__GPCmut11 (opt4)
aggagaaagcuuaccaugggccagaucgugaccuucuuccaggaggugccccacgugaucgaggaggugaugaacaucgugcugaucgcccugagcgugcuggccgugcugaagggccuguacaacuucgccaccugcggccuggugggccuggugaccuuccugcugcugugcggcagaagcugcaccaccagccuguacaagggcguguacgagcugcagacccuggagcugaacauggagacccugaacaugaccaugccccugagcugcaccaagaacaacagccaccacuacaucauggugggcaacgagaccggccuggagcugacccugaccaacaccagcaucaucaaccacaaguucugcaaccugagcgacgcccacaagaagaaccuguacgaccacgcccugaugagcaucaucagcaccuuccaccugagcauccccaacuucaaccaguacgaggccaugagcugcgacuucaacggcggcaagaucagcgugcaguacaaccugagccacagcuacgccggcgacgccgccaaccacugcggcaccguggccaacggcgugcugcagaccuucaugagaauggccuggggcggcagcuacaucgcccuggacagcggcagaggcaacugggacugcaucaugaccagcuaccaguaccugaucauccagaacaccaccugggaggaccacugccaguucagcagacccagccccaucggcuaccugggccugcugagccagagaaccagagacaucuacaucagcagaagacugcugggcaccuucaccuggacccugagcgacagcgagggcgaggacacccccggcggcuacugccugaccagauggaugcugaucgaggccgagcugaagugcuucggcaacaccgccguggccaagugcaacgagaagcacgacgaggaguucugcgacaugcugagacuguucgacuucaacaagcaggccauccagagacugaaggccgaggcccagaugagcauccagcugaucaacaaggccgugaacgcccugaucaacgaccagcugaucaugaagaaccaccugagagacaucaugggcauccccuacugcaacuacagcaaguacugcuaccugaaccacaccaccaccggcagaaccagccugcccaagugcugccuggugagcaacggcagcuaccugaacgagacccacuucagcgacgacaucgagcagcaggccgacaacaugaucaccgagaugcugcagaaggaguacauggagagacagggcaagaccccccugggccugguggaccuguucguguucagcaccagcuucuaccugaucagcaucuuccugcaccuggugaagauccccacccacagacacaucgugggcaagagcugccccaagccccacagacugaaccacaugggcaucugcagcugcggccuguacaagcagcccggcgugcccgugaaguggaagagaugaggacuaguuauaagacugacuagcccgaugggccucccaacgggcccuccuccccuccuugcaccgagauuaaucaaaggcucuuuucagagccaccaaaaaaaaaaaaaaaaaaaaaaaaaaaaaaaaaaaaaaaaaaaaaaaaaaaaaaaaaaaaaaaaagaauu

SEQ ID NO: 39617 - RNA, 1658 nt, Artificial Sequence
  mRNA product Design i-3 (hSL-A64-N5) comprising derived and/or modified sequence from LASV(LM765-SLE-2012;Clade IV)__AIT17814__GPCmut11 (opt4)
aggagaaagcuuaccaugggccagaucgugaccuucuuccaggaggugccccacgugaucgaggaggugaugaacaucgugcugaucgcccugagcauccuggccgugcugaagggccuguacaacuucgccaccugcggccuggugggccuggugaccuuccugcugcugugcggcagaagcugcaccaccagccuguacaagggcguguacgagcugcagacccuggagcugaacauggagacccugaacaugaccaugccccugagcugcaccaagaacaacagccaccacuacaucauggugggcaacgagaccggccuggagcugacccugaccaacaccagcaucaucgaccacaaguucugcaaccugagcgacgcccacagaaagaaccuguacgaccacgcccugaugagcaucaucagcaccuuccaccugagcauccccaacuucaaccaguacgaggccaugagcugcgacuucaacggcggcaagaucagcgugcaguacaaccugagccacagcuacgccaaggacgccgccgaccacugcggcaccguggccaacggcgugcugcagaccuucaugagaauggccuggggcggcagcuacaucgcccuggacagcggcagaggcagaugggacugcaucaugaccagcuaccaguaccugaucauccagaacaccaccugggaggaccacugccaguucagcagacccagccccaucggcuaccugggccugcugagccagagaaccagagacaucuacaucagcagaagacugcugggcaccuucaccuggacccugagcgacagcgagggcaaggacacccccggcggcuacugccugaccagauggaugcugaucgaggccgagcugaagugcuucggcaacaccgccguggccaagugcaacgagaagcacgacgaggaguucugcgacaugcugagacuguucgacuucaacaagcaggccauccagagacugaaggccgaggcccagaugagcauccagcugaucaacaaggccgugaacgcccugaucaacgaccagcugaucaugaagaaccaccugagagacaucaugggcauccccuacugcaacuacagcaaguacugcuaccugaaccacaccaccaccggcaagaccagccugcccaagugcugccuggugagcaacggcagcuaccugaacgagacccacuucagcgacgacaucgagcagcaggccgacaacaugaucaccgagaugcugcagaaggaguacauggagagacagggcaagaccccccugggccugguggaccuguucguguucagcaccagcuucuaccugaucagcaucuuccugcaccuggugaagauccccacccacagacacaucgugggcaagcccugccccaagccccacagacugaaccacaugggcaucugcagcugcggccuguacaagcagcccggcgugcccgugaaguggaagagaugaggacuaguuauaagacugacuagcccgaugggccucccaacgggcccuccuccccuccuugcaccgagauuaaucaaaggcucuuuucagagccaccaaaaaaaaaaaaaaaaaaaaaaaaaaaaaaaaaaaaaaaaaaaaaaaaaaaaaaaaaaaaaaaaagaauu

SEQ ID NO: 39618 - RNA, 1658 nt, Artificial Sequence
  mRNA product Design i-3 (hSL-A64-N5) comprising derived and/or modified sequence from LASV(LM776-SLE-2012;Clade IV)__AIT17824__GPCmut11 (opt4)
aggagaaagcuuaccaugggccagaucgugaccuucuuccaggaggugccccacgugaucgaggaggugaugaacaucgugcugaucgcccugagcauccuggccgugcugaagggccuguacaacuucgccaccugcggccuggugggccuggugaccuuccugcugcugugcggcagaagcugcaccaccagcguguacaagggcguguacgagcugcagacccuggagcugaacauggagacccugaacaugaccaugccccugagcugcaccaagaacaacagccaccacuacaucauggugggcaacgagaccggccuggagcugacccugaccaacaccagcaucaucaaccacaaguucugcaaccugagcgacgcccacaagaagaaccuguacgaccacgcccugaugagcaucaucagcaccuuccaccugagcauccccaacuucaaccaguacgaggccaugagcugcgacuucaacggcggcaagaucagcgugcaguacaaccugagccacagcuacgccggcgacgccgccaaccacugcggcaccguggccaacggcgugcugcagaccuucaugagaauggccuggggcggcagcuacaucgcccuggacagcggccacggcaagugggacugcaucaugaccagcuaccaguaccugaucauccagaacaccaccugggaggaccacugccaguucagcagacccagccccaucggcuaccugggccugcugagccagagaaccagagacaucuacaucagcagaagacugcugggcaccuucaccuggacccugagcgacagcgagggcaaggacacccccggcggcuacugccugaccagauggaugcugaucgaggccgagcugaagugcuucggcaacaccgccguggccaagugcaacgagaagcacgacgaggaguucugcgacaugcugagacuguucgacuucaacaagcaggccauccagagacugaaggccgaggcccagaugagcauccagcugaucaacaaggccgugaacgcccugaucaacgaccagcugaucaugaagaaccaccugagagacaucaugggcauccccuacugcaacuacagcaaguacugcuaccugaaccacaccaccaccggcaagaccagccugcccaagugcugccuggugagcaacggcagcuaccugaacgagacccacuucagcgacgacaucgagcagcaggccgacaacaugaucaccgagaugcugcagaaggaguacauggagagacagggcaagaccccccugggccugguggaccuguucguguucagcaccagcuucuaccugaucagcaucuuccugcaccuggugaagauccccacccacagacacaucgugggcaagagcugccccaagccccacagacugaaccacaugggcaucugcagcugcggccuguacaagcagcccggcgugcccgugagauggaagagaugaggacuaguuauaagacugacuagcccgaugggccucccaacgggcccuccuccccuccuugcaccgagauuaaucaaaggcucuuuucagagccaccaaaaaaaaaaaaaaaaaaaaaaaaaaaaaaaaaaaaaaaaaaaaaaaaaaaaaaaaaaaaaaaaagaauu

SEQ ID NO: 39619 - RNA, 1658 nt, Artificial Sequence
  mRNA product Design i-3 (hSL-A64-N5) comprising derived and/or modified sequence from LASV(Mad39;Clade IV)__ANH09722__GPCmut11 (opt4)
aggagaaagcuuaccaugggccagaucgugaccuucuuccaggaggugccccacgugaucgaggaggugaugaacaucgugcugaucgcccugagcauccuggccgugcugaagggccuguacaacguggccaccugcggccugaucggccuggugaccuuccugcugcugugcggcagaagcugcaccaccacccuguacaagggcguguacgagcugcaggcccuggagcugaacauggagacccugaacaugaccaugccccugagcugcaccaagaacaacagccaccacuacaucagagugggcaacgagaccggccuggagcugacccugaccaacaccagccugaucaaccacaaguucugcaaccugagcgacgcccacaagaagaaccuguacgaccacgcccugaugagcaucaucagcaccuuccaccugagcauccccaacuucaaccaguacgaggccaugagcugcgacuucaacgacggcaagaucagcgugcaguacaaccugagccacaccuacgccggcgacaccgccaaccacugcggcaccguggccaacggcgugcugcagaccuucaugagaauggccuggggcggcagcuacaucgcccuggacagcggcagaggcggcugggacugcaucaugaccagcuaccaguaccugaucauccagaacaccaccugggaggaccacugccaguucagcagacccagccccaucggcuaccugggccugcugagccagagaaccagagacaucuacaucagcagaagacugcugggcaccuucaccuggacccugagcgacagcgagggcaaggacacccccggcggcuacugccugaccagauggaugcugaucgaggccgagcugaagugcuucggcaacaccgccguggccaagugcaacgagaagcacgacgaggaguucugcgacaugcugagacuguucgacuucaacaagcaggccauccagagacugaaggccgaggcccagaugagcauccagcugaucaacaaggccgugaacgcccugaucaacgaccagcugaucaugaagaaccaccugagagacaucaugggcauccccuacugcaacuacagcaaguacugcuaccugaaccacaccgugaccggcaagaccagccugcccaagugcugccuggugagcaacggcagcuaccugaacgagacccacuucagcgacgacaucgagcagcaggccgacaacaugaucaccgagaugcugcagaaggaguacauggagagacagggcaagaccccccugggccugguggaccuguucguguucagcaccagcuucuaccugaucagcaucuuccugcaccuggugaagauccccacccacagacacguggugggcaagcccugccccaagccccacagacugaaccacaugggcaucugcagcugcggcuucuacaagcagcccggcgugcccgugagauggaagagaugaggacuaguuauaagacugacuagcccgaugggccucccaacgggcccuccuccccuccuugcaccgagauuaaucaaaggcucuuuucagagccaccaaaaaaaaaaaaaaaaaaaaaaaaaaaaaaaaaaaaaaaaaaaaaaaaaaaaaaaaaaaaaaaaagaauu

SEQ ID NO: 39620 - RNA, 1658 nt, Artificial Sequence
  mRNA product Design i-3 (hSL-A64-N5) comprising derived and/or modified sequence from LASV(Z0947-SLE-2011;Clade IV)__AIT17840__GPCmut11 (opt4)
aggagaaagcuuaccaugggccagaucgugaccuucuuccaggaggugccccacgugaucgaggaggugaugaacaucgugcugaucgcccugagcauccuggccgugcugaagggccuguacaacuucgccaccugcggccuggugggccuggugaccuuccugcugcugugcggcagaagcugcaccaucagccuguacaagggcguguacgagcugcagacccuggagcugaacauggagacccugaacaugaccaugccccugagcugcaccaagaacaacagccaccacuacaucauggugggcaacgagaccggccuggagcugacccugaccaacaccagcaucaucaaccacaaguucugcaaccugagcgacgcccacaagaagaaccuguacgaccacgcccugaugagcaucaucagcaccuuccaccugagcauccccaacuucaaccaguacgaggccaugagcugcgacuucaacggcggcaagaucagcgugcaguacaaccugagccacagcuacgccggcgacgccgccaaccacugcggcaccguggccaacggcgugcugcagaccuucaugagaauggccuggggcggcagcuacaucgcccuggacagcggcagagacagaugggacugcaucaugaccagcuaccaguaccugaucauccagaacaccaccugggaggaccacugccaguucagcagacccagccccaucggcuaccugggccugcugagccagagaaccagagacaucuacaucagcagaagacugcugggcaccuucaccuggacccugagcgacagcgagggcaaggacacccccggcggcuacugccugaccagauggaugcugaucgaggccgagcugaagugcuucggcaacaccgccguggccaagugcaacgagaagcacgacgaggaguucugcgacaugcugagacuguucgacuucaacaagcaggccauccagagacugaaggccgaggcccagaugagcauccagcugaucaacaaggccgugaacgcccugaucaacgaccagcugaucaugaagaaccaccugagagacaucaugggcauccccuacugcaacuacagcaaguacugcuaccugaaccacaccaccaccggcaagaccagccugcccaagugcugccuggugagcaacggcagcuaccugaacgagacccacuucagcgacgacaucgagcagcaggccgacaacaugaucaccgagaugcugcagaaggaguacauggagagacagggcaagaccccccugggccugguggaccuguucguguucagcaccagcuucuaccugaucagcaucuuccugcaccuggugaagauccccacccacagacacaucgugggcaagcccugccccaagccccacagacugaaccacaugggcaucugcagcugcggccuguacaagcagcccggcgugcccgugaaguggaagagaugaggacuaguuauaagacugacuagcccgaugggccucccaacgggcccuccuccccuccuugcaccgagauuaaucaaaggcucuuuucagagccaccaaaaaaaaaaaaaaaaaaaaaaaaaaaaaaaaaaaaaaaaaaaaaaaaaaaaaaaaaaaaaaaaagaauu

SEQ ID NO: 39621 - RNA, 1658 nt, Artificial Sequence
  mRNA product Design i-3 (hSL-A64-N5) comprising derived and/or modified sequence from LASV(Josiah;Clade IV)__NP_694870__GPCmut11 (opt5)
aggagaaagcuuaccaugggccagaucgugaccuucuuucaagaggucccccacguuauugaagaggugaugaacaucgugcugauugcccucagcguccuggcugugcuuaaggggcuguacaauuucgccacaugcggacucguuggccuggugacguuucuucugcucugugggagauccugcaccacaucucuguauaaaggagucuacgaacugcagacccucgagcugaacauggaaacacuuaauaugaccaugccucugagcuguacaaagaacaauucccaucacuauaucauggugggcaacgagaccgggcucgagcugacgcuuaccaauacaucuauuaucaaccauaaauucugcaaucugagcgacgcgcacaagaaaaaccucuacgaucaugcucugauguccaucauuucuaccuuucaccugagcaucccgaauuucaaccaguaugaagccauguccugugacuuuaauggaggcaagauuagcguucaguacaaccucucucacuccuaugccggcgaugcugccaaucauugcgggacaguggcuaacggaguccugcaaaccuucaugcggauggccuggggcgggagcuacaucgcgcuugacucuggacgcggcaacugggauuguauuaugacguccuaccaguaucugaucauucagaauacaaccugggaggaccacugccaguuuagcagacccucuccuaucggguaccucggacugcuuucccaacggacacgcgauaucuauauuagcagacggcugcucggcaccuucaccuggacacuguccgacucugaaggcaaggauacgcccgggggauacugucugacccgcuggaugcucaucgaggccgagcugaaaugcuuuggcaacacagcuguggccaaguguaaugaaaaacaugacgaggaguucugcgauaugcuuagacuguuugacuucaacaagcaggcuauucagcggcucaaagccgaagcgcagaugagcauccaacugauuaauaaggccgugaacgcucuuaucaaugaucagcugaucaugaagaaccaccuccgcgacauuauggggaucccuuauugcaauuacuccaaauauuguuaccugaaccacaccacaaccggaagaacgagccugcccaagugcugucucgucucuaauggcuccuaccugaacgaaacacauuucagcgacgauauugagcagcaagccgacaauaugaucaccgagaugcuucagaaagaauauauggagcggcaggggaagaccccucugggacucguugaucuguuuguguucucuaccagcuuuuaccugauuuccaucuuccuucaccucgugaaaaucccgacacaucgccacauugucggcaagucuugccccaaaccucauagacugaaccacaugggcaucuguagcugcgggcuguauaagcagcccggagugccuguuaaguggaaacggugaggacuaguuauaagacugacuagcccgaugggccucccaacgggcccuccuccccuccuugcaccgagauuaaucaaaggcucuuuucagagccaccaaaaaaaaaaaaaaaaaaaaaaaaaaaaaaaaaaaaaaaaaaaaaaaaaaaaaaaaaaaaaaaaagaauu

SEQ ID NO: 39622 - RNA, 1655 nt, Artificial Sequence
  mRNA product Design i-3 (hSL-A64-N5) comprising derived and/or modified sequence from LASV(LP;Clade I)__AAF86701__GPCmut11 (opt5)
aggagaaagcuuaccaugggccagaucauuaccuucuuucaagaggugccccacgucaucgaagagguuaugaacauugugcugaucgcccucagccugcuugcuauucugaaggggcucuacaauaucgccacaugcggaaucauuggccugguggcguuccuuuuucugugugggaaauccugcucucucacgcugaagggaggcuaugaacugcagacccucgagcugaacauggaaacacuuaauaugaccaugccucugagcuguaccaaaaacuccucucaucacuacaucagagucgggaaugagacaggacucgagcugacacuuaccaacacgagcauuaucaaucauaaguucugcaaccuguccgacgcucacaaaaagaaucucuaugaucaugcccugaugucuauuaucagcaccuuucaccuguccauuccgaacuucaaucaguacgaagccaugagcugugacuuuaacggcggcaagaucucugugcaguauaaucucucccacagcuacgcuggggaugccgcugagcauugcggaacaguugccaacggcgugcugcaaaccuucaugcggauggcguggggagggcgcuauaucgcccuugacucuggcaaagggaauugggauuguauuaugacauccuaccaguaccugaucauucagaacaccacgugggaagaccacugccaguuuagcagacccucuccuaucggauaucucggccugcuuucccaacggacacgcgauauuuacaucagcagacggcugcucggcaccuucacauggacccuguccgacucugaggggaacgagacccccggaggcuauugucugacacgcuggaugcucaucgaagcugagcugaagugcuuugggaauacggccgucgcuaaauguaacgaaaagcaugaugaggaguucugcgacaugcuuagacuguuugauuucaauaaacaggccauucggcgccucaaggcggaagcccagaugagcauccagcugauuaacaaggcugugaaugcccuuaucaacgaccaacugauuaugaaaaaucaccucagagauaucaugggaaucccuuacugcaacuauuccaaguacuguuaucugaaucacaccagcucuggccggacaucccugcccaaaugcugucucauuagcaacgggucuuaccugaaugagacccaguucagcgacgacaucgaacagcaagcugauaacaugauuacagagaugcuucagaaggaauacaucgagcgccagggaaaaaccccucugggccucguugacauuuuuaucuucuccacgucuuuuuaucugauuagcaucuuccugcaucuuaucaagauuccgacacacagacauaucgugggcaaacccugcccuaagccccaccggcucaaucauaugggggucuguuccugcggacuguacaagcacccuggcgugcccaccaaauggaagcgcugaggacuaguuauaagacugacuagcccgaugggccucccaacgggcccuccuccccuccuugcaccgagauuaaucaaaggcucuuuucagagccaccaaaaaaaaaaaaaaaaaaaaaaaaaaaaaaaaaaaaaaaaaaaaaaaaaaaaaaaaaaaaaaaaagaauu

SEQ ID NO: 39623 - RNA, 1655 nt, Artificial Sequence
  mRNA product Design i-3 (hSL-A64-N5) comprising derived and/or modified sequence from LASV(803213;Clade II)__AAF86703__GPCmut11 (opt5)
aggagaaagcuuaccaugggccagaucauuaccuucuuucaagaggugccccacgucaucgaagagguuaugaacauugugcugaucgcccucagccugcuugcuauucugaaggggaucuacaauguggccacaugcggacucuucggccugaucuccuuucuucugcucugugggagaucuugcagcgucacguauaaaggaguguacgaacugcagacccuggagcucaacauggcgaaucugaacaugacaaugccucuuuccuguaccaagaauaacucucaucacuauauuaugguuggcaaugaaacagggcuggagcucacccugacaaacaccagcaucauuaaucauaaauucugcaaccuuuccgacgcucacaagaaaaaucuguacgaucaugcccucaugucuaucauuagcacguuucaccuguccaucccgaacuucaaucaguaugaggccaugagcugugacuuuaacggaggcaagauuucugugcaguacaaucugucccacagcuucgcugucgaugccgcuaaccauugcggcaccaucgccaacggggugcuccaaacauuuaugcggauggcguggggaggcucuuauaucgcccuggacuccgggaagggaaauugggauuguauuaugaccagcuaccaguaccuuaucauucagaacacaaccugggaagaccacugccaguucucucgccccuccccuaucggcuaucuggggcuccugagccaaagaacgcgggauauuuacaucucccgcagacuucugggaacauuuaccuggacacucucugacagcgagggcaaugaagcucccggcggguauugucugacccgguggaugcugaucgaggccgagcucaaaugcuucggaaacaccgcuguugccaaguguaaugaaaaacaugaugaggaauuuugcgacaugcugcgccuuuucgauuucaacaagcaggcgauuaaaagacugaagacagaggcccagauguccauccagcucauuaauaaggcugugaacgcccugaucaaugaccaacuuauuaugaaaaaccaucugcgggauaucaugggcaucccuuacugcaauuauagccgcuacuguuaucucaaccacacggucaccgggaagacaucucugcccagaugcugucugguguccaauggaagcuaccucaacgaaacccacuuuucugacgacauugagcagcaggcugauaauaugaucacagagaugcugcaaaaagaauacauggaccggcagggcaagaccccucuugggcugguggaucucuucgucuuuagcacguccuucuaucugauuucuaucuuucugcaccuuguuaaaauuccgacacaucgccacaucgugggaaagcccugcccuaaaccccauagacucaaccacaugggcauuuguagcugcggccuguacaagcacccuggggugcccgucaaguggaaacggugaggacuaguuauaagacugacuagcccgaugggccucccaacgggcccuccuccccuccuugcaccgagauuaaucaaaggcucuuuucagagccaccaaaaaaaaaaaaaaaaaaaaaaaaaaaaaaaaaaaaaaaaaaaaaaaaaaaaaaaaaaaaaaaaagaauu

SEQ ID NO: 39624 - RNA, 1655 nt, Artificial Sequence
  mRNA product Design i-3 (hSL-A64-N5) comprising derived and/or modified sequence from LASV(GA391;Clade III)__CAA36645__GPCmut11 (opt5)
aggagaaagcuuaccaugggccagaucgugaccuucuuucaagaggucccccacguuauugaagaggugaugaacaucgugcugauugcccucagcauccuggcuauucuuaaggggcuguacaaugucgccacaugcggacucaucggccuggugacguuccuucugcucuccgggagaucuuguagccugaucuauaaaggaaccuacgaacugcagacacucgagcugaacauggaaacccuuaauaugacaaugccucuguccugcaccaagaacaauucucaucacuauauucggguuggcaacgagacagggcucgagcugacccuuacgaauaccagcauccugaaccauaaauuuuguaaucucuccgacgcgcacaagcgcaaccuguacgaucauucucugaugagcauuaucuccacauuccaccucagcauuccgaauuuuaaccaguaugaagcuaugucuugcgacuucaauggaggcaaaaucaccgugcaguacaaccugucccacagcuuugccgucgaugccgcuggccauugugggacacuugccaauggagugcugcaaaccuucaugagaauggcuuggggcgggucuuauauugcccucgacuccggacggggcaacugggauugcaucaugacgagcuaccaguaccugaucauucagaacacaaccugggacgaucacugucaguuuucucgccccuccccuaucggguaucuuggacugcucagccaaagaacacgggacauuuacaucucccgcagacugcugggcaccuucaccuggacacucucugauagcgagggcaaugaaacgcccgggggauauugccugacccgguggaugcuuauugaggcggagcugaaguguuuuggcaacacagccguugcuaagugcaaugaaaaacaugacgaggaguucugugauaugcuccgccuguuugacuucaacaagcaggccaucagacggcuuaaaaccgaagcucagauguccauccagcugauuaauaaggccgugaacgcgcucaucaaugaucaacugauuaugaaaaaccaucugcgcgacaucauggggauuccuuacugcaauuauagcagauacugcuaucucaaccacacaucuaccggaaagacgucccugccccgguguugccuuaucagcaauggcucuuaccugaacgaaacaaaguucagcgacgauaucgagcagcaggccgacaauaugauuaccgagaugcuccaaaaagaauacaucgaucgccaggggaagaccccucugggacuggucgaccuuuuuguguucuccacaucuuuuuaucucauuagcaucuuccugcaccuggugaaaauuccgacccacagacauaucgucggcaagcccuguccuaaaccccaccggcucaaccauaugggcauuugcuccugugggcuguacaagcagccuggaguucccgugagauggaaacgcugaggacuaguuauaagacugacuagcccgaugggccucccaacgggcccuccuccccuccuugcaccgagauuaaucaaaggcucuuuucagagccaccaaaaaaaaaaaaaaaaaaaaaaaaaaaaaaaaaaaaaaaaaaaaaaaaaaaaaaaaaaaaaaaaagaauu

SEQ ID NO: 39625 - RNA, 1658 nt, Artificial Sequence
  mRNA product Design i-3 (hSL-A64-N5) comprising derived and/or modified sequence from LASV(AV;Clade V)__CCA30314__GPCmut11 (opt5)
aggagaaagcuuaccaugggccagaucgugaccuucuuucaagaggucccccacguuauugaagaggugaugaacaucgugcugauugcccucagcauccuggcuguccuuaaggggcuguacaauauugccacaugcggacucaucggccugaucacguuccuucugcucugugggagauccugcucuagcaaccuguauaaaggaguguacgaacugcagucccucgaccugaauauggagacccuuaacaugacaaugccucugucuuguaccaagaauaacagccaucacuauauucggguuggcaaugauacagggcucgaacugacccuuacaaacaccuccauccugaaucauaaauuuugcaaccucucugacgcgcacaagaaagaucuguacgaccaugcucugaugagcauuaucuccacguuccaccucagcauuccgaauuuuaaccaguaugaggccaugucuugugauuucaauggaggcaagaucuccgugcaguacaaccugagccacucuuaugccauugacgcugccaaucauugcggcaccgucgcuaacgggauccuucaaacauuuaugcgcauggccuggggaggcuccuacaucgcgcuggauagcgggagaggaaacugggacuguauuaugaccucuuaccaguaucucaucauucagaauacaaccugggagaaccacugccaguucucccggcccagcccuaucggcuaccuggggcuucugucccaacgcacgagagauauuuauaucucucggcgccuccugggaacauuuaccuggacacugagcgacuccgaaggcaaugccacccccggcggguacugucucaccagauggaugcugaucgaggcugaacuuaagugcuucggaaacacagccguggcuaaauguaaugagaagcaugaugaggaauuuugcgacaugcugcgccucuucgauuuuaacaaacaggccauuagccggcugaagucugaggcgcagauguccauccagcuuauuaauaaagccguuaacgcucugaucaaugaccaacucauuaugaagaaccaccugagagacaucaugggcaucccuuauugcaauuacagcaaguauuguuaccugaaccacacgauuaccgggaaaacaucucuccccaagugcugucuggugagcaauggauccuaccuuaacgaaacccauuucucugaugacaucgagcagcaggccgauaauaugauuacagaaaugcugcaaaaagaguauauggagcggcagggcaagaccccucucgggcuggucgaccuguucguguuuagcacguccuucuaccuuaucagcauuuuucuccgccuggugaaaaucccgacacacagacauauugucggaaagcccugcccuaaaccccaccggcugaaccauaugggcaucuguucuugcggccucuauaagcagccugggguucccgugcgcuggaagagaugaggacuaguuauaagacugacuagcccgaugggccucccaacgggcccuccuccccuccuugcaccgagauuaaucaaaggcucuuuucagagccaccaaaaaaaaaaaaaaaaaaaaaaaaaaaaaaaaaaaaaaaaaaaaaaaaaaaaaaaaaaaaaaaaagaauu

SEQ ID NO: 39626 - RNA, 1655 nt, Artificial Sequence
  mRNA product Design i-3 (hSL-A64-N5) comprising derived and/or modified sequence from LASV(Togo/2016/7082;Clade VI)__AMR44577__GPCmut11 (opt5)
aggagaaagcuuaccaugggccagaucauuaccuucuuucaagaggugccccacgucaucgaagagguuaugaacauugugcugaucgcccucagccugcuugcuauucugaaggggguguacaaugucgccacaugcggaaucaucggccucgugacguuccuguuucuuugugggagauccugcucucugauuuauaaaggaagcuacgaacuccagacccuggagcugaacauggaaacacucaauaugaccaugccucuguccuguacaaagaacucuagccaucacuauauccggguuggcaaugagaccgggcuugagcugacacucaccaacacguccauuaucaaucauaaauucugcaaccugucugacgcgcacaagcgcaaucuuuacgaucaugcucugaugagcauucucuccaccuuucaccugagcaucccgaacuucaaucaguaugaagccaugucuugugacuuuaacggaggcaaaauuuccgugcaguacaaucugagccacgccuaugcugucgaugccgcugagcauugcggcacaguggccaacgggguucuccaaaccuucaugagaauggcguggggaggcucuuacaucgcccuggacuccgggcggggaaauugggauuguaucaugacaagcuaccaguaucuuauuauccagaacaccacgugggaagaccacugccaguuuucucgccccuccccuauuggcuaccuggggcuccugagccaaagaacacgggauaucuauauuucccgcagacuucugggaaccuucacauggacccucucugacagcgagggcaacgagacccccggcggguacugucugacacgguggaugcugaucgaagcugagcucaagugcuuuggaaauacggccguggcuaaguguaacgaaaaacaugaugaggaguucugcgacaugcugcgccuuuuugauuucaauaagcaggccauccagagacugaaauccgaagcgcagaugagcauucaacucaucaacaaggccgucaaugcucugauuaacgaccagcuuaucaugaaaaaucaucugcgggauaugaugggcauuccuuauugcaacuacucuaaguauuguuaccucaaucacaccuccagcgggcgcacaucucugcccaagugcugucuggugagcaacggauccuaccucaaugagacccacuucucugacgacaucgaacagcaagccgauaacaugaucacagagaugcugcagaaagaauauauugacagacagggcaagaccccucuugggcugguggaucucuuugucuucagcacguccuuuuaccugaucagcauuuuccugcaccuuaucaaaauuccgacacaucggcacaucguuggaaagcccugcccuaaaccccaucgccucaaucacaugggcauuuguucuugcggccuguauaagcagccuggggugcccaccagauggaaacggugaggacuaguuauaagacugacuagcccgaugggccucccaacgggcccuccuccccuccuugcaccgagauuaaucaaaggcucuuuucagagccaccaaaaaaaaaaaaaaaaaaaaaaaaaaaaaaaaaaaaaaaaaaaaaaaaaaaaaaaaaaaaaaaaagaauu

SEQ ID NO: 39627 - RNA, 1655 nt, Artificial Sequence
  mRNA product Design i-3 (hSL-A64-N5) comprising derived and/or modified sequence from LASV(KAK-428;Clade n.d. (VII))__ANH09740__GPCmut11 (opt5)
aggagaaagcuuaccaugggccagaucgugaccuucuuucaagaggucccccacguuauugaagaggugaugaacaucgugcugauugcccucagccugcuugcuauccugaaggggcucuacaauuucgccacaugcggagucauuggccugaucacguuucuucugcucugugggagauccugcucugcgaccuauaaaggacaguacgaacugcagacacuggagcucaacauggaaagccugaauaugaccaugccucuuuccuguacaaagaacaauucucaucacuauauccgggcuggcaacaauaccgggcuggagcucacacugaccaacacgagcauuaucucccauaaauucugcaaucuuucugacgcccacaagaaaaaccuguacgaucauacccucaugagcauuaucacaaccuuucaccuguccauuccgaauuucaaccaguaugaggccaugagcugugacuuuaauggaggcaagaucucuauucaauacaaccugucccacagcuaugcuggcgaugccgcucagcauugcgggacaguggccaauggaguucuccagaccuucaugcgcauggcguggggcgggucuuaccuggcccuugacuccggaagacggggcugggauuguaucaucagcucuuaccaguaucugauuauccaaaacacgacaugggacgaucacugccaguuuucccgccccagcccuauuggguaccucggauucgugucccagaagaccagagacaucuauauuucucggcgccugcuuggcacauuuaccuggacccugagcgauuccgaaggccaugacaugcccgggggauacugucucacaagauggaugcugaucgaggcugaucugaaaugcuucggcaacacggccgucgcuaaguguaaugaaaaacacgacgaggaguuuugcgauauguggcgccucuucgacuucaacaagcaggccauccaacggcugaaagcggaagcccagaugaauauucagcuuaucaacaaggcugugaaugcccugauuaacgaccaacucaugaugaagaaucaccugagagauaucauggggauuccuuauugcaacuacagcaaauuuuguuaucuuaauaacaccacaaccggacggacaucucugccccgcugcugucucaucuccaauggcagcuaccugaacgagacccauuucucugacgauaucgaacagcaggcugacaauaugauuacggagaugcugcagaaggaauacauggauagacaagggaaaacaccucucggacugguugaccuuuuuguguucagcaccuccuuuuaucugaucaccauuuuccuccaccuggucaagaucccgacacaucggcacauugugggcaaacccugcccuaagccccaucgccugaaccacaugggcaucuguucuugcgggcuuuacaaacagccuggagugcccgucagauggaagcggugaggacuaguuauaagacugacuagcccgaugggccucccaacgggcccuccuccccuccuugcaccgagauuaaucaaaggcucuuuucagagccaccaaaaaaaaaaaaaaaaaaaaaaaaaaaaaaaaaaaaaaaaaaaaaaaaaaaaaaaaaaaaaaaaagaauu

SEQ ID NO: 39628 - RNA, 1655 nt, Artificial Sequence; identical to SEQ ID NO: 39622
  mRNA product Design i-3 (hSL-A64-N5) comprising derived and/or modified sequence from LASV(Pinneo-NIG-1969;Clade I)__AIT17836__GPCmut11 (opt5)

SEQ ID NO: 39629 - RNA, 1655 nt, Artificial Sequence
  mRNA product Design i-3 (hSL-A64-N5) comprising derived and/or modified sequence from LASV(ISTH0009-NIG-2011;Clade II)__AIT17404__GPCmut11 (opt5)
aggagaaagcuuaccaugggccagaucauuaccuucuuucaagaggugccccacgucaucgaagagguuaugaacauugugcugaucgcccucagccugcuugcuauucugaaggggaucuacaauguggccacaugcggacucuucggccuggucuccuuucuucugcucugugggagaucuugcagcacgaccuauaaaggaguguacgaacugcagacacuggagcucgacauggcgucccugaacaugaccaugccucuuucuuguacaaagaauaacagccaucacuauaucaugguuggcaaugaaaccgggcuggagcucacacugaccaacacguccauuaucaaucauaaauucugcaaccuuucugaugcucacaagaaaaaucuguacgaccaugcccucaugagcauuaucuccaccuuucaccugagcauuccgaacuucaaucaguaugaggccaugucuugugauuuuaacggaggcaagaucuccgugcaguacaaucugagccacgcuuaugccgucgacgcugccaaccauugcggcacaauugcgaauggggugcuccaaaccuucaugcggauggccuggggaggcucuuacaucgcucuggauuccgggaagggaagcugggacuguaucaugacaucuuaccaguaucuuauuauccagaacaccacgugggaagaucacugccaguuuucccgccccagcccuauuggcuaccuggggcuccugucccaaagaacacgggacaucuauauuucucgcagacuucugggaaccuucacauggacccucagcgauuccgagggcaacgaaacccccggcggguacugucugacacgguggaugcugaucgaggccgagcucaaaugcuuuggaaauacggcuguugccaaguguaacgaaaaacaugacgaggaguucugcgauaugcugcgccuuuuugacuucaauaagcaggcgaucagacggcugaaaaccgaagcccagaugagcauucagcucaucaacaaggcugugaaugcccugauuaacgaucaacuuaucaugaagaaucaucugcgcgacauuaugggcaucccuuauugcaacuacucuaaauauuguuaccucaaucacacagucaccgggaagacaucccugcccagaugcugucuggugagcaacggaucuuaccucaaugaaacccacuucagcgacgauaucgagcagcaggcugacaacaugauuacggagcugcuucaaaaagaauauauggaucggcagggcaagacaccucuggggcucguggaccuguuugucuucuccaccucuuuuuaccugaucagcauuuuccuucaccucaucaaaauuccgacccaucgccacaucacaggaaagcccugcccuaaaccccauagacugaaucacaugggcauuuguuccugcggccuguauaagcacccugggguucccgugaaguggaaacggugaggacuaguuauaagacugacuagcccgaugggccucccaacgggcccuccuccccuccuugcaccgagauuaaucaaaggcucuuuucagagccaccaaaaaaaaaaaaaaaaaaaaaaaaaaaaaaaaaaaaaaaaaaaaaaaaaaaaaaaaaaaaaaaaagaauu

SEQ ID NO: 39630 - RNA, 1655 nt, Artificial Sequence
  mRNA product Design i-3 (hSL-A64-N5) comprising derived and/or modified sequence from LASV(ISTH2010-NIG-2012;Clade II)__AIT17482__GPCmut11 (opt5)
aggagaaagcuuaccaugggccagaucauuaccuucuuucaagaggugccccacgucaucgaagagguuaugaacauugugcugaucgcccucagccugcuugcuauucugaaggggaucuacaauguggccacaugcggacucuucggccuggucuccuuucuucugcucugugggagaucuugcagcacgaccuauaaaggaguguacgaacugcagacacuggagcucgacauggcgucccugaacaugaccaugccucuuucuuguacaaagaauaacagccaucacuauaucaugguuggcaaugaaaccgggcuggagcucacacugaccaacacguccauuaucaaucauaaauucugcaaccuuucugaugcucacaagaaaaaucuguacgaccaugcccucaugagcauuaucuccaccuuucaccugagcauuccgaacuucaaucaguaugaggccaugucuugugauuuuaacggaggcaagaucuccgugcaguacaaucugagccacgcuuaugccgucgacgcugccaaccauugcggcacaauugcgaauggggugcuccaaaccuucaugcggauggccuggggaggcucuuacaucgcucuggauuccgggaagggaagcugggacuguaucaugacaucuuaccaguaucuuauuauccagaacauuaccugggaagaucacugccaguuuucccgccccagcccuaucggcuaccuggggcuccugucccaaagaacgcgggacauuuauaucucucgcagacuucugggaacauucaccuggacacucagcgauuccgagggcaacgaaacccccggcggguacugucugacccgguggaugcugaucgaggccgagcucaaaugcuuuggaaauacagcuguugccaaguguaacgaaaaacaugacgaggaguucugcgauaugcugcgccuuuuugacuucaauaagcaggcgauuagacggcugaaaacggaagcccagaugagcauccagcucauuaacaaggcugugaaugcccugaucaacgaucaacuuauuaugaagaaucaucugcgcgacaucaugggcaucccuuauugcaacuacucuaaauauuguuaccucaaucacaccgucacagggaagaccucccugcccagaugcugucuggugagcaacggaucuuaccucaaugaaacacacuucagcgacgauauugagcagcaggcugacaacaugaucaccgagcugcuucaaaaagaauauauugaucggcagggcaagacgccucuggggcucguggaccuguuugucuucuccacaucuuuuuaccugaucagcauuuuccuucaccucguuaaaaucccgacccaucgccacguggugggaaagcccugcccuaaaccccauagacugaaucacaugggcauuuguuccugcggccuguauaagcacccugggguccccgugaaguggaaacggugaggacuaguuauaagacugacuagcccgaugggccucccaacgggcccuccuccccuccuugcaccgagauuaaucaaaggcucuuuucagagccaccaaaaaaaaaaaaaaaaaaaaaaaaaaaaaaaaaaaaaaaaaaaaaaaaaaaaaaaaaaaaaaaaagaauu

SEQ ID NO: 39631 - RNA, 1655 nt, Artificial Sequence
  mRNA product Design i-3 (hSL-A64-N5) comprising derived and/or modified sequence from LASV(Lassa virus/H.sapiens-wt/NGA/2015/ISTH_0543;Clade II)__AVO03639__GPCmut11 (opt5)
aggagaaagcuuaccaugggccagaucauuaccuucuuucaagaggugccccacgucaucgaagagguuaugaacauugugcugaucgcccucagccugcuugcuauucugaaggggaucuacaauguggccacaugcggacucuucggccuggucuccuuucuucugcucugugggagaucuugcagcacgaccuauaaaggaguguacgaacugcagacacuggagcucgacauggcgaaccugaauaugaccaugccucuuuccuguacaaagaacaauucucaucacuauaucaugguuggcaacgaaaccgggcuggagcucacacugaccaauacgagcauuaucaaccauaaauucugcaaucuuuccgaugcucacaagaaaaaccuguacgaccaugcccucaugucuauuaucagcaccuuucaccuguccauuccgaauuucaaccaguaugaggccaugagcugugauuuuaauggaggcaagaucucugugcaguacaaccugucccacacauaugcugucgacgccgcuaaucauugcggcaccauugccaacggggugcuccaaacauucaugcggauggcguggggaggcagcuacaucgcccuggauucugggaagggauccugggacuguaucaugaccagcuaccaguaucuuguuauucagaacacgacaugggaagaucacugccaguuuucucgccccuccccuaucggcuaccuggggcuccugagccaaagaacccgggacauuuauaucucccgcagacuucugggaacauucaccuggacccucucugauagcgagggcaaugaaacacccggcggguacugucugacgcgguggaugcugauugaggcugagcucaaaugcuuuggaaacaccgccguggcuaaguguaaugaaaaacaugacgaggaguucugcgauaugcugcgccuuuuugacuucaacaagcaggccaucagacggcugaaaacagaagcgcagauguccauccagcucauuaauaaggccgucaacgcucugaucaaugaucaacuuauuaugaagaaccaucugcgcgacaucaugggcauuccuuauugcaauuacagcaaauauuguuaccucaaccacaccgugacagggaagaccucucugcccagaugcugucugguguccaauggaagcuaccucaacgaaacgcacuucucugacgauaucgagcagcaggccgacaauaugaucacagagcugcuucaaaaagaauauauugaucggcagggcaagaccccucuggggcucgucgaccuguuuguuuucagcaccuccuuuuaccugaucucuauuuuccuucaccucgugaaaaucccgacacaucgccacauuaccggaaagcccugcccuaaaccccauagacugaaccacaugggcaucuguagcugcggccuguauaagcacccuggggugcccgucaaguggaaacggugaggacuaguuauaagacugacuagcccgaugggccucccaacgggcccuccuccccuccuugcaccgagauuaaucaaaggcucuuuucagagccaccaaaaaaaaaaaaaaaaaaaaaaaaaaaaaaaaaaaaaaaaaaaaaaaaaaaaaaaaaaaaaaaaagaauu

SEQ ID NO: 39632 - RNA, 1655 nt, Artificial Sequence
  mRNA product Design i-3 (hSL-A64-N5) comprising derived and/or modified sequence from LASV(Lassa virus/H.sapiens-wt/NGA/2016/ISTH_0009;Clade II)__AVO03571__GPCmut11 (opt5)
aggagaaagcuuaccaugggccagaucauuaccuucuuucaagaggugccccacgucaucgaagagguuaugaacauugugcugaucgcccucagccugcuugcuauucugaaggggaucuacaauguggccacaugcggacuccugggccuugucuccuuccugcuccugugugggagaucuugcagcacgaccuauaaaggaguguacgaacugcagacacucgagcuggacauggcgucccuuaacaugaccaugccucugucuuguacaaagaauaacagccaucacuauaucaugguuggcaaugaaaccgggcucgagcugacacuuaccaacacguccauuaucaaucauaaauuuugcaaccugucugaugcucacaagaaaaaucucuacgaccaugcccugaugagcauuaucuccaccuuccaccugagcauuccgaacuuuaaucaguaugaggccaugucuugugauuucaacggaggccggaucuccgugcaguacaaucucagccacucuuaugcugucgacgccgcuaaccauugcggcacaauugccaauggggugcugcaaaccuuuaugcgcauggcguggggaggcuccuacaucgcccuugauagcgggaagggaucuugggacuguaucaugacauccuaccaguaucugauuauccagaacaccacgugggaagaucacugccaguucagcagacccuccccuauuggcuaccucgggcugcuuucucaacggacacgcgacaucuauauuagcagacggcugcucggaaccuuuacauggacccuguccgauagcgagggcaacgaaacccccggcggguacugucugacacgcuggaugcucaucgaggcugagcugaagugcuucggaaauacggccguugcuaaauguaacgaaaagcaugacgaggaauuuugcgauaugcuuagacuguucgacuuuaauaaacaggccauccggcgccucaagaccgaggcgcagaugucuauucagcugaucaacaaagccgugaaugcucuuauuaacgaucaacugaucaugaagaaucaccucagagacauuaugggcaucccuuauugcaacuacuccaaguauuguuaccugaaucacacagucaccgggaaaacaagccugccccggugcugucucgugucuaacggaagcuaccugaaugaaacccauuucuccgacgauaucgagcagcaggccgacaacaugauuacggagcuucugcaaaaggaauauaucgaucgccagggcaaaacaccucucgggcugguggaccuguucgucuuuucuaccagcuucuaccuuauuuccaucuuucuccaccugguuaagauuccgacccauagacacaucacaggaaaacccugcccuaagccccaucggcugaaucacaugggcauuuguagcugcggccucuauaaccacccuggggugcccgugaaauggaagcgcugaggacuaguuauaagacugacuagcccgaugggccucccaacgggcccuccuccccuccuugcaccgagauuaaucaaaggcucuuuucagagccaccaaaaaaaaaaaaaaaaaaaaaaaaaaaaaaaaaaaaaaaaaaaaaaaaaaaaaaaaaaaaaaaaagaauu

SEQ ID NO: 39633 - RNA, 1655 nt, Artificial Sequence
  mRNA product Design i-3 (hSL-A64-N5) comprising derived and/or modified sequence from LASV(Lassa virus/H.sapiens-wt/NGA/2016/ISTH_0017;Clade II)__AVO03567__GPCmut11 (opt5)
aggagaaagcuuaccaugggccagaucauuaccuucuuucaagaggugccccacgucaucgaagagguuaugaacauugugcugaucgcccucagccugcuugcuauucugaaggggaucuacaauguggccacaugcggacucuucggccuggucuccuuucuucugcucugugggagaucuugcagcacgaccuauaaaggaguguacgaacugcagacacuggagcucgacauggcgucccugaacaugaccaugccucuuucuuguacaaagaauaacagccaucacuauaucaugguuggcaaugaaaccgggcuggagcucacacugaccaacacguccauuaucaaucauaaauucugcaaccuuucugaugcucacaagaaaaaucuguacgaccaugcccucaugagcauuaucuccaccuuucaccugagcauuccgaacuucaaucaguaugaggccaugucuugugauuuuaacggaggcaagaucuccgugcaguacaaucugagccacacauaugcuauugacgccgcuaaccauugcggcaccaucgccaaugggguccuccaaacauucaugcggauggcguggggaggcucuuacaucgcccuggauuccgggaagggaagcugggacuguauuaugaccucuuaccaguaucuuaucauucagaacacgacaugggaagaucacugccaguuuucccgccccagcccuaucggcuaccuggggcuccugucccaaagaacccgggacauuuauaucucucgcagacuucugggaacauucaccuggacccucagcgauuccgagggcaacgaaacacccggcggguacugucugacgcgguggaugcugaucgaggcugagcucaaaugcuuuggaaauaccgccguggcuaaguguaacgaaaaacaugacgaggaguucugcgauaugcugcgccuuuuugacuucaauaagcaggccauuagacggcugaaaacagaagcgcagaugagcauccagcucauuaacaaggccguuaaugcucugaucaacgaucaacuuauuaugaagaaucaucugcgcgacaucaugggcaucccuuauugcaacuacucuaaauauuguuaccucaaucacaccgugacagggaagaccucccugcccagaugcugucuggucagcaacggaucuuaccucaaugaaacgcacuucagcgacgauauugagcagcaggccgacaacaugaucacagagcugcuucaaaaagaauauauggaucggcagggcaagaccccucuggggcucguggaccuguuuguguucuccaccucuuuuuaccugauuagcaucuuccuucaccucguccgcauuccgacacauagacacguuaucggaaaacccugcccuaagccccaucggcugaaucacaugggcauuuguuccugcggccuguauaaacacccuggggugcccgugaaguggaagcgcugaggacuaguuauaagacugacuagcccgaugggccucccaacgggcccuccuccccuccuugcaccgagauuaaucaaaggcucuuuucagagccaccaaaaaaaaaaaaaaaaaaaaaaaaaaaaaaaaaaaaaaaaaaaaaaaaaaaaaaaaaaaaaaaaagaauu

SEQ ID NO: 39634 - RNA, 1655 nt, Artificial Sequence
  mRNA product Design i-3 (hSL-A64-N5) comprising derived and/or modified sequence from LASV(Lassa virus/H.sapiens-wt/NGA/2018/ISTH_0959;Clade II)__AVV65099__GPCmut11 (opt5)
aggagaaagcuuaccaugggccagaucauuaccuucuuucaagaggugccccacgucaucgaagagguuaugaacauugugcugaucgcccucagccugcuugcuauucugaaggggaucuacaauguggucacaugcggacucuucggccugguguccuuucuucugcucugugggagaucuugcagcacgaccuauaaaggaguuuacgaacugcagacacuggagcucgacauggccucccugaacaugaccaugccucuuucuuguacaaagaauaacagccaucacuauaucauggugggcaaugaaaccgggcuggagcucacacugaccaacacguccauuaucaaucauaaauucugcaaccuuucugaugcgcacaagaaaaaucuguacgaccaugcucucaugagcauuaucuccaccuuucaccugagcauuccgaacuucaaucaguaugaggccaugucuugugauuuuaacggaggcaagaucuccguccaguacaaucugagccacgccuaugcuauugacgccgcuaaccauugcggcacaaucgccaauggggugcuccaaaccuucaugcggauggcguggggaggcucuuacaucgcccuggauuccgggaagggaagcugggacuguauuaugacaucuuaccaguaucuuaucauucagaacaccacgugggaagaucacugccaguuuucccgccccagcccuaucggcuaccuggggcuccugucccaaagaacacgggacauuuauaucucucgcagacuucugggaaccuucacauggacccucagcgauuccgagggcaacgaaacccccggcggguacugucugacacgguggaugcugaucgaggcugagcucaaaugcuuuggaaauacggccguugcuaaguguaacgaaaaacaugacgaggaguucugcgauaugcugcgccuuuuugacuucaauaagcaggccauuagacggcugaaaaccgaagcgcagaugagcauccagcucauuaacaaggccgugaaugcucugaucaacgaucaacuuauuaugaagaaucaucugcgcgacaucaugggcaucccuuauugcaacuacucuaaauauuguuaccucaaucacacagucaccgggaagacaucccugcccagaugcugucuggugagcaacggaucuuaccucaaugaaacccacuucagcgacgauauugagcagcaggccgacaacaugaucacggagcugcuucaaaaagaauauauugaucggcagggcaagacaccucuggggcucguggaccuguuugucuucuccaccucuuuuuaccugaucagcauuuuccuucaccucguuaaaaucccgacccaucgccacgugauuggaaagcccugcccuaaaccccauagacugaaucacaugggcaucuguuccugcggccuguauaagcacccuggggugcccgucaaguggaaacggugaggacuaguuauaagacugacuagcccgaugggccucccaacgggcccuccuccccuccuugcaccgagauuaaucaaaggcucuuuucagagccaccaaaaaaaaaaaaaaaaaaaaaaaaaaaaaaaaaaaaaaaaaaaaaaaaaaaaaaaaaaaaaaaaagaauu

SEQ ID NO: 39635 - RNA, 1655 nt, Artificial Sequence
  mRNA product Design i-3 (hSL-A64-N5) comprising derived and/or modified sequence from LASV(LASV003-NIG-2008;Clade II)__AIT17580__GPCmut11 (opt5)
aggagaaagcuuaccaugggccagaucauuaccuucuuucaagaggugccccacgucaucgaagagguuaugaacauugugcugaucgcccucagccugcuugcuauucugaaggggaucuacaauguggccacaugcggacucuucggccuggucuccuuucuucugcucugugggagaucuugcagcacgaccuauaaaggaguguacgaacugcagacacuggagcucgacauggcgucccugaacaugaccaugccucuuucuuguacaaagaauaacagccaucacuauaucaugguuggcaaugaaaccgggcuggagcucacacugaccaacacguccauuaucaaucauaaauucugcaaccuuucugaugcucacaagaaaaaucuguacgaccaugcccucaugagcauuaucuccaccuuucaccugagcauuccgaacuucaaucaguaugaggccaugucuugugauuuuaacggaggcaagaucuccgugcaguacaaucugagccacacauaugcugucgacgccgcuaaccauugcggcaccauugccaauggggugcuccaaacauucaugcggauggcguggggaggcucuuacaucgcccuggauuccgggaagggaagcugggacuguaucaugaccucuuaccaguaucuuauuauccagaacacgacaugggaagaucacugccaguuuucccgccccagcccuauuggcuaccuggggcuccugucccaaagaacccgggacaucuauauuucucgcagacuucugggaacauucaccuggacccucagcgauuccgagagcaacgaaacacccggcggcuacugucugacgcgguggaugcugaucgaggcugagcucaaaugcuuugggaauaccgccguugcuaaguguaacgaaaaacaugacgaggaguucugcgauaugcugcgccuuuuugacuucaauaagcaggccaucagacggcugaaagcggaagcccagaugucuauucagcucaucaacaaggcugugaaugcccugauuaacgaucaacuuaucaugaagaaucaucugcgcgacauuaugggaaucccuuauugcaacuacuccaaauauuguuaccucaaucacacagucaccggcagaacaagccugccccggugcugucuggugucuaacgggagcuaccucaaugaaacccacuucuccgacgauaucgagcagcaggcugacaacaugauuacggagcugcuucaaaaggaauauauggaucgccagggaaaaacaccucugggccucguggaccuguuugucuucucuaccagcuuuuaccugaucuccauuuuccuucaccucguuaagaucccgacccauagacacgugauugggaaacccugcccuaagccccaucggcugaaucacaugggaaucuguagcugcggccuguauaaacacccuggcgugcccgucaaguggaagcgcugaggacuaguuauaagacugacuagcccgaugggccucccaacgggcccuccuccccuccuugcaccgagauuaaucaaaggcucuuuucagagccaccaaaaaaaaaaaaaaaaaaaaaaaaaaaaaaaaaaaaaaaaaaaaaaaaaaaaaaaaaaaaaaaaagaauu

SEQ ID NO: 39636 - RNA, 1655 nt, Artificial Sequence
  mRNA product Design i-3 (hSL-A64-N5) comprising derived and/or modified sequence from LASV(LASV035-NIG-2009;Clade II)__AIT17588__GPCmut11 (opt5)
aggagaaagcuuaccaugggccagaucauuaccuucuuucaagaggugccccacgucaucgaagagguuaugaacauugugcugaucgcccucagccugcuugcuauucugaaggggaucuacaauguggccacaugcggacucuucggccuggucuccuuucuucugcucugugggagaucuugcagcacgaccuauaaaggaguguacgaacugcagacacuggagcucgacauggcgucccugaacaugaccaugccucuuucuuguacaaagaauaacagccaucacuauaucaugguuggcaaugaaaccgggcuggagcucacacugaccaacacguccauuaucaaucauaaauucugcaaccuuucugaugcucacaagaaaaaucuguacgaccaugcccucaugagcauuaucuccaccuuucaccugagcauuccgaacuucaaucaguaugaggccaugucuugugauuuuaacggaggcaagaucuccgugcaguacaaucugagccacgcuuaugccgucgacgcugccaaccauugcggcacaauugcgaauggggugcuccaaaccuucaugcggauggccuggggaggcucuuacaucgcucuggauuccgggaagggaagcugggacuguaucaugacaucuuaccaguaucuuauuauccagaacaccacgugggaagaucacugccaguuuucccgccccagcccuauuggcuaccuggggcuccugucccaaagaacacgggacaucuauauuucucgcagacuucugggaaccuucacauggacccucagcgauuccgagggcaacgaaacccccggcggguacugucugacacgguggaugcugaucgaggccgagcucaaaugcuuuggaaauacggcuguugccaaguguaacgaaaaacaugacgaggaguucugcgauaugcugcgccuuuuugacuucaauaagcaggcgaucagacggcugaaagccgaagcucagaugagcauucagcucaucaacaaggccgugaaugcucugauuaacgaucaacuuaucaugaagaaucaucugcgcgacauuaugggcaucccuuauugcaacuacucuaaauauuguuaccucaaucacaccgucacagggaagaccucccugcccagaugcugucuggugagcaacggaucuuaccucaaugaaacacacuucagcgacgauaucgagcagcaggccgacaacaugauuaccgagcugcuucaaaaagaauauaucgaucggcagggcaagacgccucuggggcucguggaccuguuugucuucuccacaucuuuuuaccugauuagcaucuuccuucaccucguuaaaauuccgacccaucgccacgugaucggaaagcccugcccuaaaccccauagacugaaucacaugggcauuuguuccugcggccuguauaagcacccuggggugcccgucaaguggaaacggugaggacuaguuauaagacugacuagcccgaugggccucccaacgggcccuccuccccuccuugcaccgagauuaaucaaaggcucuuuucagagccaccaaaaaaaaaaaaaaaaaaaaaaaaaaaaaaaaaaaaaaaaaaaaaaaaaaaaaaaaaaaaaaaaagaauu

SEQ ID NO: 39637 - RNA, 1655 nt, Artificial Sequence
  mRNA product Design i-3 (hSL-A64-N5) comprising derived and/or modified sequence from LASV(LASV1000-NIG-2009;Clade II)__AIT17782__GPCmut11 (opt5)
aggagaaagcuuaccaugggccagaucauuaccuucuuucaagaggugccccacgucaucgaagagguuaugaacauugugcugaucgcccucagccugcuugcuauucugaaggggaucuacaauguggccacaugcggacucuucggccuggucuccuuucuucugcucugugggagaucuugcagcacgaccuauaaaggaguguacgaacugcagacacuggagcucgacauggcgucccugaacaugaccaugccucuuucuuguacaaagaauaacagccaucacuauaucaugguuggcaaugaaaccgggcuggagcucacacugaccaacacguccauuaucaaucauaaauucugcaaccuuucugaugcucacaagaaaaaucuguacgaccaugcccucaugagcauuaucuccaccuuucaccugagcauuccgaacuucaaucaguaugaggccaugucuugugauuuuaacggaggcaagaucuccgugcaguacaaucugagccacacauaugcugucgacgccgcuaaccauugcggcaccauugccaauggggugcuccaaacauucaugcggauggcguggggaggcucuuacaucgcccuggauuccgggaagggaagcugggacuguaucaugaccucuuaccaguaucuuauuauccagaacacgacaugggaagaucacugccaguuuucccgccccagcccuauuggcuaccuggggcuccugucccaaagaacccgggacaucuauauuucucgcagacuucugggaacauucaccuggacccucagcgauuccgagggcaacgaaacacccggcggguacugucugacgcgguggaugcugaucgaggcugagcucaaaugcuuuggaaauaccgccguugcuaaguguaacgaaaaacaugacgaggaguucugcgauaugcugcgccuuuuugacuucaauaagcaggccaucaaaagacugaagacagaagcgcagaugagcauucagcucaucaacaaggccgugaaugcucugauuaacgaucaacuuaucaugaaaaaucaucugcgggacauuaugggcaucccuuauugcaacuacucuaaguauuguuaccucaaucacaccgucacagggaaaaccucccugccccgcugcugucuggugagcaacggaucuuaccucaaugaaacgcacuucagcgacgauaucgagcagcaggccgacaacaugauuacagagcugcuucaaaaggaauauaucgauagacagggcaaaaccccucuggggcucguggaccuguuugucuucuccaccucuuuuuaccugauuagcaucuuccuucaccucguuaagauuccgacacaucggcacguggugggaaaacccugcccuaagccccaucgccugaaucacaugggcaucuguuccugcggccuguauaagcacccugggguccccgugaaauggaagagaugaggacuaguuauaagacugacuagcccgaugggccucccaacgggcccuccuccccuccuugcaccgagauuaaucaaaggcucuuuucagagccaccaaaaaaaaaaaaaaaaaaaaaaaaaaaaaaaaaaaaaaaaaaaaaaaaaaaaaaaaaaaaaaaaagaauu

SEQ ID NO: 39638 - RNA, 1655 nt, Artificial Sequence
  mRNA product Design i-3 (hSL-A64-N5) comprising derived and/or modified sequence from LASV(LASV221-NIG-2010;Clade II)__AIT17624__GPCmut11 (opt5)
aggagaaagcuuaccaugggccagaucauuaccuucuuucaagaggugccccacgucaucgaagagguuaugaacauugugcugaucgcccucagccugcuugcuauucugaaggggaucuacaauguggccacaugcggacucuucggccuggucuccuuucuucugcucugugggagaucuugcagcacgaccuauaaaggaguguacgaacugcagacacuggagcucgacauggcgucccugaacaugaccaugccucuuucuuguacaaagaauaacagccaucacuauaucaugguuggcaaugaaaccgggcuggagcucacacugaccaacacguccauuaucaaucauaaauucugcaaccuuucugaugcucacaagaaaaaucuguacgaccaugcccucaugagcauuaucuccaccuuucaccugagcauuccgaacuucaaucaguaugaggccaugucuugugauuuuaacggaggcaagaucuccgugcaguacaaucugagccacacauaugcuauugacgccgcuaaccauugcggcaccaucgccaaugggguccuccaaacauucaugcggauggcguggggaggcucuuacaucgcccuggauuccgggaagggaagcugggacuguauuaugaccucuuaccaguaucuuaucauucagaacacgacaugggaagaucacugccaguuuucccgccccagcccuaucggcuaccuggggcuccugucccaaagaacccgggacauuuauaucucucgcagacuucugggaacauucaccuggacccucagcgauuccgagggcaacgaaacacccggcggguacugucugacgcgguggaugcugaucgaggcugagcucaaaugcuuuggaaauaccgccguggcuaaguguaacgaaaaacaugacgaggaguucugcgauaugcugcgccuuuuugacuucaauaagcaggccauuagacggcugaaaacagaagcgcagaugagcauccagcucauuaacaaggccguuaaugcucugaucaacgaucaacuuauuaugaagaaucaucugcgcgacaucaugggcaucccuuauugcaacuacucuaaauauuguuaccucaaucacaccgugacagggaagaccucccugcccagaugcugucuggucagcaacggaucuuaccucaaugaaacgcacuucagcgacgauauugagcagcaggccgacaacaugaucacagagaugcugcaaaaagaauauauggaucggcagggcaagaccccucuugggcugguggaccucuuuguguucuccaccucuuuuuaccugauuagcaucuuccugcaccuugucaaaauuccgacacaucgccacguuaucggaaagcccugcccuaaaccccauagacucaaucacaugggcauuuguuccugcggccuguauaagcacccuggggugcccgugaaguggaaacggugaggacuaguuauaagacugacuagcccgaugggccucccaacgggcccuccuccccuccuugcaccgagauuaaucaaaggcucuuuucagagccaccaaaaaaaaaaaaaaaaaaaaaaaaaaaaaaaaaaaaaaaaaaaaaaaaaaaaaaaaaaaaaaaaagaauu

SEQ ID NO: 39639 - RNA, 1655 nt, Artificial Sequence
  mRNA product Design i-3 (hSL-A64-N5) comprising derived and/or modified sequence from LASV(LASV237-NIG-2010;Clade II)__AIT17638__GPCmut11 (opt5)
aggagaaagcuuaccaugggccagaucauuaccuucuuucaagaggugccccacgucaucgaagagguuaugaacauugugcugaucgcccucagccugcuugcuauucugaaggggaucuacaauguggccacaugcggacucuucggccuggucuccuuucuucugcucugugggagaucuugcagcacgaccuauaaaggaguguacgaacugcagacacuggagcucgacauggcgucccugaacaugaccaugccucuuucuuguacaaagaauaacagccaucacuauaucaugguuggcaaugaaaccgggcuggagcucacacugaccaacacguccauuaucaaucauaaauucugcaaccuuucugaugcucacaagaaagaccuguacgaucaugcccucaugagcauuaucuccaccuuucaccugagcauuccgaauuucaaccaguaugaggccaugucuugugacuuuaauggaggcaagaucuccgugcaguacaaccugagccacacauaugcugucgaugccgcuaaucauugcggcaccauugccaacggggugcuccaaacauucaugcggauggcguggggaggcucuuacaucgcccuggacuccgggaagggaagcugggauuguaucaugaccucuuaccaguaucuuauuauccagaauacgacaugggaagaccacugccaguuuucccgccccagcccuauuggcuaccuggggcuccugucccaaagaacccgggauaucuauauuucucgcagacuucugggaacauucaccuggacccucagcgacuccgagggcaacgaaacacccggcggguacugucugacgcgguggaugcugaucgaggcugagcucaaaugcuuuggaaacaccgccguugcuaaguguaaugaaaaacaugaugaggaguucugcgacaugcugcgccuuuuugauuucaacaagcaggccaucagacggcugaaaacagaagcgcagaugagcauucagcucaucaauaaggccgugaacgcucugauuaaugaccaacuuaucaugaagaaccaucugcgcgacauuaugggcaucccuuauugcaauuacucuaaauauuguuaccucaaccacaccgucacagggaagaccucccugcccagaugcugucuggugagcaauggaucuuaccucaacgaaacgcacuucagcgaugacaucgagcagcaggccgauaauaugauuacagagcugcuucaaaaagaauauauggaccggcagggcaagaccccucuggggcucguggaucuguuugucuucuccaccucuuuuuaccugaucagcauuuuccuucaccucaucaaaauuccgacacaucgccacaucaccggaaagcccugcccuaaaccccauagacugaaccacaugggcauuuguuccugcggccuguauaagcacccugggguucccgugaaguggaaacggugaggacuaguuauaagacugacuagcccgaugggccucccaacgggcccuccuccccuccuugcaccgagauuaaucaaaggcucuuuucagagccaccaaaaaaaaaaaaaaaaaaaaaaaaaaaaaaaaaaaaaaaaaaaaaaaaaaaaaaaaaaaaaaaaagaauu

SEQ ID NO: 39640 - RNA, 1655 nt, Artificial Sequence
  mRNA product Design i-3 (hSL-A64-N5) comprising derived and/or modified sequence from LASV(LASV253-NIG-2011;Clade II)__AIT17670__GPCmut11 (opt5)
aggagaaagcuuaccaugggccagaucauuaccuucuuucaagaggugccccacgucaucgaagagguuaugaacauugugcugaucgcccucagccugcuugcuauucugaaggggaucuacaauguggccacaugcggacucuucggccuggucuccuuucuucugcucugugggagaucuugcagcacgaccuauaaaggaguguacgaacugcagacacuggagcucgacauggcgucccugaacaugaccaugccucuuucuuguacaaagaauaacagccaucacuauaucaugguuggcaaugaaaccgggcuggagcucacacugaccaacacguccauuaucaaucauaaauucugcaaccuuucugaugcucacaagaaaaaucuguacgaccaugcccucaugagcauuaucuccaccuuucaccugagcauuccgaacuucaaucaguaugaggccaugucuugugauuuuaacggaggcaagaucuccgugcaguacaaucugagccacacauaugcugucgacgccgcuaaccauugcggcaccauugccaauggggugcuccaaacauucaugcggauggcguggggaggcucuuacaucgcccuggauuccgggaagggaagcugggacuguaucaugaccucuuaccaguaucuuauuauccagaacacgacaugggaagaucacugccaguuuucccgccccagcccuauuggcuaccuggggcuccugucccaaagaacccgggacaucuauauuucucgcagacuucugggaacauucaccuggacccucagcgauuccgagggcaacgaaacacccggcggguacugucugacgcgguggaugcugaucgaggcugagcucaaaugcuuuggaaauaccgccguugcuaaguguaacgaaaaacaugacgaggaguucugcgauaugcugcgccuuuuugacuucaauaagcaggccaucagacggcugaaagcggaagcccagaugagcauucagcucaucaacaaggcugugaaugcccugauuaacgaucaacuuaucaugaagaaucaucugcgcgacauuaugggcaucccuuauugcaacuacucuaaauauuguuaccucaaucacacagucaccgggagaacaucccugccccggugcugucuggugagcaacggaucuuaccucaaugaaacccacuucagcgacgauaucgagcagcaggcugacaacaugauuacggagcugcuucaaaaggaauauaucgaucgccagggcaaaacaccucuggggcucguggaccuguuugucuucuccaccucuuuuuaccugauuagcaucuuccuucaccucguuaagauuccgacccauagacacaucauuggaaaacccugcccuaagccccaucggcugaaucacaugggcaucuguuccugcggccuguauaaacacccuggggugcccgugaaguggaagcgcugaggacuaguuauaagacugacuagcccgaugggccucccaacgggcccuccuccccuccuugcaccgagauuaaucaaaggcucuuuucagagccaccaaaaaaaaaaaaaaaaaaaaaaaaaaaaaaaaaaaaaaaaaaaaaaaaaaaaaaaaaaaaaaaaagaauu

SEQ ID NO: 39641 - RNA, 1655 nt, Artificial Sequence
  mRNA product Design i-3 (hSL-A64-N5) comprising derived and/or modified sequence from LASV(LASV254-NIG-2011;Clade II)__AIT17674__GPCmut11 (opt5)
aggagaaagcuuaccaugggccagaucauuaccuucuuucaagaggugccccacgucaucgaagagguuaugaacauugugcugaucgcccucagccugcuugcuauucugaaggggaucuacaauguggccacaugcggacucuucggccuggucuccuuucuucugcucugugggagaucuugcagcacgaccuauaaaggaguguacgaacugcagacacuggagcucgacaugaccaaccugaauaugacaaugccucuuuccuguaccaagaacaauucucaucacuauaucaugguuggcaacgaaacagggcuggagcucacccugacgaauaccagcauuaucaaccauaaauucugcaaucuuuccgaugcgcacaagaaaaaccuguacaaucaugcucucaugucuauuaucagcacauuucaccuguccauuccgaacuucaaucaguaugaggccaugagcugugacuuuaacggaggcaagaucucugugcaguacaaucugucccacagcuaugccgucgaugcugccaaccauugcggcaccauugcuaacggggugcuccaaacauucaugcggauggccuggggaggcucuuacaucgcgcuggacuccgggaagggaaauugggauuguaucaugaccagcuaccaguaucuuauuauccagaacacgacaugggaagaccacugccaguuuucucgccccuccccuauuggcuaccuggggcuccugagccaaagaacccgggauaucuauauuucccgcagacuucugggaacauucaccuggacccucucugacagcgagggcaaugaaacacccggcggguacugucugacgcgguggaugcugaucgaggccgagcucaaaugcuuuggaaacaccgcuguugccaaguguaaugaaaaacaugaugaggaguucugcgacaugcugcgccuuuuugauuucaacaagcaggcuaucagacggcugaaaacagaagcccaggcgaauauucagcucaucaacaaggccgugaaugcucugauuaacgaccaacuuaucaugaagaaucaucugcgcgauauuaugggcaucccuuauugcaacuacuccaaauauuguuaccucaaucacaccgucacagggaagaccagccugcccagaugcugucuggugucuaacggauccuaccucaaugaaacgcacuucagcgacgacaucgagcagcaggccgauaacaugauuacagagcugcuucaaaaagaauauauggaccggcagggcaagaccccucuggggcucguggaucuguuugucuucucuaccagcuuuuaccugaucuccauuuuccuucaccucguuaaaaucccgacacaucgccacgugauuggaaagcccugcccuaaaccccauagacugaaccacaugggcaucuguucuugcggccuguauaagcacccuggggugcccgucaaguggaaacggugaggacuaguuauaagacugacuagcccgaugggccucccaacgggcccuccuccccuccuugcaccgagauuaaucaaaggcucuuuucagagccaccaaaaaaaaaaaaaaaaaaaaaaaaaaaaaaaaaaaaaaaaaaaaaaaaaaaaaaaaaaaaaaaaagaauu

SEQ ID NO: 39642 - RNA, 1655 nt, Artificial Sequence
  mRNA product Design i-3 (hSL-A64-N5) comprising derived and/or modified sequence from LASV(Nig08-A19;Clade III)__ADU56618__GPCmut11 (opt5)
aggagaaagcuuaccaugggccagaucgugaccuucuuucaagaggucccccacguuauugaagaggugaugaacaucgugcugauugcccucagcauccuggcuauucuuaaggggcuguacaauaucgccacaugcggacucaucggccuggucacguuccuucugcucuccgggagaucuuguagcaugaccuauaaaggaguguacgaacugcagacacuggagcucaacaugaauacccugaacaugacaaugccucuuuccugcaccaagaauaacucucaucacuauauuaugguuggcaaugaaacagggcuggagcucacccugacgaacaccagccuucugcaucacaaauuuuguaaucucuccgacgcgcauaagaaaaaccuguacgaucacacacugaugucuaucauuagcaccuuccaccucuccaucccgaauuuuaaccaguaugaggcuaugagcugcgacuucaauggaggcaagauuacagugcaguacaaccugucucauuccuaugccaucgaugccgcuaaucacuguggcaccgucgccaacggggugcuucaaacguuuaugcggauggcuuggggaggcagcuacauugcccuggacucugggcgcggaaagugggauugcaucaugacauccuaccaguaucucaucauucagaacaccacaugggaagaccauugucaguucagcagacccucuccuaucggcuaccuggggcuucugucccaacggacccgcgauauuuauaucagcagacggcuccugggaaccuuuacauggacgcuguccgacucugagggcaaugaaacccccggcggguacugccucacacgcuggaugcugauugaggcggagcuuaaauguuucggaaacaccgccguugcuaagugcaaugaaaaacacgaugaggaauuuugugacaugcugagacucuucgauuuuaacaagcaggccauccggcgccugaaagcugaggcccagaugagcauccagcuuauuaauaaggcggugaacgcccugaucaaugaccaacucauuaugaagaaccaccugagagauaucaugggcauuccuuauugcaauuacuccaaauauugcuaccugaaccauacaagcaccgggcggacgucucucccccgcuguugccuggucuccaauggaagcuaccuuaacgaaacacacuucucugacgacaucgagcagcaggcugauaauaugaucaccgagaugcugcaaaaggaauaucucgacagacagggcaaaaccccucuggggcugguggaucuuuucguguuuagcacauccuucuaccucauuucuaucuuucugcaucuggucaagauuccgacccaccggcauaucguuggaaaacccuguccuaagccccaccgccucaaccacaugggcauuugcagcuguggccuguauaaacagccuggggugcccgugagauggaagcggugaggacuaguuauaagacugacuagcccgaugggccucccaacgggcccuccuccccuccuugcaccgagauuaaucaaaggcucuuuucagagccaccaaaaaaaaaaaaaaaaaaaaaaaaaaaaaaaaaaaaaaaaaaaaaaaaaaaaaaaaaaaaaaaaagaauu

SEQ ID NO: 39643 - RNA, 1658 nt, Artificial Sequence
  mRNA product Design i-3 (hSL-A64-N5) comprising derived and/or modified sequence from LASV(G1180-SLE-2010;Clade IV)__AIT17168__GPCmut11 (opt5)
aggagaaagcuuaccaugggccagaucgugaccuucuuucaagaggucccccacguuauugaagaggugaugaacaucgugcugauugcccucagcauccuggcuguccuuaaggggcuguacaauuucgccacaugcggacucgugggccugcuuacguuucugcuccugugugggagauccugcaccgcgucucgguauaaaggaguuuacgaacugcagacacucgagcugaacauggaaacccuuaauaugacaaugccucugagcuguaccaagaacaauucccaucacuauauuauggugggcaacgagacagggcucgagcugacccuuacgaauaccucuaucaucaaccauaaauucugcaaucugagcgacgcucacaagaaaaaccucuacgaucaugcccugauguccauuaucucuacauuucaccugagcauuccgaauuucaaccaguaugaagccauguccugugacuuuaauggaggcaagaucagcguccaguacaaccucucucacuccuaugcuggcgaugccgcuaaucauugcgggaccguggccaacggaguucugcaaacauucaugcgcauggcguggggcgggagcuacauugcccuugacucuggacacggcuccugggauuguaucaugaccagcuaccaguaucugauuauccagaacacgacaugggaggaccauugccaguuuucuagacccuccccuaucggguaccucggacugcuuagccaacggacccgcgauauuuauaucuccagacggcugcucggcacauucaccuggacccugucugacagcgaaggcaaggauacacccgggggauacugucugacgcgcuggaugcucauugaggcugagcugaaaugcuuuggcaauaccgccguggcuaaguguaacgaaaaacacgacgaggaguucugcgauaugcuuagacuguuugacuucaauaagcaggccauccagcggcucaaagcggaagcccagauguccauucaacugaucaacaaggcugucaaugcccuuaucaacgaucagcugauuaugaagaaucaccuccgcgacaucauggggauuccuuauugcaacuacagcaaauauuguuaccugaaucauacaaccacaggaaagaccucucugcccaaaugcugucucguguccaacggcagcuaccugaaugaaacgcacuucucugacgauaucgagcagcaagcugacaacaugauuacagagaugcuucagaaggaauauauggagagacaggggaaaaccccucugggacucguggaucuguuugucuucagcaccuccuuuuaccugaucucuaucuuccuucaucucguuaagauuccgacacaccggcauaucgugggcaaaagcugccccaagccucaccgccugaaucacaugggcauuuguuccugcgggcuguauaagcagcccggagugccugucaaauggaagagaugaggacuaguuauaagacugacuagcccgaugggccucccaacgggcccuccuccccuccuugcaccgagauuaaucaaaggcucuuuucagagccaccaaaaaaaaaaaaaaaaaaaaaaaaaaaaaaaaaaaaaaaaaaaaaaaaaaaaaaaaaaaaaaaaagaauu

SEQ ID NO: 39644 - RNA, 1658 nt, Artificial Sequence
  mRNA product Design i-3 (hSL-A64-N5) comprising derived and/or modified sequence from LASV(G1442-SLE-2011;Clade IV)__AIT17180__GPCmut11 (opt5)
aggagaaagcuuaccaugggccagaucgugaccuucuuucaagaggucccccacguuauugaagaggugaugaacaucgugcugauugcccucagcauccuggcuguccuuaaggggcuguacaauguggccacaugcggacucauuggccugguuacguuccuucugcucugugggagauccugcaccacaacccuguauaaaggaguguacgaacugcagacacucgagcugaacauggaaacccuuaauaugacaaugccucugucuuguaccaagaacaauagccaucacuauauccgggucggcaacgagacggggcucgagcugacccuuacaaauaccuccaucauuaaccauaaauuuugcaaucugucugacgcgcacaagaaaaaccucuacgaucaugcucugaugagcaucauuuccacauuccaccugucuaucccgaauuuuaaccaguaugaagccaugagcugugacuucaauggaggcaagauuuccgugcaguacaaccucagccacucuuaugccggcgaugcugccaaucauugcgggaccguugcuaacggagugcugcaaacguuuaugcgcauggccuggggcggguccuacaucgcgcuugacagcggaagaggcaacugggauuguauuaugacaucuuaccaguaucugaucauccagaauaccacaugggacgaucacugccaguucucccggcccagcccuauuggguaccucggacugcuuucucaacgcaccagagacgucuauaucucccggcgccugcucggcaccuuuacauggacgcugagcgauuccgagggcaaggacacccccgggggauacugucugacaagauggaugcucauugaagccgagcugaaaugcuucggcaacaccgcuguggccaaguguaaugagaaacaugaugaagaguuuugcgacaugcuucggcuguucgauuuuaacaagcaggcuauccagcgccucaaagccgaagcgcagaugucuauucaacugaucaauaaggccgugaacgcucuuaucaaugaccagcugauuaugaagaaccaccucagagacaucauggggauuccuuauugcaauuacagcaaauauuguuaccugaacaauacagccaccggaaagacgucccugcccaaaugcugucucaucagcaacggcucuuaccugaaugagacacacuucuccgaugacauugaacaggaggcugauaacaugaucaccgagaugcuucaaaaggaauauauggagcggcaggggaaaaccccucugggacucgucgaccuguucguuuuuagcacaucuuucuaccugaucagcauuuuucuucaucucgugaagaucccgacccaccgccauauugugggcaaauccugccccaagccucacagacugaaucauaugggcaucuguucuugcgggcuguauaagcagcccggagucccugugcgguggaaacgcugaggacuaguuauaagacugacuagcccgaugggccucccaacgggcccuccuccccuccuugcaccgagauuaaucaaaggcucuuuucagagccaccaaaaaaaaaaaaaaaaaaaaaaaaaaaaaaaaaaaaaaaaaaaaaaaaaaaaaaaaaaaaaaaaagaauu

SEQ ID NO: 39645 - RNA, 1658 nt, Artificial Sequence
  mRNA product Design i-3 (hSL-A64-N5) comprising derived and/or modified sequence from LASV(G3010-SLE-2013;Clade IV)__AIT17344__GPCmut11 (opt5)
aggagaaagcuuaccaugggccagaucgugaccuucuuucaagaggucccccacguuauugaagaggugaugaacaucgugcugauugcccucagcauccuggcuguccuuaaggggcuguacaauuucgccacaugcggacucgugggccugguuacguuucuucugcucugugggagauccugcaccacaucucuguauaaaggaguguacgaacugcagacccucgagcugaacauggaaacacuuaauaugaccaugccucugagcuguacaaagaacaauucccaucacuauauuauggucggcaacgagaccgggcucgagcugacgcuuaccaauacaucuaucaucaaccauaaauucugcaaucugagcgacgcgcacaagaaaaaccucuacaaucaugcucugauguccauuaucucuaccuuucaccugagcauuccgaacuucaaucaguaugaagccauguccugugauuuuaacggaggcaagaucagcgugcaguacaaucucucucacuccuaugccggcgacgcugccagccauugcgggacaguugcuaacggagugcugcaaaccuucaugcggauggccuggggcgggucuuacauugcgcuugauuccggauacggcaagugggacuguaucaugacgagcuaucaguaccugauuauccagaacacaaccugggaggaucacugccaguuuucucgccccuccccuaucggguaucucggacugcuuagccaaagaacacgggacauuuacaucucccgcagacugcucggcaccuucaccuggacacugucugauagcgaaggcaaagacacgcccgggggauauugucugacccgguggaugcucauugaggccgagcugaagugcuuuggcaauacagcugucgccaaauguaacgaaaagcaugaugaggaguucugcgacaugcuucgccuguuugauuucaauaaacaggcuauccagagacucaagaccgaagcccagauguccauucaacugaucaacaaggcggugaaugcccuuaucaacgaccagcugauuaugaaaaaucaccuccgggauaucauggggauuccuuacugcaacuauagcaaguacuguuaccugaaucacacaaccacgggaaaaacaucucugcccaagugcugucucguguccaacggcagcuaucugaaugaaacccauuucucugacgacaucgagcagcaagcugauaacaugauuaccgagaugcuucagaaagaauacauggagcgccaggggaagacaccucugggacucgucgaccuguuuguuuucagcaccuccuuuuaucugaucucuaucuuccuucaccucgugaaaauuccgacacauagacacaucgugggcaagagcugccccaagccucaucggcugaaucacaugggcauuuguuccugcgggcuguacaaacagcccggagucccugugcgcuggaagagaugaggacuaguuauaagacugacuagcccgaugggccucccaacgggcccuccuccccuccuugcaccgagauuaaucaaaggcucuuuucagagccaccaaaaaaaaaaaaaaaaaaaaaaaaaaaaaaaaaaaaaaaaaaaaaaaaaaaaaaaaaaaaaaaaagaauu

SEQ ID NO: 39646 - RNA, 1658 nt, Artificial Sequence
  mRNA product Design i-3 (hSL-A64-N5) comprising derived and/or modified sequence from LASV(G502-SLE-2009;Clade IV)__AIT17126__GPCmut11 (opt5)
aggagaaagcuuaccaugggccagaucgugaccuucuuucaagaggucccccacguuauugaagaggugaugaacaucgugcugauugcccucagcauccuggcuguccuuaaggggcuguacaauuucgccacaugcggacucgugggccugcuuacguuucugcuccugugugggagauccugcaccacaggacuguauaaaggcguuuacgaacuccagacccuggagcuuaacauggaaacacugaauaugaccaugccucucucuuguacaaagaacaauagccaucacuauauuaugguggggaacgagaccggacuggagcuuacgcugaccaauacauccaucaucaaccauaaauucugcaaucucucugacgcgcacaagaaaaaccuguacgaucaugcucugaugagcauuaucuccaccuuucaccucucuauuccgaauuucaaccaguaugaagccaugagcugugacuuuaauggcggcaagaucuccguccaguacaaccugagccacucuuaugccggggaugcugccgaccauugcggaacaguggcuaauggcguucuucaaaccuucaugcggauggccuggggaggguccuacauugcgcuggauagcggccgcgggagaugggacuguaucaugacgucuuaccaguaucucauuauccagaacacaaccugggaggaucacugccaguuuucccggcccagcccuaucggauaccugggccuucugucucaacgcacaagagacauuuauaucucccggcgccuccugggcaccuucaccuggacacugagcgauuccgaagggaaggacacgcccggaggcuacugucucaccagauggaugcugauugaggccgagcuuaaaugcuuugggaacacagcuguggccaaguguaaugaaaaacaugaugaggaguucugcgacaugcugcggcucuuugauuucaacaagcaggcuauccagcgccugaaagccgaagcgcagaugucuauucaacuuaucaauaaggccgucaacgcucugaucaaugaccagcucgugaugaagaaccaccugagagacauuaugggaaucccuuauugcaauuacagccgguauuguuaccugaaccacaccacaaccggccgcacgucccuccccaaaugcugucuggugagcaaugggucuuaccuuaacgaaacacauuucuccgaugacauugagcagcaagccgauaauaugaucaccgagaugcugcagaaggaauauauggagagacagggaaaaaccccucucggccuggucgaccuguuuguuuucagcacaucuuuuuaccuuauuagcaucuuccuccaccuggugaagaucccgacccaucggcacauugugggcaaauccugccccaagccucaucgccugaaccacauggggaucuguucuugcggacucuauaaacagcccggcgucccugugaaguggaagagaugaggacuaguuauaagacugacuagcccgaugggccucccaacgggcccuccuccccuccuugcaccgagauuaaucaaaggcucuuuucagagccaccaaaaaaaaaaaaaaaaaaaaaaaaaaaaaaaaaaaaaaaaaaaaaaaaaaaaaaaaaaaaaaaaagaauu

SEQ ID NO: 39647 - RNA, 1658 nt, Artificial Sequence
  mRNA product Design i-3 (hSL-A64-N5) comprising derived and/or modified sequence from LASV(G733-SLE-2010;Clade IV)__AIT17154__GPCmut11 (opt5)
aggagaaagcuuaccaugggccagaucgugaccuucuuucaagaggucccccacguuauugaagaggugaugaacaucgugcugauugcccucagcauccuggcuguccuuaaggggcuguacaauuucgccacaugcggaauugugggccucguuuccuuucugcuucugugugggagaucuugcacgaccagccucuauaaaggaguguacgaacugcagacacuggagcucaacauggaaacccugaauaugacaaugccucuuuccuguaccaagaacaauucucaucacuauaucauggucggcaacgagacagggcuggagcucacccugacgaauaccagcaucauuaaccauaaauucugcaaucuuuccgacgcgcacaagaaaaaccuguacgaucaugcucucaugucuaucauuagcacauuucaccuguccaucccgaauuucaaccaguaugaagccaugagcugugacuuuaauggaggcaagauuucugugcaguacaaccugucccacagcuaugccggcgaugcugccaaucauugcgggaccaucgcuaacggaguucuccaaacauucaugcggauggccuggggcgggucuuacauugcgcuggacuccggacgcgauagaugggacuguaucaugaccagcuaccaguaucuuaucauucagaacacgacaugggaggaucacugccaguuuucucggcccuccccuaucggcuaccuggggcuccugagccaacgcaccagagacauuuauaucucccggcgccuucugggaacauucaccuggacccucucugauagcgaaggcaaggacacacccggcggguacugucugacgagauggaugcugauugaggccgagcucaaaugcuuuggaaauaccgcuguggccaaguguaacgaaaaacaugaugaggaguucugcgacaugcugcggcuuuuugauuucaauaagcaggcuauccagcgccugaaagccgaagcgcagauguccauccaacucauuaacaaggccgucaaugcucugaucaacgaccagcuuauuaugaagaaucaccugagagacaucaugggcauuccuuauugcaacuacagcaaauauuguuaccucaaucacacaaccacagggaagaccucucugcccaaaugcugucugguguccaacggaagcuaccucaaugaaacgcauuucucugaugacaucgagcagcaagccgauaacaugaucacagagaugcugcagaaggaauauauggagcggcagggcaaaaccccucuugggcugguggaccucuuugucuucagcaccuccuuuuaccugauuucuaucuuccugcaccuuguuaagauuccgacacaucgccacguggugggaaaaagcugccccaagccucauagacucaaucacaugggcaucuguuccugcggccuguaugggcagcccggagucccugugaaguggaaacggugaggacuaguuauaagacugacuagcccgaugggccucccaacgggcccuccuccccuccuugcaccgagauuaaucaaaggcucuuuucagagccaccaaaaaaaaaaaaaaaaaaaaaaaaaaaaaaaaaaaaaaaaaaaaaaaaaaaaaaaaaaaaaaaaagaauu

SEQ ID NO: 39648 - RNA, 1658 nt, Artificial Sequence
  mRNA product Design i-3 (hSL-A64-N5) comprising derived and/or modified sequence from MOPV/LASV reassortant(IGS-1;Clade IV)__AFY05576__GPCmut11 (opt5)
aggagaaagcuuaccaugggccagaucgugaccuucuuucaagaggucccccacguuauugaagaggugaugaacaucgugcugauugcccucagcguccuggcugugcuuaaggggcuguacaauuucgccacaugcggacucguuggccuggugacguuucuucugcucugugggagauccugcaccacaucucuguauaaaggagucuacgaacugcagacccucgagcugaacauggaaacacuuaauaugaccaugccucugagcuguacaaagaacaauucccaucacuauaucauggugggcaacgagaccgggcucgagcugacgcuuaccaauacaucuauuaucaaccauaaauucugcaaucugagcgacgcgcacaagaaaaaccucuacgaucaugcucugauguccaucauuucuaccuuucaccugagcaucccgaauuucaaccaguaugaagccauguccugugacuuuaauggaggcaagauuagcguucaguacaaccucucucacuccuaugccggcgaugcugccaaucauugcgggacaguggcuaacggaguccugcaaaccuucaugcggauggccuggggcgggagcuacaucgcgcuugacucuggacgcggcaacugggauuguauuaugacguccuaccaguaucugaucauucagaauacaaccugggaggaccacugccaguuuagcagacccucuccuaucggguaccucggacugcuuucccaacggacacgcgauaucuauauuagcagacggcugcucggcaccuucaccuggacacuguccgacucugaaggcgaggauacgcccgggggauacugucugacccgcuggaugcucaucgaggccgaacugaagugcuuuggcaacacagcuguggccaaauguaaugagaagcaugacgaagaguucugcgauaugcuuagacuguuugacuucaacaaacaggcuauucagcggcucaaggccgaagcgcagaugagcauccaacugauuaauaaagccgugaacgcucuuaucaaugaucagcugaucaugaagaaccaccuccgcgacauuauggggaucccuuauugcaauuacuccaaguauuguuaccugaaccacaccacaaccggaagaacgagccugcccaaaugcugucucgucucuaauggcuccuaccugaacgagacacauuucagcgacgauauugagcagcaagccgacaauaugaucaccgaaaugcuucagaaggaguauauggaacggcaggggaaaaccccucugggacucguugaucuguuuguguucucuaccagcuuuuaccugauuuccaucuuccuucaccucgugaagaucccgacacaucgccacauugucggcaaaucuugccccaagccucauagacugaaccacaugggcaucuguagcugcgggcuguauaaacagcccggagugccuguuaaguggaagcggugaggacuaguuauaagacugacuagcccgaugggccucccaacgggcccuccuccccuccuugcaccgagauuaaucaaaggcucuuuucagagccaccaaaaaaaaaaaaaaaaaaaaaaaaaaaaaaaaaaaaaaaaaaaaaaaaaaaaaaaaaaaaaaaaagaauu

SEQ ID NO: 39649 - RNA, 1658 nt, Artificial Sequence
  mRNA product Design i-3 (hSL-A64-N5) comprising derived and/or modified sequence from LASV(LM765-SLE-2012;Clade IV)__AIT17814__GPCmut11 (opt5)
aggagaaagcuuaccaugggccagaucgugaccuucuuucaagaggucccccacguuauugaagaggugaugaacaucgugcugauugcccucagcauccuggcuguccuuaaggggcuguacaauuucgccacaugcggacucgugggccugguuacguuucuucugcucugugggagauccugcaccacaucucuguauaaaggaguguacgaacugcagacccucgagcugaacauggaaacacuuaauaugaccaugccucugagcuguacaaagaacaauucccaucacuauauuauggucggcaacgagaccgggcucgagcugacgcuuaccaauacaucuaucaucgaccauaaauucugcaaccugagcgaugcgcaccggaagaaucucuacgaccaugcucugauguccauuaucucuaccuuucaccugagcauuccgaacuucaaucaguaugaagccauguccugugauuuuaacggaggcaaaaucagcgugcaguacaaucucucucacuccuaugccaaggacgcugccgaucauugcggcacaguugcuaacggggugcugcaaaccuucaugcgcauggccuggggaggcagcuacauugcgcuugacucugggagaggacggugggauuguaucaugacguccuaccaguaucugauuauccagaauacaaccugggaggaccacugccaguuuagccgccccucuccuaucggcuaccucgggcugcuuucccaaagaacacgggauauuuauaucagccgcagacugcucggaaccuucaccuggacacuguccgacucugaaggcaaggauacgcccggcggguacugucugacccgguggaugcucauugaggccgagcugaaaugcuuuggaaacacagcugucgccaaguguaacgaaaaacaugacgaggaguucugcgauaugcuucgccuguuugacuucaauaagcaggcuauccagagacucaaagccgaagcgcagaugagcauucaacugaucaacaaggccgugaaugcucuuaucaacgaccagcugauuaugaagaaucaccuccgggauaucaugggcauuccuuauugcaacuacuccaaauauuguuaccugaaucacaccacaaccgggaagacgagccugcccaaaugcugucucgugucuaacggauccuaccugaaugaaacacauuucagcgacgauaucgagcagcaagccgacaacaugauuaccgagaugcuucagaaggaauauauggagcgccagggcaaaaccccucuggggcucgucgaucuguuuguuuucucuaccagcuuuuaccugaucuccaucuuccuucaccucgugaagauuccgacacauagacacaucgugggaaaacccugcccuaagccccaucggcugaaucacaugggcauuuguucuugcggccuguauaagcagccugggguccccgugaaauggaagcgcugaggacuaguuauaagacugacuagcccgaugggccucccaacgggcccuccuccccuccuugcaccgagauuaaucaaaggcucuuuucagagccaccaaaaaaaaaaaaaaaaaaaaaaaaaaaaaaaaaaaaaaaaaaaaaaaaaaaaaaaaaaaaaaaaagaauu

SEQ ID NO: 39650 - RNA, 1658 nt, Artificial Sequence
  mRNA product Design i-3 (hSL-A64-N5) comprising derived and/or modified sequence from LASV(LM776-SLE-2012;Clade IV)__AIT17824__GPCmut11 (opt5)
aggagaaagcuuaccaugggccagaucgugaccuucuuucaagaggucccccacguuauugaagaggugaugaacaucgugcugauugcccucagcauccuggcuguccuuaaggggcuguacaauuucgccacaugcggacucgugggccugguuacguuucuucugcucugugggagauccugcaccacaucuguguauaaaggagucuacgaacugcagacccuggagcucaacauggaaacacugaauaugaccaugccucuuagcuguacaaagaacaauucccaucacuauauuauggugggcaacgagaccgggcuggagcucacgcugaccaauacaucuaucaucaaccauaaauucugcaaucuuagcgacgcgcacaagaaaaaccuguacgaucaugcucucauguccauuaucucuaccuuucaccugagcauuccgaauuucaaccaguaugaagccauguccugugacuuuaauggaggcaagaucagcguucaguacaaccugucucacuccuaugccggcgaugcugccaaucauugcgggacaguggcuaacggaguccuccaaaccuucaugcggauggccuggggcgggagcuacauugcgcuggacucuggacacggcaagugggauuguaucaugacguccuaccaguaucuuauuauccagaacacaaccugggaggaccauugccaguuuagccgccccucuccuaucggguaccugggacuccugucccaaagaacacgggauauuuauaucagccgcagacuucugggcaccuucaccuggacacucuccgacucugaaggcaaagauacgcccgggggauacugucugacccgguggaugcugauugaggccgagcucaagugcuuuggcaauacagcuguggccaaauguaacgaaaagcacgacgaggaguucugcgauaugcugcgccuuuuugacuucaauaaacaggcuauccagagacugaaggccgaagcgcagaugagcauucaacucaucaacaaggccgugaaugcucugaucaacgaucagcuuauuaugaaaaaucaucugcgggacaucauggggauuccuuauugcaacuacuccaaguauuguuaccucaaucacaccacaaccggaaaaacgagccugcccaagugcugucuggucucuaacggcuccuaccucaaugaaacacacuucagcgacgauaucgagcagcaagccgacaacaugauuaccgagaugcugcagaaagaauauauggagcgccaggggaagaccccucuuggacugguugaucucuuuguguucucuaccagcuuuuaccugaucuccaucuuccugcaucuugugaaaauuccgacacacagacauaucgucggcaagucuugccccaagccucaccggcucaaucacaugggcauuuguagcugcgggcuguauaaacagcccggagugccuguucgcuggaagagaugaggacuaguuauaagacugacuagcccgaugggccucccaacgggcccuccuccccuccuugcaccgagauuaaucaaaggcucuuuucagagccaccaaaaaaaaaaaaaaaaaaaaaaaaaaaaaaaaaaaaaaaaaaaaaaaaaaaaaaaaaaaaaaaaagaauu

SEQ ID NO: 39651 - RNA, 1658 nt, Artificial Sequence
  mRNA product Design i-3 (hSL-A64-N5) comprising derived and/or modified sequence from LASV(Mad39;Clade IV)__ANH09722__GPCmut11 (opt5)
aggagaaagcuuaccaugggccagaucgugaccuucuuucaagaggucccccacguuauugaagaggugaugaacaucgugcugauugcccucagcauccuggcuguccuuaaggggcuguacaauguggccacaugcggacucauuggccugguuacguuccuucugcucugugggagauccugcaccacaacccuguauaaaggaguguacgaacugcaggcgcucgagcugaacauggaaacacuuaauaugaccaugccucugucuuguacaaagaacaauagccaucacuauauccgggucggcaacgagaccgggcucgagcugacgcuuaccaauacaucccugaucaaccauaaauuuugcaaucucucugacgcucacaagaaaaaccuguacgaucaugcccugaugagcauuaucuccaccuuccaccucucuauuccgaauuuuaaccaguaugaagccaugagcugugacuucaaugauggaaagaucuccgugcaguacaaccugagccacacauaugcuggcgacaccgccaaucauugcggcacgguugcuaacggggugcuucaaacauuuaugcgcauggccuggggaggcucuuacauugcgcuggauuccgggagaggaggcugggacuguaucaugaccagcuaccaguaucucauuauccagaacacaaccugggaggaucacugccaguucucucggcccuccccuaucggguaccugggacuucugagccaacgcaccagagacauuuauaucucucggcgccuccugggcacauuuacguggacccuguccgauagcgaaggcaaggacacacccgggggauacugucucaccagauggaugcugauugaggccgagcuuaaaugcuucggcaauacagcugucgccaaguguaacgaaaaacaugaugaggaauuuugcgacaugcugcgccucuucgauuuuaauaagcaggcuauccagcggcugaaagccgaggcgcagauguccauucaacuuaucaacaaggccgugaaugcucugaucaacgaccagcucauuaugaagaaucaccugagagacaucauggggauuccuuauugcaacuacucuaaauauuguuaccugaaucacaccgugacgggaaagacaagccuccccaaaugcugucuggucuccaacggcagcuaccuuaaugaaacccauuucucugaugacaucgagcagcaagccgauaacaugauuaccgagaugcugcagaaggaauauauggagcggcaggggaaaacaccucucggacugguugaccuguucguguuuuccaccagcuucuaccuuaucucuaucuuucuccaccuggugaagauuccgacacaucgccacgucgugggcaaacccugcccuaagccccauagacugaaucacaugggcaucuguagcugcggguucuauaagcagccuggaguucccgugcgguggaaacgcugaggacuaguuauaagacugacuagcccgaugggccucccaacgggcccuccuccccuccuugcaccgagauuaaucaaaggcucuuuucagagccaccaaaaaaaaaaaaaaaaaaaaaaaaaaaaaaaaaaaaaaaaaaaaaaaaaaaaaaaaaaaaaaaaagaauu

SEQ ID NO: 39652 - RNA, 1658 nt, Artificial Sequence
  mRNA product Design i-3 (hSL-A64-N5) comprising derived and/or modified sequence from LASV(Z0947-SLE-2011;Clade IV)__AIT17840__GPCmut11 (opt5)
aggagaaagcuuaccaugggccagaucgugaccuucuuucaagaggucccccacguuauugaagaggugaugaacaucgugcugauugcccucagcauccuggcuguccuuaaggggcuguacaauuucgccacaugcggacucgugggccugguuacguuucuucugcucugugggagauccugcaccauuucucuguauaaaggaguguacgaacugcagacacucgagcugaacauggaaacccuuaauaugacaaugccucugagcuguaccaagaacaauucccaucacuauaucauggucggcaacgagacagggcucgagcugacccuuacgaauaccucuaucauuaaccauaaauucugcaaucugagcgacgcgcacaagaaaaaccucuacgaucaugcucugauguccaucauuucuacauuucaccugagcaucccgaauuucaaccaguaugaagccauguccugugacuuuaauggaggcaagauuagcgugcaguacaaccucucucacuccuaugccggcgaugcugccaaucauugcgggaccguugcuaacggagugcugcaaacauucaugcggauggccuggggcgggagcuacaucgcgcuugacucuggacgcgauagaugggacuguauuaugaccuccuaccaguaucugaucauccagaacacgacaugggaggaucacugccaguuuagccggcccucuccuauuggcuaccucgggcugcuuucccaacgcaccagagacaucuauauuagccggcgccugcucggaacauucaccuggacccuguccgauucugaaggcaaggacacacccggcggguacugucugacgagauggaugcucaucgaggccgagcugaaaugcuuuggaaauaccgcugucgccaaguguaacgaaaaacaugaugaggaguucugcgacaugcuucggcuguuugauuucaauaagcaggcuauucagcgccucaaagccgaagcgcagaugagcauccaacugaucaacaaggccgugaaugcucuuauuaacgaccagcugaucaugaagaaucaccucagagacauuaugggcaucccuuauugcaacuacuccaaauauuguuaccugaaucacacaaccacagggaagaccagccugcccaaaugcugucucgugucuaacggauccuaccugaaugaaacgcauuucagcgaugacauugagcagcaagccgauaacaugaucacagagaugcuucagaaggaauauauggagcggcagggcaaaaccccucuggggcucgucgaccuguuuguuuucucuaccagcuuuuaccugaucuccauuuuccuucaccucgugaagaucccgacacaucgccacauugugggaaaacccugcccuaagccccauagacugaaucacaugggcaucuguucuugcggccuguauaagcagccugggguccccgugaaauggaagcggugaggacuaguuauaagacugacuagcccgaugggccucccaacgggcccuccuccccuccuugcaccgagauuaaucaaaggcucuuuucagagccaccaaaaaaaaaaaaaaaaaaaaaaaaaaaaaaaaaaaaaaaaaaaaaaaaaaaaaaaaaaaaaaaaagaauu

SEQ ID NO: 39653 - RNA, 1689 nt, Artificial Sequence
  mRNA product Design i-3 (hSL-A100) comprising derived and/or modified sequence from LASV(Josiah;Clade IV)__NP_694870__GPCmut11 (opt1)
aggagaaagcuuaccaugggccagaucgugaccuucuuccaggaggucccccacgugaucgaggaggugaugaacaucguccugaucgcccucagcgugcuggccgugcugaaggggcucuacaacuucgcgaccugcggccuggucgggcuggugacguuccuccugcugugcggccgcuccugcaccaccagccucuacaaggggguguacgagcugcagacccuggagcucaacauggagacgcugaacaugaccaugccgcuguccugcaccaagaacaacagccaccacuacaucauggucggcaacgagaccggccucgagcugacgcugaccaacaccuccaucaucaaccacaaguucugcaaccucagcgacgcccacaagaagaaccuguacgaccacgcccugauguccaucaucagcaccuuccaccucuccauccccaacuucaaccaguacgaggccaugagcugcgacuucaacgggggcaagaucuccgugcaguacaaccugagccacuccuacgccggggacgcggccaaccacugcggcacgguggccaacgggguccugcagaccuucaugcggauggccuggggcggcagcuacaucgcgcucgacuccgggcgcggcaacugggacugcaucaugaccagcuaccaguaccugaucauccagaacaccacgugggaggaccacugccaguucucccggcccagccccaucggguaccugggccuccugucccagcgcacccgggacaucuacaucagccgccggcugcucggcaccuucaccuggacgcugagcgacuccgaggggaaggacaccccgggcggguacugccugacccgcuggaugcucaucgaggccgagcugaagugcuucggcaacaccgccguggccaagugcaacgagaagcacgacgaggaguucugcgacaugcugcggcuguucgacuucaacaagcaggccauccagcgccugaaggcggaggcccagaugagcauccagcugaucaacaaggccgugaacgcccucaucaacgaccagcugaucaugaagaaccaccuccgggacaucauggggauccccuacugcaacuacuccaaguacugcuaccucaaccacacgaccaccggccgcaccagccugcccaagugcugccuggucuccaacggcagcuaccucaacgagacgcacuucuccgacgacaucgagcagcaggccgacaacaugaucaccgagaugcugcagaaggaguacauggagcggcaggggaagacgccccugggccucguggaccuguucguguucagcaccuccuucuaccugaucagcaucuuccugcaccucgucaagaucccgacccaccgccacaucguggggaaguccugccccaagccccaccggcugaaccacaugggcaucugcagcugcgggcuguacaagcagcccggcgugccggucaaguggaagcgcugaggacuaguuauaagacugacuagcccgaugggccucccaacgggcccuccuccccuccuugcaccgagauuaaucaaaggcucuuuucagagccaccaaaaaaaaaaaaaaaaaaaaaaaaaaaaaaaaaaaaaaaaaaaaaaaaaaaaaaaaaaaaaaaaaaaaaaaaaaaaaaaaaaaaaaaaaaaaaaaaaaaaa

SEQ ID NO: 39654 - RNA, 1686 nt, Artificial Sequence
  mRNA product Design i-3 (hSL-A100) comprising derived and/or modified sequence from LASV(LP;Clade I)__AAF86701__GPCmut11 (opt1)
aggagaaagcuuaccaugggccagaucaucaccuucuuccaggaggugccccacgucaucgaggaggugaugaacaucgugcugaucgcccucagccugcuggccauccucaaggggcuguacaacaucgcgaccugcggcaucaucgggcuggucgccuuccucuuccugugcggcaaguccugcagccugacgcucaagggcggguacgagcugcagacccuggagcucaacauggagacccugaacaugaccaugccgcuguccugcacgaagaacagcucccaccacuacauccgcgugggcaacgagaccgggcucgagcugacccugaccaacacgagcaucaucaaccacaaguucugcaaccucuccgacgcccacaagaagaaccuguacgaccacgcccugaugagcaucaucuccaccuuccaccucagcauccccaacuucaaccaguacgaggccauguccugcgacuucaacggcgggaagaucagcgugcaguacaaccugucccacagcuacgcgggcgacgccgccgagcacugcgggaccgucgccaacggcgugcugcagaccuucaugcggauggcguggggcgggcgcuacaucgcccucgacuccggcaaggggaacugggacugcaucaugacgagcuaccaguaccugaucauccagaacaccaccugggaggaccacugccaguucucccggcccagccccaucggcuaccugggccuccugucccagcgcacccgggacaucuacaucagccgccggcugcucgggacguucaccuggacccugagcgacuccgagggcaacgagacccccgggggcuacugccugacgcgcuggaugcucaucgaggccgagcugaagugcuucgggaacaccgccguggccaagugcaacgagaagcacgacgaggaguucugcgacaugcugcggcuguucgacuucaacaagcaggcgauccgccggcugaaggccgaggcccagaugagcauccagcugaucaacaaggccgucaacgcccucaucaacgaccagcugaucaugaagaaccaccuccgcgacaucaugggcauccccuacugcaacuacuccaaguacugcuaccucaaccacaccagcuccggccggaccagccugcccaagugcugccugaucuccaacgggagcuaccucaacgagacgcaguucuccgacgacaucgagcagcaggcggacaacaugaucaccgagaugcugcagaaggaguacaucgagcgccagggcaagaccccgcuggggcucguggacaucuucaucuucagcaccuccuucuaccugaucagcaucuuccugcaccugaucaagaucccgacgcaccggcacaucgugggcaagcccugccccaagccccaccgccucaaccacaugggggucugcuccugcggccuguacaagcacccgggcgugcccaccaaguggaagcggugaggacuaguuauaagacugacuagcccgaugggccucccaacgggcccuccuccccuccuugcaccgagauuaaucaaaggcucuuuucagagccaccaaaaaaaaaaaaaaaaaaaaaaaaaaaaaaaaaaaaaaaaaaaaaaaaaaaaaaaaaaaaaaaaaaaaaaaaaaaaaaaaaaaaaaaaaaaaaaaaaaaaa

SEQ ID NO: 39655 - RNA, 1686 nt, Artificial Sequence
  mRNA product Design i-3 (hSL-A100) comprising derived and/or modified sequence from LASV(803213;Clade II)__AAF86703__GPCmut11 (opt1)
aggagaaagcuuaccaugggccagaucaucaccuucuuccaggaggugccccacgucaucgaggaggugaugaacaucgugcugaucgcccucagccugcuggccauccucaaggggaucuacaacgucgcgaccugcggccuguucgggcugaucuccuuccuccugcugugcggccgcagcugcuccgugacguacaaggggguguacgagcuccagacccuggagcugaacauggccaaccucaacaugaccaugccgcugagcugcaccaagaacaacucccaccacuacaucauggucggcaacgagacgggccuggagcucacccugaccaacaccagcaucaucaaccacaaguucugcaaccuguccgacgcccacaagaagaaccucuacgaccacgcccugaugagcaucaucuccacguuccaccugagcauccccaacuucaaccaguacgaggccauguccugcgacuucaacgggggcaagaucagcgugcaguacaaccucucccacagcuucgcgguggacgccgccaaccacugcgggaccaucgccaacggcguccugcagaccuucaugcggauggcguggggcggguccuacaucgcccuggacagcggcaaggggaacugggacugcaucaugaccuccuaccaguaccucaucauccagaacacgaccugggaggaccacugccaguucagccgccccucccccaucggcuaccuggggcugcucagccagcggacccgcgacaucuacaucagccggcgccugcugggcaccuucacguggacccucuccgacagcgagggcaacgaggcccccgggggcuacugccugacccgguggaugcugaucgaggccgagcucaagugcuucgggaacaccgccguggcgaagugcaacgagaagcacgacgaggaguucugcgacaugcugcgccuguucgacuucaacaagcaggccaucaagcggcucaagacggaggcccagauguccauccagcugaucaacaaggccgugaacgcccugaucaacgaccagcucaucaugaagaaccaccuccgcgacaucaugggcauccccuacugcaacuacagccgguacugcuaccugaaccacaccgucaccgggaagaccucccugccccgcugcugccuggugagcaacggcuccuaccugaacgagacgcacuucagcgacgacaucgagcagcaggcggacaacaugaucaccgagaugcuccagaaggaguacauggaccggcagggcaagaccccgcuggggcugguggaccucuucgucuucuccaccagcuucuaccugaucuccaucuuccugcaccuggugaagaucccgacgcaccgccacaucgugggcaagcccugccccaagccccaccggcucaaccacauggggaucugcagcugcggccuguacaagcacccggggguccccgugaaguggaagcgcugaggacuaguuauaagacugacuagcccgaugggccucccaacgggcccuccuccccuccuugcaccgagauuaaucaaaggcucuuuucagagccaccaaaaaaaaaaaaaaaaaaaaaaaaaaaaaaaaaaaaaaaaaaaaaaaaaaaaaaaaaaaaaaaaaaaaaaaaaaaaaaaaaaaaaaaaaaaaaaaaaaaaa

SEQ ID NO: 39656 - RNA, 1686 nt, Artificial Sequence
  mRNA product Design i-3 (hSL-A100) comprising derived and/or modified sequence from LASV(GA391;Clade III)__CAA36645__GPCmut11 (opt1)
aggagaaagcuuaccaugggccagaucgugaccuucuuccaggaggucccccacgugaucgaggaggugaugaacaucguccugaucgcccucagcauccuggccauccugaaggggcucuacaacguggcgaccugcggccugaucgggcuggugacguuccuccugcuguccggccgcagcugcucccucaucuacaaggggaccuacgagcugcagacccuggagcucaacauggagacccugaacaugacgaugccgcugagcugcaccaagaacaacucccaccacuacauccgggucggcaacgagaccggccucgagcugacccugacgaacaccagcauccucaaccacaaguucugcaaccuguccgacgcccacaagcgcaaccuguacgaccacagccucauguccaucaucagcaccuuccaccuguccauccccaacuucaaccaguacgaggccaugagcugcgacuucaacgggggcaagaucaccgugcaguacaaccugucccacagcuucgccguggacgccgcggggcacugcggcacgcucgccaacgggguccugcagaccuucaugcggauggccuggggcggcuccuacaucgcccuggacagcgggcgcggcaacugggacugcaucaugaccuccuaccaguaccucaucauccagaacaccacgugggacgaccacugccaguucagccggcccucccccaucggguaccugggccugcucagccagcgcacccgggacaucuacaucagccgccggcugcugggcaccuucaccuggacgcucuccgacagcgaggggaacgagaccccgggcggguacugccugacccgcuggaugcugaucgaggcggagcucaagugcuucggcaacaccgccguggccaagugcaacgagaagcacgacgaggaguucugcgacaugcugcggcuguucgacuucaacaagcaggccauccgccggcucaagacggaggcccagauguccauccagcugaucaacaaggcggugaacgcccugaucaacgaccagcucaucaugaagaaccaccuccgcgacaucauggggauccccuacugcaacuacagccgguacugcuaccugaaccacaccuccaccggcaagaccagccugccccgcugcugccugaucuccaacggcagcuaccugaacgagacgaaguucuccgacgacaucgagcagcaggccgacaacaugaucaccgagaugcuccagaaggaguacaucgaccggcaggggaagacgccccugggccuggucgaccuguucguguucagcaccuccuucuaccucaucagcaucuuccugcaccuggugaagaucccgacccaccgccacaucgucgggaagcccugccccaagccccaccggcucaaccacaugggcaucugcuccugcgggcuguacaagcagccgggcgugcccgugcgcuggaagcggugaggacuaguuauaagacugacuagcccgaugggccucccaacgggcccuccuccccuccuugcaccgagauuaaucaaaggcucuuuucagagccaccaaaaaaaaaaaaaaaaaaaaaaaaaaaaaaaaaaaaaaaaaaaaaaaaaaaaaaaaaaaaaaaaaaaaaaaaaaaaaaaaaaaaaaaaaaaaaaaaaaaaa

SEQ ID NO: 39657 - RNA, 1689 nt, Artificial Sequence
  mRNA product Design i-3 (hSL-A100) comprising derived and/or modified sequence from LASV(AV;Clade V)__CCA30314__GPCmut11 (opt1)
aggagaaagcuuaccaugggccagaucgugaccuucuuccaggaggucccccacgugaucgaggaggugaugaacaucguccugaucgcccucagcauccuggccgugcugaaggggcucuacaacaucgcgaccugcggccugaucgggcugaucacguuccuccugcugugcggccgcuccugcagcuccaaccucuacaaggggguguacgagcugcagagccuggaccucaacauggagacccugaacaugaccaugccgcuguccugcaccaagaacaacagccaccacuacauccgggucggcaacgacacgggccucgagcugacccugaccaacaccuccauccucaaccacaaguucugcaaccugagcgacgcccacaagaaggaccuguacgaccacgcccucauguccaucaucagcacguuccaccuguccauccccaacuucaaccaguacgaggccaugagcugcgacuucaacgggggcaagaucuccgugcaguacaaccugagccacuccuacgccaucgacgcggccaaccacugcgggaccguggccaacggcauccuccagaccuucaugcgcauggccuggggcgggagcuacaucgcgcuggacuccggccgggggaacugggacugcaucaugaccagcuaccaguaccugaucauccagaacacgaccugggagaaccacugccaguucucccgccccagccccaucggcuaccucgggcugcugagccagcggacccgcgacaucuacaucucccggcgccuccugggcaccuucacguggacccugagcgacuccgagggcaacgccacccccgggggcuacugccucacccgguggaugcugaucgaggccgagcugaagugcuucgggaacacggccgucgccaagugcaacgagaagcacgacgaggaguucugcgacaugcuccgccuguucgacuucaacaagcaggcgaucagccggcugaaguccgaggcccagaugagcauccagcucaucaacaaggccgugaacgcccugaucaacgaccagcugaucaugaagaaccaccuccgcgacaucaugggcauccccuacugcaacuacuccaaguacugcuaccugaaccacaccaucaccgggaagaccagccugcccaagugcugccucguguccaacggcagcuaccugaacgagacgcacuucuccgacgacaucgagcagcaggccgacaacaugaucaccgagaugcugcagaaggaguacauggagcggcagggcaagaccccgcucgggcuggucgaccuguucguguucagcaccuccuucuaccugaucagcaucuuccuccgccuggugaagaucccgacgcaccggcacaucgucggcaagcccugccccaagccccaccgccugaaccacauggggaucugcuccugcggccucuacaagcagccgggggugcccgugcgguggaagcgcugaggacuaguuauaagacugacuagcccgaugggccucccaacgggcccuccuccccuccuugcaccgagauuaaucaaaggcucuuuucagagccaccaaaaaaaaaaaaaaaaaaaaaaaaaaaaaaaaaaaaaaaaaaaaaaaaaaaaaaaaaaaaaaaaaaaaaaaaaaaaaaaaaaaaaaaaaaaaaaaaaaaaa

SEQ ID NO: 39658 - RNA, 1686 nt, Artificial Sequence
  mRNA product Design i-3 (hSL-A100) comprising derived and/or modified sequence from LASV(Togo/2016/7082;Clade VI)__AMR44577__GPCmut11 (opt1)
aggagaaagcuuaccaugggccagaucaucaccuucuuccaggaggugccccacgucaucgaggaggugaugaacaucgugcugaucgcccucagccugcuggccauccucaagggggucuacaacguggcgaccugcggcaucaucgggcuggugacguuccuguuccucugcggccgcuccugcagccugaucuacaagggguccuacgagcugcagacccucgagcugaacauggagacccugaacaugaccaugccgcucagcugcacgaagaacuccagccaccacuacauccgggucggcaacgagaccggccuggagcugacccucaccaacacguccaucaucaaccacaaguucugcaaccugagcgacgcccacaagcgcaaccuguacgaccacgcccucauguccauccugagcaccuuccaccuguccauccccaacuucaaccaguacgaggccaugagcugcgacuucaacgggggcaagaucuccgugcaguacaaccucagccacgccuacgcgguggacgccgccgagcacugcgggaccgucgccaacggcgugcugcagaccuucaugcggauggcguggggcggguccuacaucgcccuggacagcggccgcgggaacugggacugcaucaugacguccuaccaguaccucaucauccagaacaccaccugggaggaccacugccaguucagccggcccucccccaucggcuaccuggggcugcucagccagcgcacccgggacaucuacaucagccgccggcugcugggcacguucaccuggacccucuccgacagcgagggcaacgagacccccgggggcuacugccugacgcgcuggaugcugaucgaggccgagcucaagugcuucgggaacaccgccguggccaagugcaacgagaagcacgacgaggaguucugcgacaugcugcggcuguucgacuucaacaagcaggcgauccagcgccucaaguccgaggcccagaugagcauccagcugaucaacaaggccgucaacgcccugaucaacgaccagcucaucaugaagaaccaccuccgggacaugaugggcauccccuacugcaacuacuccaaguacugcuaccugaaccacaccagcuccgggcgcaccagccugcccaagugcugccugguguccaacggcagcuaccugaacgagacgcacuucuccgacgacaucgagcagcaggccgacaacaugaucaccgagaugcuccagaaggaguacaucgaccggcagggcaagaccccgcuggggcugguggaccucuucgucuucagcaccuccuucuaccugaucagcaucuuccugcaccugaucaagaucccgacgcaccgccacaucgugggcaagcccugccccaagccccaccggcucaaccacauggggaucugcuccugcggccuguacaagcagccgggggugcccacccgcuggaagcggugaggacuaguuauaagacugacuagcccgaugggccucccaacgggcccuccuccccuccuugcaccgagauuaaucaaaggcucuuuucagagccaccaaaaaaaaaaaaaaaaaaaaaaaaaaaaaaaaaaaaaaaaaaaaaaaaaaaaaaaaaaaaaaaaaaaaaaaaaaaaaaaaaaaaaaaaaaaaaaaaaaaaa

SEQ ID NO: 39659 - RNA, 1686 nt, Artificial Sequence
  mRNA product Design i-3 (hSL-A100) comprising derived and/or modified sequence from LASV(KAK-428;Clade n.d. (VII))__ANH09740__GPCmut11 (opt1)
aggagaaagcuuaccaugggccagaucgugaccuucuuccaggaggucccccacgugaucgaggaggugaugaacaucguccugaucgcccucagccugcuggccauccucaaggggcuguacaacuucgcgaccugcggcgugaucgggcugaucacguuccuccugcugugcggccgcuccugcagcgccaccuacaaggggcaguacgagcuccagacccuggagcugaacauggagucccucaacaugaccaugccgcugagcugcacgaagaacaacucccaccacuacauccgggccggcaacaacaccggccuggagcucacccugaccaacacgagcaucaucucccacaaguucugcaaccugagcgacgcccacaagaagaaccucuacgaccacacccugauguccaucaucaccaccuuccaccugagcauccccaacuucaaccaguacgaggccauguccugcgacuucaacgggggcaagaucagcauccaguacaaccucucccacagcuacgcgggggacgccgcccagcacugcggcacgguggccaacgggguccugcagaccuucaugcgcauggcguggggcggcuccuaccuggcccucgacagcgggcggcgcggcugggacugcaucaucuccagcuaccaguaccugaucauccagaacaccaccugggacgaccacugccaguucucccggcccagccccaucggguaccugggcuucgugagccagaagacgcgcgacaucuacaucucccggcgccuccugggcaccuucaccuggacccugagcgacuccgaggggcacgacaugccgggcggguacugccucacgcgguggaugcugaucgaggccgaccugaagugcuucggcaacaccgccguggccaagugcaacgagaagcacgacgaggaguucugcgacauguggcgccucuucgacuucaacaagcaggcgauccagcggcugaaggccgaggcccagaugaacauccagcugaucaacaaggccgucaacgcccucaucaacgaccagcugaugaugaagaaccaccuccgcgacaucauggggauccccuacugcaacuacagcaaguucugcuaccugaacaacaccaccacgggccggaccucccugccccgcugcugccugaucagcaacggcuccuaccucaacgagacccacuucagcgacgacaucgagcagcaggcggacaacaugaucaccgagaugcugcagaaggaguacauggaccggcaggggaagacgccccugggccucguggaccuguucguguucuccaccagcuucuaccugaucaccaucuuccuccaccuggucaagaucccgacccaccgccacaucguggggaagcccugccccaagccccaccggcugaaccacaugggcaucugcuccugcgggcuguacaagcagccgggcgugcccguccgcuggaagcggugaggacuaguuauaagacugacuagcccgaugggccucccaacgggcccuccuccccuccuugcaccgagauuaaucaaaggcucuuuucagagccaccaaaaaaaaaaaaaaaaaaaaaaaaaaaaaaaaaaaaaaaaaaaaaaaaaaaaaaaaaaaaaaaaaaaaaaaaaaaaaaaaaaaaaaaaaaaaaaaaaaaaa

SEQ ID NO: 39660 - RNA, 1686 nt, Artificial Sequence; identical to SEQ ID NO: 39654
  mRNA product Design i-3 (hSL-A100) comprising derived and/or modified sequence from LASV(Pinneo-NIG-1969;Clade I)__AIT17836__GPCmut11 (opt1)

SEQ ID NO: 39661 - RNA, 1686 nt, Artificial Sequence
  mRNA product Design i-3 (hSL-A100) comprising derived and/or modified sequence from LASV(ISTH0009-NIG-2011;Clade II)__AIT17404__GPCmut11 (opt1)
aggagaaagcuuaccaugggccagaucaucaccuucuuccaggaggugccccacgucaucgaggaggugaugaacaucgugcugaucgcccucagccugcuggccauccucaaggggaucuacaacgucgcgaccugcggccuguucgggcugguguccuuccuccugcugugcggccgcagcugcuccacgaccuacaaggggguguacgagcuccagacccuggagcuggacauggccagccucaacaugaccaugccgcuguccugcacgaagaacaacagccaccacuacaucauggucggcaacgagaccggccuggagcucacccugaccaacacguccaucaucaaccacaaguucugcaaccugagcgacgcccacaagaagaaccucuacgaccacgcccugauguccaucaucagcaccuuccaccuguccauccccaacuucaaccaguacgaggccaugagcugcgacuucaacgggggcaagaucuccgugcaguacaaccucagccacgcguacgccguggacgccgccaaccacugcgggaccaucgcgaacggcguccugcagaccuucaugcggauggccuggggcggguccuacaucgcccuggacagcggcaagggguccugggacugcaucaugacgagcuaccaguaccucaucauccagaacaccaccugggaggaccacugccaguucucccgccccagccccaucggcuaccuggggcugcucagccagcggacccgcgacaucuacaucucccggcgccugcugggcacguucaccuggacccucagcgacuccgagggcaacgagacccccgggggcuacugccugacgcgguggaugcugaucgaggccgagcucaagugcuucgggaacaccgccguggcgaagugcaacgagaagcacgacgaggaguucugcgacaugcugcgccuguucgacuucaacaagcaggccauccggcgccucaagaccgaggcccagaugagcauccagcugaucaacaaggccgugaacgcccugaucaacgaccagcucaucaugaagaaccaccuccgggacaucaugggcaucccguacugcaacuacuccaaguacugcuaccugaaccacaccgucacggggaagaccagccugccccgcugcugccugguguccaacggcagcuaccugaacgagacccacuucuccgacgacaucgagcagcaggcggacaacaugaucaccgagcuccugcagaaggaguacauggaccggcagggcaagacgccccuggggcucguggaccuguucgucuucagcaccuccuucuaccugaucagcaucuuccugcaccucaucaagaucccgacccaccgccacaucaccggcaagcccugccccaagccccaccggcugaaccacauggggaucugcuccugcggccuguacaagcacccgggggugcccgugaaguggaagcgcugaggacuaguuauaagacugacuagcccgaugggccucccaacgggcccuccuccccuccuugcaccgagauuaaucaaaggcucuuuucagagccaccaaaaaaaaaaaaaaaaaaaaaaaaaaaaaaaaaaaaaaaaaaaaaaaaaaaaaaaaaaaaaaaaaaaaaaaaaaaaaaaaaaaaaaaaaaaaaaaaaaaaa

SEQ ID NO: 39662 - RNA, 1686 nt, Artificial Sequence
  mRNA product Design i-3 (hSL-A100) comprising derived and/or modified sequence from LASV(ISTH2010-NIG-2012;Clade II)__AIT17482__GPCmut11 (opt1)
aggagaaagcuuaccaugggccagaucaucaccuucuuccaggaggugccccacgucaucgaggaggugaugaacaucgugcugaucgcccucagccugcuggccauccucaaggggaucuacaacgucgcgaccugcggccuguucgggcugguguccuuccuccugcugugcggccgcagcugcuccacgaccuacaaggggguguacgagcuccagacccuggagcuggacauggccagccucaacaugaccaugccgcuguccugcacgaagaacaacagccaccacuacaucauggucggcaacgagaccggccuggagcucacccugaccaacacguccaucaucaaccacaaguucugcaaccugagcgacgcccacaagaagaaccucuacgaccacgcccugauguccaucaucagcaccuuccaccuguccauccccaacuucaaccaguacgaggccaugagcugcgacuucaacgggggcaagaucuccgugcaguacaaccucagccacgcguacgccguggacgccgccaaccacugcgggaccaucgcgaacggcguccugcagaccuucaugcggauggccuggggcggguccuacaucgcccuggacagcggcaagggguccugggacugcaucaugacgagcuaccaguaccucaucauccagaacaucaccugggaggaccacugccaguucucccgccccagccccaucggcuaccuggggcugcucagccagcggacccgcgacaucuacaucucccggcgccugcugggcaccuucacguggacccucagcgacuccgagggcaacgagacccccgggggcuacugccugacccgguggaugcugaucgaggccgagcucaagugcuucgggaacacggccguggcgaagugcaacgagaagcacgacgaggaguucugcgacaugcugcgccuguucgacuucaacaagcaggccauccggcgccucaagaccgaggcccagaugagcauccagcugaucaacaaggccgugaacgcccugaucaacgaccagcucaucaugaagaaccaccuccgggacaucaugggcauccccuacugcaacuacuccaaguacugcuaccugaaccacaccgucaccgggaagacgagccugccccgcugcugccugguguccaacggcagcuaccugaacgagacccacuucuccgacgacaucgagcagcaggcggacaacaugaucaccgagcuccugcagaaggaguacaucgaccggcagggcaagaccccgcuggggcucguggaccuguucgucuucagcacguccuucuaccugaucagcaucuuccugcaccucgugaagaucccgacccaccgccacguggucggcaagcccugccccaagccccaccggcugaaccacauggggaucugcuccugcggccuguacaagcacccgggggugcccgugaaguggaagcgcugaggacuaguuauaagacugacuagcccgaugggccucccaacgggcccuccuccccuccuugcaccgagauuaaucaaaggcucuuuucagagccaccaaaaaaaaaaaaaaaaaaaaaaaaaaaaaaaaaaaaaaaaaaaaaaaaaaaaaaaaaaaaaaaaaaaaaaaaaaaaaaaaaaaaaaaaaaaaaaaaaaaaa

SEQ ID NO: 39663 - RNA, 1686 nt, Artificial Sequence
  mRNA product Design i-3 (hSL-A100) comprising derived and/or modified sequence from LASV(Lassa virus/H.sapiens-wt/NGA/2015/ISTH_0543;Clade II)__AVO03639__GPCmut11 (opt1)
aggagaaagcuuaccaugggccagaucaucaccuucuuccaggaggugccccacgucaucgaggaggugaugaacaucgugcugaucgcccucagccugcuggccauccucaaggggaucuacaacgucgcgaccugcggccuguucgggcugguguccuuccuccugcugugcggccgcagcugcuccacgaccuacaaggggguguacgagcuccagacccuggagcuggacauggccaaccucaacaugaccaugccgcugagcugcacgaagaacaacucccaccacuacaucauggucggcaacgagaccggccuggagcucacccugaccaacacgagcaucaucaaccacaaguucugcaaccuguccgacgcccacaagaagaaccucuacgaccacgcccugaugagcaucaucuccaccuuccaccugagcauccccaacuucaaccaguacgaggccauguccugcgacuucaacgggggcaagaucagcgugcaguacaaccucucccacaccuacgcgguggacgccgccaaccacugcgggaccaucgccaacggcguccugcagacguucaugcggauggcguggggcgggagcuacaucgcccuggacuccggcaaggggagcugggacugcaucaugaccuccuaccaguaccucgugauccagaacaccaccugggaggaccacugccaguucagccgccccucccccaucggcuaccuggggcugcucagccagcggacgcgcgacaucuacaucagccggcgccugcugggcaccuucaccuggacccucuccgacagcgagggcaacgagacgcccgggggcuacugccugacccgguggaugcugaucgaggccgagcucaagugcuucgggaacaccgccguggccaagugcaacgagaagcacgacgaggaguucugcgacaugcugcgccuguucgacuucaacaagcaggcgauccggcgccucaagaccgaggcccagauguccauccagcugaucaacaaggccgucaacgcccugaucaacgaccagcucaucaugaagaaccaccuccgggacaucaugggcauccccuacugcaacuacagcaaguacugcuaccugaaccacacggugaccgggaagaccucccugccccgcugcugccuggugagcaacggcuccuaccugaacgagacccacuucagcgacgacaucgagcagcaggccgacaacaugaucacggagcuccugcagaaggaguacaucgaccggcagggcaagaccccgcuggggcucgucgaccuguucguguucuccaccagcuucuaccugaucuccaucuuccugcaccucgugaagaucccgacccaccgccacaucacgggcaagcccugccccaagccccaccggcugaaccacauggggaucugcagcugcggccuguacaagcacccggggguccccgugaaguggaagcgcugaggacuaguuauaagacugacuagcccgaugggccucccaacgggcccuccuccccuccuugcaccgagauuaaucaaaggcucuuuucagagccaccaaaaaaaaaaaaaaaaaaaaaaaaaaaaaaaaaaaaaaaaaaaaaaaaaaaaaaaaaaaaaaaaaaaaaaaaaaaaaaaaaaaaaaaaaaaaaaaaaaaaa

SEQ ID NO: 39664 - RNA, 1686 nt, Artificial Sequence
  mRNA product Design i-3 (hSL-A100) comprising derived and/or modified sequence from LASV(Lassa virus/H.sapiens-wt/NGA/2016/ISTH_0009;Clade II)__AVO03571__GPCmut11 (opt1)
aggagaaagcuuaccaugggccagaucaucaccuucuuccaggaggugccccacgucaucgaggaggugaugaacaucgugcugaucgcccucagccugcuggccauccucaaggggaucuacaacgucgcgaccugcggccugcuggggcucguguccuuccugcugcucugcggccgcagcugcuccacgaccuacaaggggguguacgagcugcagacccuggagcucgacauggccagccugaacaugaccaugccgcuguccugcacgaagaacaacagccaccacuacaucauggucggcaacgagaccggccucgagcugacccugaccaacacguccaucaucaaccacaaguucugcaaccucagcgacgcccacaagaagaaccuguacgaccacgcccugauguccaucaucagcaccuuccaccucuccauccccaacuucaaccaguacgaggccaugagcugcgacuucaacgggggccggaucuccgugcaguacaaccugagccacuccuacgcgguggacgccgccaaccacugcgggaccaucgccaacggcguccugcagaccuucaugcgcauggcguggggcgggagcuacaucgcccucgacuccggcaaggggagcugggacugcaucaugacguccuaccaguaccugaucauccagaacaccaccugggaggaccacugccaguucagccggcccagccccaucggcuaccuggggcuccugucccagcgcacccgggacaucuacaucagccgccggcugcucggcacguucaccuggacccuguccgacagcgagggcaacgagacccccgggggcuacugccugacgcgcuggaugcucaucgaggccgagcugaagugcuucgggaacaccgccguggccaagugcaacgagaagcacgacgaggaguucugcgacaugcugcggcuguucgacuucaacaagcaggcgauccgccggcugaagaccgaggcccagauguccauccagcugaucaacaaggccgugaacgcccucaucaacgaccagcugaucaugaagaaccaccuccgcgacaucaugggcaucccguacugcaacuacagcaaguacugcuaccucaaccacaccgucacggggaagaccucccugccccggugcugccuggugagcaacggcuccuaccucaacgagacccacuucagcgacgacaucgagcagcaggccgacaacaugaucaccgagcugcugcagaaggaguacaucgaccgccagggcaagacgccccucgggcugguggaccuguucgucuucuccaccagcuucuaccugaucuccaucuuccuccaccuggugaagaucccgacccaccggcacaucaccggcaagcccugccccaagccccaccgccugaaccacauggggaucugcagcugcggccucuacaaccacccgggggugcccgucaaguggaagcggugaggacuaguuauaagacugacuagcccgaugggccucccaacgggcccuccuccccuccuugcaccgagauuaaucaaaggcucuuuucagagccaccaaaaaaaaaaaaaaaaaaaaaaaaaaaaaaaaaaaaaaaaaaaaaaaaaaaaaaaaaaaaaaaaaaaaaaaaaaaaaaaaaaaaaaaaaaaaaaaaaaaaa

SEQ ID NO: 39665 - RNA, 1686 nt, Artificial Sequence
  mRNA product Design i-3 (hSL-A100) comprising derived and/or modified sequence from LASV(Lassa virus/H.sapiens-wt/NGA/2016/ISTH_0017;Clade II)__AVO03567__GPCmut11 (opt1)
aggagaaagcuuaccaugggccagaucaucaccuucuuccaggaggugccccacgucaucgaggaggugaugaacaucgugcugaucgcccucagccugcuggccauccucaaggggaucuacaacgucgcgaccugcggccuguucgggcugguguccuuccuccugcugugcggccgcagcugcuccacgaccuacaaggggguguacgagcuccagacccuggagcuggacauggccagccucaacaugaccaugccgcuguccugcacgaagaacaacagccaccacuacaucauggucggcaacgagaccggccuggagcucacccugaccaacacguccaucaucaaccacaaguucugcaaccugagcgacgcccacaagaagaaccucuacgaccacgcccugauguccaucaucagcaccuuccaccuguccauccccaacuucaaccaguacgaggccaugagcugcgacuucaacgggggcaagaucuccgugcaguacaaccucagccacaccuacgcgaucgacgccgccaaccacugcgggaccaucgccaacggcgugcugcagacguucaugcggauggcguggggcggguccuacaucgcccuggacagcggcaagggguccugggacugcaucaugaccagcuaccaguaccucaucauccagaacaccaccugggaggaccacugccaguucucccgccccagccccaucggcuaccuggggcugcucagccagcggacgcgcgacaucuacaucucccggcgccugcugggcaccuucaccuggacccucagcgacuccgagggcaacgagacgcccgggggcuacugccugacccgguggaugcugaucgaggccgagcucaagugcuucgggaacaccgccgucgccaagugcaacgagaagcacgacgaggaguucugcgacaugcugcgccuguucgacuucaacaagcaggcgauccggcgccucaagaccgaggcccagaugagcauccagcugaucaacaaggccgugaacgcccugaucaacgaccagcucaucaugaagaaccaccuccgggacaucaugggcauccccuacugcaacuacuccaaguacugcuaccugaaccacacggugaccgggaagaccagccugccccgcugcugccuggucuccaacggcagcuaccugaacgagacccacuucuccgacgacaucgagcagcaggccgacaacaugaucacggagcuccugcagaaggaguacauggaccggcagggcaagaccccgcuggggcucguggaccuguucguguucagcaccuccuucuaccugaucagcaucuuccugcaccucguccgcaucccgacccaccggcacgugaucggcaagcccugccccaagccccaccgccugaaccacauggggaucugcuccugcggccuguacaagcacccgggggugcccgucaaguggaagcggugaggacuaguuauaagacugacuagcccgaugggccucccaacgggcccuccuccccuccuugcaccgagauuaaucaaaggcucuuuucagagccaccaaaaaaaaaaaaaaaaaaaaaaaaaaaaaaaaaaaaaaaaaaaaaaaaaaaaaaaaaaaaaaaaaaaaaaaaaaaaaaaaaaaaaaaaaaaaaaaaaaaaa

SEQ ID NO: 39666 - RNA, 1686 nt, Artificial Sequence
  mRNA product Design i-3 (hSL-A100) comprising derived and/or modified sequence from LASV(Lassa virus/H.sapiens-wt/NGA/2018/ISTH_0959;Clade II)__AVV65099__GPCmut11 (opt1)
aggagaaagcuuaccaugggccagaucaucaccuucuuccaggaggugccccacgucaucgaggaggugaugaacaucgugcugaucgcccucagccugcuggccauccucaaggggaucuacaacgucgugaccugcggccuguucgggcugguguccuuccuccugcugugcggccgcagcugcuccacgaccuacaagggggucuacgagcuccagacccuggagcuggacauggcgagccucaacaugaccaugccgcuguccugcacgaagaacaacagccaccacuacaucauggugggcaacgagaccggccuggagcucacccugaccaacacguccaucaucaaccacaaguucugcaaccugagcgacgcccacaagaagaaccucuacgaccacgcccugauguccaucaucagcaccuuccaccuguccauccccaacuucaaccaguacgaggccaugagcugcgacuucaacgggggcaagaucuccgugcaguacaaccucagccacgccuacgcgaucgacgccgccaaccacugcgggaccaucgccaacggcguccugcagaccuucaugcggauggcguggggcggguccuacaucgcccuggacagcggcaagggguccugggacugcaucaugacgagcuaccaguaccucaucauccagaacaccaccugggaggaccacugccaguucucccgccccagccccaucggcuaccuggggcugcucagccagcggacccgcgacaucuacaucucccggcgccugcugggcacguucaccuggacccucagcgacuccgagggcaacgagacccccgggggcuacugccugacgcgguggaugcugaucgaggccgagcucaagugcuucgggaacaccgccguggccaagugcaacgagaagcacgacgaggaguucugcgacaugcugcgccuguucgacuucaacaagcaggcgauccggcgccucaagaccgaggcccagaugagcauccagcugaucaacaaggccgugaacgcccugaucaacgaccagcucaucaugaagaaccaccuccgggacaucaugggcaucccguacugcaacuacuccaaguacugcuaccugaaccacaccgucacggggaagaccagccugccccgcugcugccugguguccaacggcagcuaccugaacgagacccacuucuccgacgacaucgagcagcaggccgacaacaugaucaccgagcuccugcagaaggaguacaucgaccggcagggcaagacgccccuggggcucguggaccuguucgucuucagcaccuccuucuaccugaucagcaucuuccugcaccucgugaagaucccgacccaccgccacgugaucggcaagcccugccccaagccccaccggcugaaccacauggggaucugcuccugcggccuguacaagcacccggggguccccgugaaguggaagcgcugaggacuaguuauaagacugacuagcccgaugggccucccaacgggcccuccuccccuccuugcaccgagauuaaucaaaggcucuuuucagagccaccaaaaaaaaaaaaaaaaaaaaaaaaaaaaaaaaaaaaaaaaaaaaaaaaaaaaaaaaaaaaaaaaaaaaaaaaaaaaaaaaaaaaaaaaaaaaaaaaaaaaa

SEQ ID NO: 39667 - RNA, 1686 nt, Artificial Sequence
  mRNA product Design i-3 (hSL-A100) comprising derived and/or modified sequence from LASV(LASV003-NIG-2008;Clade II)__AIT17580__GPCmut11 (opt1)
aggagaaagcuuaccaugggccagaucaucaccuucuuccaggaggugccccacgucaucgaggaggugaugaacaucgugcugaucgcccucagccugcuggccauccucaaggggaucuacaacgucgcgaccugcggccuguucgggcugguguccuuccuccugcugugcggccgcagcugcuccacgaccuacaaggggguguacgagcuccagacccuggagcuggacauggccagccucaacaugaccaugccgcuguccugcacgaagaacaacagccaccacuacaucauggucggcaacgagaccggccuggagcucacccugaccaacacguccaucaucaaccacaaguucugcaaccugagcgacgcccacaagaagaaccucuacgaccacgcccugauguccaucaucagcaccuuccaccuguccauccccaacuucaaccaguacgaggccaugagcugcgacuucaacgggggcaagaucuccgugcaguacaaccucagccacaccuacgcgguggacgccgccaaccacugcgggaccaucgccaacggcguccugcagacguucaugcggauggcguggggcggguccuacaucgcccuggacagcggcaagggguccugggacugcaucaugaccagcuaccaguaccucaucauccagaacaccaccugggaggaccacugccaguucucccgccccagccccaucggcuaccuggggcugcucagccagcggacgcgcgacaucuacaucucccggcgccugcugggcaccuucaccuggacccucagcgacuccgagagcaacgagacgccgggcggguacugccugacccgguggaugcugaucgaggccgagcucaagugcuucggcaacaccgccguggccaagugcaacgagaagcacgacgaggaguucugcgacaugcugcgccuguucgacuucaacaagcaggcgauccggcgccucaaggccgaggcccagauguccauccagcugaucaacaaggccgugaacgcccugaucaacgaccagcucaucaugaagaaccaccuccgggacaucauggggauccccuacugcaacuacagcaaguacugcuaccugaaccacaccgucacgggccgcaccucccugccccggugcugccuggugagcaacggguccuaccugaacgagacccacuucagcgacgacaucgagcagcaggcggacaacaugaucaccgagcuccugcagaaggaguacauggaccgccagggcaagacgccccugggccucguggaccuguucgucuucuccaccagcuucuaccugaucuccaucuuccugcaccucgugaagaucccgacccaccggcacgugaucgggaagcccugccccaagccccaccgccugaaccacaugggcaucugcagcugcgggcuguacaagcacccgggcguccccgugaaguggaagcggugaggacuaguuauaagacugacuagcccgaugggccucccaacgggcccuccuccccuccuugcaccgagauuaaucaaaggcucuuuucagagccaccaaaaaaaaaaaaaaaaaaaaaaaaaaaaaaaaaaaaaaaaaaaaaaaaaaaaaaaaaaaaaaaaaaaaaaaaaaaaaaaaaaaaaaaaaaaaaaaaaaaaa

SEQ ID NO: 39668 - RNA, 1686 nt, Artificial Sequence
  mRNA product Design i-3 (hSL-A100) comprising derived and/or modified sequence from LASV(LASV035-NIG-2009;Clade II)__AIT17588__GPCmut11 (opt1)
aggagaaagcuuaccaugggccagaucaucaccuucuuccaggaggugccccacgucaucgaggaggugaugaacaucgugcugaucgcccucagccugcuggccauccucaaggggaucuacaacgucgcgaccugcggccuguucgggcugguguccuuccuccugcugugcggccgcagcugcuccacgaccuacaaggggguguacgagcuccagacccuggagcuggacauggccagccucaacaugaccaugccgcuguccugcacgaagaacaacagccaccacuacaucauggucggcaacgagaccggccuggagcucacccugaccaacacguccaucaucaaccacaaguucugcaaccugagcgacgcccacaagaagaaccucuacgaccacgcccugauguccaucaucagcaccuuccaccuguccauccccaacuucaaccaguacgaggccaugagcugcgacuucaacgggggcaagaucuccgugcaguacaaccucagccacgcguacgccguggacgccgccaaccacugcgggaccaucgcgaacggcguccugcagaccuucaugcggauggccuggggcggguccuacaucgcccuggacagcggcaagggguccugggacugcaucaugacgagcuaccaguaccucaucauccagaacaccaccugggaggaccacugccaguucucccgccccagccccaucggcuaccuggggcugcucagccagcggacccgcgacaucuacaucucccggcgccugcugggcacguucaccuggacccucagcgacuccgagggcaacgagacccccgggggcuacugccugacgcgguggaugcugaucgaggccgagcucaagugcuucgggaacaccgccguggcgaagugcaacgagaagcacgacgaggaguucugcgacaugcugcgccuguucgacuucaacaagcaggccauccggcgccucaaggccgaggcccagaugagcauccagcugaucaacaaggccgugaacgcgcugaucaacgaccagcucaucaugaagaaccaccuccgggacaucaugggcauccccuacugcaacuacuccaaguacugcuaccugaaccacaccgucaccgggaagacgagccugccccgcugcugccugguguccaacggcagcuaccugaacgagacccacuucuccgacgacaucgagcagcaggccgacaacaugaucaccgagcuccugcagaaggaguacaucgaccggcagggcaagaccccgcuggggcucguggaccuguucgucuucagcacguccuucuaccugaucagcaucuuccugcaccucgugaagaucccgacccaccgccacgugaucggcaagcccugccccaagccccaccggcugaaccacauggggaucugcuccugcggccuguacaagcacccggggguccccgugaaguggaagcgcugaggacuaguuauaagacugacuagcccgaugggccucccaacgggcccuccuccccuccuugcaccgagauuaaucaaaggcucuuuucagagccaccaaaaaaaaaaaaaaaaaaaaaaaaaaaaaaaaaaaaaaaaaaaaaaaaaaaaaaaaaaaaaaaaaaaaaaaaaaaaaaaaaaaaaaaaaaaaaaaaaaaaa

SEQ ID NO: 39669 - RNA, 1686 nt, Artificial Sequence
  mRNA product Design i-3 (hSL-A100) comprising derived and/or modified sequence from LASV(LASV1000-NIG-2009;Clade II)__AIT17782__GPCmut11 (opt1)
aggagaaagcuuaccaugggccagaucaucaccuucuuccaggaggugccccacgucaucgaggaggugaugaacaucgugcugaucgcccucagccugcuggccauccucaaggggaucuacaacgucgcgaccugcggccuguucgggcugguguccuuccuccugcugugcggccgcagcugcuccacgaccuacaaggggguguacgagcuccagacccuggagcuggacauggccagccucaacaugaccaugccgcuguccugcacgaagaacaacagccaccacuacaucauggucggcaacgagaccggccuggagcucacccugaccaacacguccaucaucaaccacaaguucugcaaccugagcgacgcccacaagaagaaccucuacgaccacgcccugauguccaucaucagcaccuuccaccuguccauccccaacuucaaccaguacgaggccaugagcugcgacuucaacgggggcaagaucuccgugcaguacaaccucagccacaccuacgcgguggacgccgccaaccacugcgggaccaucgccaacggcguccugcagacguucaugcggauggcguggggcggguccuacaucgcccuggacagcggcaagggguccugggacugcaucaugaccagcuaccaguaccucaucauccagaacaccaccugggaggaccacugccaguucucccgccccagccccaucggcuaccuggggcugcucagccagcggacgcgcgacaucuacaucucccggcgccugcugggcaccuucaccuggacccucagcgacuccgagggcaacgagacgcccgggggcuacugccugacccgguggaugcugaucgaggccgagcucaagugcuucgggaacaccgccguggccaagugcaacgagaagcacgacgaggaguucugcgacaugcugcgccuguucgacuucaacaagcaggcgaucaagcggcucaagaccgaggcccagaugagcauccagcugaucaacaaggccgugaacgcccugaucaacgaccagcucaucaugaagaaccaccuccgcgacaucaugggcauccccuacugcaacuacuccaaguacugcuaccugaaccacacggucaccgggaagaccagccugccccggugcugccugguguccaacggcagcuaccugaacgagacccacuucuccgacgacaucgagcagcaggccgacaacaugaucacggagcuccugcagaaggaguacaucgaccgccagggcaagaccccgcuggggcucguggaccuguucgucuucagcaccuccuucuaccugaucagcaucuuccugcaccucgugaagaucccgacccaccggcacguggucggcaagcccugccccaagccccaccgccugaaccacauggggaucugcuccugcggccuguacaagcacccgggggugcccgugaaguggaagcggugaggacuaguuauaagacugacuagcccgaugggccucccaacgggcccuccuccccuccuugcaccgagauuaaucaaaggcucuuuucagagccaccaaaaaaaaaaaaaaaaaaaaaaaaaaaaaaaaaaaaaaaaaaaaaaaaaaaaaaaaaaaaaaaaaaaaaaaaaaaaaaaaaaaaaaaaaaaaaaaaaaaaa

SEQ ID NO: 39670 - RNA, 1686 nt, Artificial Sequence
  mRNA product Design i-3 (hSL-A100) comprising derived and/or modified sequence from LASV(LASV221-NIG-2010;Clade II)__AIT17624__GPCmut11 (opt1)
aggagaaagcuuaccaugggccagaucaucaccuucuuccaggaggugccccacgucaucgaggaggugaugaacaucgugcugaucgcccucagccugcuggccauccucaaggggaucuacaacgucgcgaccugcggccuguucgggcugguguccuuccuccugcugugcggccgcagcugcuccacgaccuacaaggggguguacgagcuccagacccuggagcuggacauggccagccucaacaugaccaugccgcuguccugcacgaagaacaacagccaccacuacaucauggucggcaacgagaccggccuggagcucacccugaccaacacguccaucaucaaccacaaguucugcaaccugagcgacgcccacaagaagaaccucuacgaccacgcccugauguccaucaucagcaccuuccaccuguccauccccaacuucaaccaguacgaggccaugagcugcgacuucaacgggggcaagaucuccgugcaguacaaccucagccacaccuacgcgaucgacgccgccaaccacugcgggaccaucgccaacggcgugcugcagacguucaugcggauggcguggggcggguccuacaucgcccuggacagcggcaagggguccugggacugcaucaugaccagcuaccaguaccucaucauccagaacaccaccugggaggaccacugccaguucucccgccccagccccaucggcuaccuggggcugcucagccagcggacgcgcgacaucuacaucucccggcgccugcugggcaccuucaccuggacccucagcgacuccgagggcaacgagacgcccgggggcuacugccugacccgguggaugcugaucgaggccgagcucaagugcuucgggaacaccgccgucgccaagugcaacgagaagcacgacgaggaguucugcgacaugcugcgccuguucgacuucaacaagcaggcgauccggcgccucaagaccgaggcccagaugagcauccagcugaucaacaaggccgugaacgcccugaucaacgaccagcucaucaugaagaaccaccuccgggacaucaugggcauccccuacugcaacuacuccaaguacugcuaccugaaccacacggugaccgggaagaccagccugccccgcugcugccuggucuccaacggcagcuaccugaacgagacccacuucuccgacgacaucgagcagcaggccgacaacaugaucacggagaugcuccagaaggaguacauggaccggcagggcaagaccccgcuggggcugguggaccucuucguguucagcaccuccuucuaccugaucagcaucuuccugcaccuggucaagaucccgacccaccgccacgugaucggcaagcccugccccaagccccaccggcucaaccacauggggaucugcuccugcggccuguacaagcacccgggggugcccgucaaguggaagcgcugaggacuaguuauaagacugacuagcccgaugggccucccaacgggcccuccuccccuccuugcaccgagauuaaucaaaggcucuuuucagagccaccaaaaaaaaaaaaaaaaaaaaaaaaaaaaaaaaaaaaaaaaaaaaaaaaaaaaaaaaaaaaaaaaaaaaaaaaaaaaaaaaaaaaaaaaaaaaaaaaaaaaa

SEQ ID NO: 39671 - RNA, 1686 nt, Artificial Sequence
  mRNA product Design i-3 (hSL-A100) comprising derived and/or modified sequence from LASV(LASV237-NIG-2010;Clade II)__AIT17638__GPCmut11 (opt1)
aggagaaagcuuaccaugggccagaucaucaccuucuuccaggaggugccccacgucaucgaggaggugaugaacaucgugcugaucgcccucagccugcuggccauccucaaggggaucuacaacgucgcgaccugcggccuguucgggcugguguccuuccuccugcugugcggccgcagcugcuccacgaccuacaaggggguguacgagcuccagacccuggagcuggacauggccagccucaacaugaccaugccgcuguccugcacgaagaacaacagccaccacuacaucauggucggcaacgagaccggccuggagcucacccugaccaacacguccaucaucaaccacaaguucugcaaccugagcgacgcccacaagaaggaccucuacgaccacgcccugauguccaucaucagcaccuuccaccuguccauccccaacuucaaccaguacgaggccaugagcugcgacuucaacgggggcaagaucuccgugcaguacaaccucagccacaccuacgcgguggacgccgccaaccacugcgggaccaucgccaacggcguccugcagacguucaugcggauggcguggggcggguccuacaucgcccuggacagcggcaagggguccugggacugcaucaugaccagcuaccaguaccucaucauccagaacaccaccugggaggaccacugccaguucucccgccccagccccaucggcuaccuggggcugcucagccagcggacgcgcgacaucuacaucucccggcgccugcugggcaccuucaccuggacccucagcgacuccgagggcaacgagacgcccgggggcuacugccugacccgguggaugcugaucgaggccgagcucaagugcuucgggaacaccgccguggccaagugcaacgagaagcacgacgaggaguucugcgacaugcugcgccuguucgacuucaacaagcaggcgauccggcgccucaagaccgaggcccagaugagcauccagcugaucaacaaggccgugaacgcccugaucaacgaccagcucaucaugaagaaccaccuccgggacaucaugggcauccccuacugcaacuacuccaaguacugcuaccugaaccacacggucaccgggaagaccagccugccccgcugcugccugguguccaacggcagcuaccugaacgagacccacuucuccgacgacaucgagcagcaggccgacaacaugaucacggagcuccugcagaaggaguacauggaccggcagggcaagaccccgcuggggcucguggaccuguucgucuucagcaccuccuucuaccugaucagcaucuuccugcaccucaucaagaucccgacccaccgccacaucacgggcaagcccugccccaagccccaccggcugaaccacauggggaucugcuccugcggccuguacaagcacccgggggugcccgugaaguggaagcgcugaggacuaguuauaagacugacuagcccgaugggccucccaacgggcccuccuccccuccuugcaccgagauuaaucaaaggcucuuuucagagccaccaaaaaaaaaaaaaaaaaaaaaaaaaaaaaaaaaaaaaaaaaaaaaaaaaaaaaaaaaaaaaaaaaaaaaaaaaaaaaaaaaaaaaaaaaaaaaaaaaaaaa

SEQ ID NO: 39672 - RNA, 1686 nt, Artificial Sequence
  mRNA product Design i-3 (hSL-A100) comprising derived and/or modified sequence from LASV(LASV253-NIG-2011;Clade II)__AIT17670__GPCmut11 (opt1)
aggagaaagcuuaccaugggccagaucaucaccuucuuccaggaggugccccacgucaucgaggaggugaugaacaucgugcugaucgcccucagccugcuggccauccucaaggggaucuacaacgucgcgaccugcggccuguucgggcugguguccuuccuccugcugugcggccgcagcugcuccacgaccuacaaggggguguacgagcuccagacccuggagcuggacauggccagccucaacaugaccaugccgcuguccugcacgaagaacaacagccaccacuacaucauggucggcaacgagaccggccuggagcucacccugaccaacacguccaucaucaaccacaaguucugcaaccugagcgacgcccacaagaagaaccucuacgaccacgcccugauguccaucaucagcaccuuccaccuguccauccccaacuucaaccaguacgaggccaugagcugcgacuucaacgggggcaagaucuccgugcaguacaaccucagccacaccuacgcgguggacgccgccaaccacugcgggaccaucgccaacggcguccugcagacguucaugcggauggcguggggcggguccuacaucgcccuggacagcggcaagggguccugggacugcaucaugaccagcuaccaguaccucaucauccagaacaccaccugggaggaccacugccaguucucccgccccagccccaucggcuaccuggggcugcucagccagcggacgcgcgacaucuacaucucccggcgccugcugggcaccuucaccuggacccucagcgacuccgagggcaacgagacgcccgggggcuacugccugacccgguggaugcugaucgaggccgagcucaagugcuucgggaacaccgccguggccaagugcaacgagaagcacgacgaggaguucugcgacaugcugcgccuguucgacuucaacaagcaggcgauccggcgccucaaggccgaggcccagaugagcauccagcugaucaacaaggccgugaacgcccugaucaacgaccagcucaucaugaagaaccaccuccgggacaucaugggcaucccguacugcaacuacuccaaguacugcuaccugaaccacaccgucacggggcgcaccagccugccccggugcugccugguguccaacggcagcuaccugaacgagacccacuucuccgacgacaucgagcagcaggcggacaacaugaucaccgagcuccugcagaaggaguacaucgaccgccagggcaagacgccccuggggcucguggaccuguucgucuucagcaccuccuucuaccugaucagcaucuuccugcaccucgugaagaucccgacccaccggcacaucaucggcaagcccugccccaagccccaccgccugaaccacauggggaucugcuccugcggccuguacaagcacccgggggugcccgucaaguggaagcggugaggacuaguuauaagacugacuagcccgaugggccucccaacgggcccuccuccccuccuugcaccgagauuaaucaaaggcucuuuucagagccaccaaaaaaaaaaaaaaaaaaaaaaaaaaaaaaaaaaaaaaaaaaaaaaaaaaaaaaaaaaaaaaaaaaaaaaaaaaaaaaaaaaaaaaaaaaaaaaaaaaaaa

SEQ ID NO: 39673 - RNA, 1686 nt, Artificial Sequence
  mRNA product Design i-3 (hSL-A100) comprising derived and/or modified sequence from LASV(LASV254-NIG-2011;Clade II)__AIT17674__GPCmut11 (opt1)
aggagaaagcuuaccaugggccagaucaucaccuucuuccaggaggugccccacgucaucgaggaggugaugaacaucgugcugaucgcccucagccugcuggccauccucaaggggaucuacaacgucgcgaccugcggccuguucgggcugguguccuuccuccugcugugcggccgcagcugcuccacgaccuacaaggggguguacgagcuccagacccuggagcuggacaugaccaaccucaacaugacgaugccgcugagcugcaccaagaacaacucccaccacuacaucauggucggcaacgagaccggccuggagcucacccugacgaacaccagcaucaucaaccacaaguucugcaaccuguccgacgcccacaagaagaaccucuacaaccacgcccugaugagcaucaucuccaccuuccaccugagcauccccaacuucaaccaguacgaggccauguccugcgacuucaacgggggcaagaucagcgugcaguacaaccucucccacagcuacgccguggacgcggccaaccacugcgggaccaucgccaacggcguccugcagacguucaugcggauggccuggggcggguccuacaucgcgcuggacagcggcaaggggaacugggacugcaucaugaccuccuaccaguaccucaucauccagaacaccaccugggaggaccacugccaguucagccgccccucccccaucggcuaccuggggcugcucagccagcggacgcgcgacaucuacaucagccggcgccugcugggcaccuucaccuggacccucuccgacagcgagggcaacgagacgcccgggggcuacugccugacccgguggaugcugaucgaggccgagcucaagugcuucgggaacaccgccguggccaagugcaacgagaagcacgacgaggaguucugcgacaugcugcgccuguucgacuucaacaagcaggccauccggcgccucaagaccgaggcgcaggccaacauccagcugaucaacaaggccgugaacgcccugaucaacgaccagcucaucaugaagaaccaccuccgggacaucaugggcauccccuacugcaacuacuccaaguacugcuaccugaaccacacggucaccgggaagaccagccugccccgcugcugccugguguccaacggcagcuaccugaacgagacccacuucuccgacgacaucgagcagcaggccgacaacaugaucacggagcuccugcagaaggaguacauggaccggcagggcaagaccccgcuggggcucguggaccuguucgucuucagcaccuccuucuaccugaucagcaucuuccugcaccucgugaagaucccgacccaccgccacgugaucggcaagcccugccccaagccccaccggcugaaccacauggggaucugcuccugcggccuguacaagcacccggggguccccgugaaguggaagcgcugaggacuaguuauaagacugacuagcccgaugggccucccaacgggcccuccuccccuccuugcaccgagauuaaucaaaggcucuuuucagagccaccaaaaaaaaaaaaaaaaaaaaaaaaaaaaaaaaaaaaaaaaaaaaaaaaaaaaaaaaaaaaaaaaaaaaaaaaaaaaaaaaaaaaaaaaaaaaaaaaaaaaa

SEQ ID NO: 39674 - RNA, 1686 nt, Artificial Sequence
  mRNA product Design i-3 (hSL-A100) comprising derived and/or modified sequence from LASV(Nig08-A19;Clade III)__ADU56618__GPCmut11 (opt1)
aggagaaagcuuaccaugggccagaucgugaccuucuuccaggaggucccccacgugaucgaggaggugaugaacaucguccugaucgcccucagcauccuggccauccugaaggggcucuacaacaucgcgaccugcggccugaucgggcuggugacguuccuccugcuguccggccgcagcugcuccaugaccuacaaggggguguacgagcuccagacccuggagcugaacaugaacacccucaacaugacgaugccgcugagcugcaccaagaacaacucccaccacuacaucauggucggcaacgagaccggccuggagcucacccugacgaacaccagccugcuccaccacaaguucugcaaccuguccgacgcccacaagaagaaccuguacgaccacacccucaugagcaucaucuccaccuuccaccugagcauccccaacuucaaccaguacgaggccauguccugcgacuucaacgggggcaagaucacggugcaguacaaccugagccacuccuacgccaucgacgccgcgaaccacugcgggaccguggccaacggcguccuccagaccuucaugcggauggccuggggcgggagcuacaucgcccuggacuccggccgcgggaagugggacugcaucaugaccagcuaccaguaccugaucauccagaacacgaccugggaggaccacugccaguucucccggcccagccccaucggcuaccucgggcugcugucccagcgcacccgggacaucuacaucagccgccggcuccugggcaccuucacguggacccugagcgacuccgagggcaacgagacccccgggggcuacugccucacccgcuggaugcugaucgaggcggagcugaagugcuucgggaacacggccguggccaagugcaacgagaagcacgacgaggaguucugcgacaugcuccggcuguucgacuucaacaagcaggccauccgccggcugaaggccgaggcgcagaugagcauccagcucaucaacaaggccgugaacgcccugaucaacgaccagcugaucaugaagaaccaccuccgcgacaucaugggcauccccuacugcaacuacuccaaguacugcuaccugaaccacaccagcaccgggcggaccucccugccccgcugcugccucgucagcaacggcuccuaccugaacgagacgcacuucagcgacgacaucgagcagcaggccgacaacaugaucaccgagaugcugcagaaggaguaccucgaccggcagggcaagaccccgcuggggcugguggaccuguucguguucuccaccagcuucuaccucaucuccaucuuccugcaccuggucaagaucccgacgcaccgccacaucgugggcaagcccugccccaagccccaccggcucaaccacauggggaucugcagcugcggccuguacaagcagccgggggugcccguccgcuggaagcggugaggacuaguuauaagacugacuagcccgaugggccucccaacgggcccuccuccccuccuugcaccgagauuaaucaaaggcucuuuucagagccaccaaaaaaaaaaaaaaaaaaaaaaaaaaaaaaaaaaaaaaaaaaaaaaaaaaaaaaaaaaaaaaaaaaaaaaaaaaaaaaaaaaaaaaaaaaaaaaaaaaaaa

SEQ ID NO: 39675 - RNA, 1689 nt, Artificial Sequence
  mRNA product Design i-3 (hSL-A100) comprising derived and/or modified sequence from LASV(G1180-SLE-2010;Clade IV)__AIT17168__GPCmut11 (opt1)
aggagaaagcuuaccaugggccagaucgugaccuucuuccaggaggucccccacgugaucgaggaggugaugaacaucguccugaucgcccucagcauccuggccgugcugaaggggcucuacaacuucgcgaccugcggccugguggggcugcucaccuuccugcugcucugcggccgcuccugcaccgccagccgguacaagggggucuacgagcugcagacccuggagcucaacauggagacccugaacaugacgaugccgcuguccugcaccaagaacaacagccaccacuacaucauggugggcaacgagaccggccucgagcugacccugacgaacaccuccaucaucaaccacaaguucugcaaccucagcgacgcccacaagaagaaccuguacgaccacgcccugauguccaucaucagcaccuuccaccucuccauccccaacuucaaccaguacgaggccaugagcugcgacuucaacgggggcaagaucuccgugcaguacaaccugagccacuccuacgcgggggacgccgccaaccacugcggcaccgucgccaacggggugcugcagacguucaugcgcauggcguggggcggcagcuacaucgcccucgacuccgggcacggcagcugggacugcaucaugaccuccuaccaguaccugaucauccagaacaccaccugggaggaccacugccaguucagccggcccucccccaucggguaccugggccuccugagccagcgcacgcgggacaucuacaucagccgccggcugcucggcaccuucaccuggacccuguccgacagcgaggggaaggacacgccgggcggguacugccugacccgcuggaugcucaucgaggccgagcugaagugcuucggcaacaccgccguggccaagugcaacgagaagcacgacgaggaguucugcgacaugcugcggcuguucgacuucaacaagcaggcgauccagcgccugaaggccgaggcccagauguccauccagcugaucaacaaggccgucaacgcccucaucaacgaccagcugaucaugaagaaccaccuccgggacaucauggggauccccuacugcaacuacagcaaguacugcuaccucaaccacaccacgaccggcaagaccucccugcccaagugcugccuggugagcaacggcuccuaccucaacgagacccacuucagcgacgacaucgagcagcaggcggacaacaugaucacggagaugcugcagaaggaguacauggagcgccaggggaagacgccccugggccucguggaccuguucgucuucuccaccagcuucuaccugaucuccaucuuccugcaccucgugaagaucccgacccaccggcacaucgugggcaagagcugccccaagccccaccgccugaaccacauggggaucugcuccugcgggcuguacaagcagcccggcgucccggugaaguggaagcggugaggacuaguuauaagacugacuagcccgaugggccucccaacgggcccuccuccccuccuugcaccgagauuaaucaaaggcucuuuucagagccaccaaaaaaaaaaaaaaaaaaaaaaaaaaaaaaaaaaaaaaaaaaaaaaaaaaaaaaaaaaaaaaaaaaaaaaaaaaaaaaaaaaaaaaaaaaaaaaaaaaaaa

SEQ ID NO: 39676 - RNA, 1689 nt, Artificial Sequence
  mRNA product Design i-3 (hSL-A100) comprising derived and/or modified sequence from LASV(G1442-SLE-2011;Clade IV)__AIT17180__GPCmut11 (opt1)
aggagaaagcuuaccaugggccagaucgugaccuucuuccaggaggucccccacgugaucgaggaggugaugaacaucguccugaucgcccucagcauccuggccgugcugaaggggcucuacaacguggcgaccugcggccugaucgggcuggucacguuccuccugcugugcggccgcuccugcaccaccacccucuacaaggggguguacgagcugcagacgcuggagcucaacauggagacccugaacaugaccaugccgcugagcugcaccaagaacaacucccaccacuacauccgggugggcaacgagacgggccucgagcugacccugaccaacaccagcaucaucaaccacaaguucugcaaccucuccgacgcccacaagaagaaccuguacgaccacgcccugaugagcaucaucuccacguuccaccucagcauccccaacuucaaccaguacgaggccauguccugcgacuucaacgggggcaagaucagcguccaguacaaccugucccacagcuacgccggggacgcggccaaccacugcggcaccguggccaacggggugcugcagaccuucaugcgcauggccuggggcggcuccuacaucgcgcucgacagcgggcggggcaacugggacugcaucaugaccuccuaccaguaccugaucauccagaacacgaccugggacgaccacugccaguucagccgccccucccccaucggguaccugggccuccugagccagcggacccgcgacgucuacaucucccggcgccugcucggcaccuucacguggacccugagcgacagcgaggggaaggacaccccgggcggguacugccugacccgguggaugcucaucgaggccgagcugaagugcuucggcaacacggccguggccaagugcaacgagaagcacgacgaggaguucugcgacaugcugcgccucuucgacuucaacaagcaggccauccagcggcugaaggcggaggcccagauguccauccagcugaucaacaaggccgugaacgcccucaucaacgaccagcugaucaugaagaaccaccuccgcgacaucauggggauccccuacugcaacuacagcaaguacugcuaccugaacaacaccgccaccggcaagaccucccugcccaagugcugccugaucagcaacggcuccuaccucaacgagacgcacuucagcgacgacaucgagcaggaggcggacaacaugaucaccgagaugcugcagaaggaguacauggagcggcaggggaagacgccccugggccucgucgaccuguucguguucuccaccagcuucuaccugaucuccaucuuccugcaccucgugaagaucccgacccaccgccacaucgucggcaagagcugccccaagccccaccggcugaaccacauggggaucugcuccugcgggcuguacaagcagcccggcgugccggugcgcuggaagcggugaggacuaguuauaagacugacuagcccgaugggccucccaacgggcccuccuccccuccuugcaccgagauuaaucaaaggcucuuuucagagccaccaaaaaaaaaaaaaaaaaaaaaaaaaaaaaaaaaaaaaaaaaaaaaaaaaaaaaaaaaaaaaaaaaaaaaaaaaaaaaaaaaaaaaaaaaaaaaaaaaaaaa

SEQ ID NO: 39677 - RNA, 1689 nt, Artificial Sequence
  mRNA product Design i-3 (hSL-A100) comprising derived and/or modified sequence from LASV(G3010-SLE-2013;Clade IV)__AIT17344__GPCmut11 (opt1)
aggagaaagcuuaccaugggccagaucgugaccuucuuccaggaggucccccacgugaucgaggaggugaugaacaucguccugaucgcccucagcauccuggccgugcugaaggggcucuacaacuucgcgaccugcggccugguggggcuggucacguuccuccugcugugcggccgcuccugcaccaccagccucuacaaggggguguacgagcugcagacccuggagcucaacauggagacgcugaacaugaccaugccgcuguccugcaccaagaacaacagccaccacuacaucauggugggcaacgagaccggccucgagcugacgcugaccaacaccuccaucaucaaccacaaguucugcaaccucagcgacgcccacaagaagaaccuguacaaccacgcccugauguccaucaucagcaccuuccaccucuccauccccaacuucaaccaguacgaggccaugagcugcgacuucaacgggggcaagaucuccguccaguacaaccugagccacuccuacgccggggacgcggccagccacugcggcacgguggccaacggggugcugcagaccuucaugcggauggccuggggcggcuccuacaucgcgcucgacagcggguacggcaagugggacugcaucaugaccuccuaccaguaccugaucauccagaacaccacgugggaggaccacugccaguucagccgccccucccccaucggguaccugggccuccugagccagcggacccgcgacaucuacaucagccggcgccugcucggcaccuucaccuggacgcuguccgacagcgaggggaaggacaccccgggcggguacugccugacccgguggaugcucaucgaggccgagcugaagugcuucggcaacaccgccgucgccaagugcaacgagaagcacgacgaggaguucugcgacaugcugcgccucuucgacuucaacaagcaggccauccagcggcugaagacggaggcgcagauguccauccagcugaucaacaaggccgugaacgcccucaucaacgaccagcugaucaugaagaaccaccuccgcgacaucauggggauccccuacugcaacuacagcaaguacugcuaccugaaccacaccaccaccggcaagacgucccugcccaagugcugccuggugagcaacggcuccuaccucaacgagacccacuucagcgacgacaucgagcagcaggccgacaacaugaucaccgagaugcugcagaaggaguacauggagcggcaggggaagacgccccugggccucgucgaccuguucguguucuccaccagcuucuaccugaucuccaucuuccugcaccucgugaagaucccgacccaccgccacaucgucggcaagagcugccccaagccccaccggcugaaccacauggggaucugcuccugcgggcuguacaagcagcccggcgugccggugcgcuggaagcggugaggacuaguuauaagacugacuagcccgaugggccucccaacgggcccuccuccccuccuugcaccgagauuaaucaaaggcucuuuucagagccaccaaaaaaaaaaaaaaaaaaaaaaaaaaaaaaaaaaaaaaaaaaaaaaaaaaaaaaaaaaaaaaaaaaaaaaaaaaaaaaaaaaaaaaaaaaaaaaaaaaaaa

SEQ ID NO: 39678 - RNA, 1689 nt, Artificial Sequence
  mRNA product Design i-3 (hSL-A100) comprising derived and/or modified sequence from LASV(G502-SLE-2009;Clade IV)__AIT17126__GPCmut11 (opt1)
aggagaaagcuuaccaugggccagaucgugaccuucuuccaggaggucccccacgugaucgaggaggugaugaacaucguccugaucgcccucagcauccuggccgugcugaaggggcucuacaacuucgcgaccugcggccugguggggcugcucacguuccugcugcucugcggccgcuccugcaccaccgggcuguacaagggcgucuacgagcugcagacccucgagcugaacauggagacgcugaacaugaccaugccgcucagcugcaccaagaacaacucccaccacuacaucauggugggcaacgagaccgggcuggagcugacgcucaccaacaccagcaucaucaaccacaaguucugcaaccuguccgacgcccacaagaagaaccuguacgaccacgcccucaugagcaucaucuccaccuuccaccugagcauccccaacuucaaccaguacgaggccauguccugcgacuucaacggcgggaagaucagcgugcaguacaaccugucccacagcuacgccggcgacgcggccgaccacugcgggacggucgccaacggcgugcuccagaccuucaugcggauggccuggggcggguccuacaucgcgcuggacagcggccgcgggcggugggacugcaucaugaccuccuaccaguaccugaucauccagaacaccacgugggaggaccacugccaguucagccgccccucccccaucggcuaccucggccugcugagccagcggacccgcgacaucuacaucucccggcgccuccuggggaccuucaccuggacgcugagcgacagcgagggcaaggacacccccgggggcuacugccucacccgguggaugcugaucgaggccgagcugaagugcuucgggaacaccgccguggccaagugcaacgagaagcacgacgaggaguucugcgacaugcuccgccuguucgacuucaacaagcaggccauccagcggcugaaggcggaggcccagauguccauccagcucaucaacaaggccgucaacgcccugaucaacgaccagcuggugaugaagaaccaccuccgcgacaucaugggcauccccuacugcaacuacagccgguacugcuaccugaaccacacgaccaccggccgcaccucccugcccaagugcugccucgugagcaacggguccuaccugaacgagacgcacuucagcgacgacaucgagcagcaggccgacaacaugaucaccgagaugcugcagaaggaguacauggagcggcagggcaagaccccgcucgggcuggucgaccuguucguguucuccaccagcuucuaccugaucuccaucuuccuccaccuggugaagaucccgacgcaccgccacaucgucggcaagagcugccccaagccccaccggcugaaccacauggggaucugcuccugcggccucuacaagcagcccggcgugccggugaaguggaagcgcugaggacuaguuauaagacugacuagcccgaugggccucccaacgggcccuccuccccuccuugcaccgagauuaaucaaaggcucuuuucagagccaccaaaaaaaaaaaaaaaaaaaaaaaaaaaaaaaaaaaaaaaaaaaaaaaaaaaaaaaaaaaaaaaaaaaaaaaaaaaaaaaaaaaaaaaaaaaaaaaaaaaaa

SEQ ID NO: 39679 - RNA, 1689 nt, Artificial Sequence
  mRNA product Design i-3 (hSL-A100) comprising derived and/or modified sequence from LASV(G733-SLE-2010;Clade IV)__AIT17154__GPCmut11 (opt1)
aggagaaagcuuaccaugggccagaucgugaccuucuuccaggaggucccccacgugaucgaggaggugaugaacaucguccugaucgcccucagcauccuggccgugcugaaggggcucuacaacuucgcgaccugcggcaucguggggcuggucuccuuccugcuccugugcggccgcagcugcacgaccucccuguacaaggggguguacgagcuccagacccuggagcugaacauggagacccucaacaugacgaugccgcugagcugcaccaagaacaacucccaccacuacaucauggugggcaacgagaccggccuggagcucacccugacgaacaccagcaucaucaaccacaaguucugcaaccuguccgacgcccacaagaagaaccucuacgaccacgcccugaugagcaucaucuccaccuuccaccugagcauccccaacuucaaccaguacgaggccauguccugcgacuucaacgggggcaagaucagcguccaguacaaccucucccacagcuacgccggggacgcggccaaccacugcggcaccaucgccaacggggugcugcagacguucaugcggauggccuggggcggcuccuacaucgcgcuggacagcgggcgcgaccggugggacugcaucaugaccuccuaccaguaccucaucauccagaacaccaccugggaggaccacugccaguucagccgccccucccccaucggcuaccuggggcugcucagccagcggacgcgcgacaucuacaucagccggcgccugcugggcaccuucaccuggacccucuccgacagcgagggcaaggacacgcccgggggcuacugccugacccgguggaugcugaucgaggccgagcucaagugcuucgggaacaccgccguggccaagugcaacgagaagcacgacgaggaguucugcgacaugcugcgccuguucgacuucaacaagcaggccauccagcggcucaaggcggaggcccagauguccauccagcugaucaacaaggccgucaacgcccugaucaacgaccagcucaucaugaagaaccaccuccgcgacaucaugggcauccccuacugcaacuacagcaaguacugcuaccugaaccacaccacgaccgggaagaccucccugcccaagugcugccuggugagcaacggcuccuaccugaacgagacccacuucagcgacgacaucgagcagcaggccgacaacaugaucacggagaugcuccagaaggaguacauggagcggcagggcaagaccccgcuggggcugguggaccucuucgucuucuccaccagcuucuaccugaucuccaucuuccugcaccuggugaagaucccgacccaccgccacguggucggcaagagcugccccaagccccaccggcucaaccacauggggaucugcuccugcggccuguacgggcagcccggcgugccggugaaguggaagcgcugaggacuaguuauaagacugacuagcccgaugggccucccaacgggcccuccuccccuccuugcaccgagauuaaucaaaggcucuuuucagagccaccaaaaaaaaaaaaaaaaaaaaaaaaaaaaaaaaaaaaaaaaaaaaaaaaaaaaaaaaaaaaaaaaaaaaaaaaaaaaaaaaaaaaaaaaaaaaaaaaaaaaa

SEQ ID NO: 39680 - RNA, 1689 nt, Artificial Sequence
  mRNA product Design i-3 (hSL-A100) comprising derived and/or modified sequence from MOPV/LASV reassortant(IGS-1;Clade IV)__AFY05576__GPCmut11 (opt1)
aggagaaagcuuaccaugggccagaucgugaccuucuuccaggaggucccccacgugaucgaggaggugaugaacaucguccugaucgcccucagcgugcuggccgugcugaaggggcucuacaacuucgcgaccugcggccuggucgggcuggugacguuccuccugcugugcggccgcuccugcaccaccagccucuacaaggggguguacgagcugcagacccuggagcucaacauggagacgcugaacaugaccaugccgcuguccugcaccaagaacaacagccaccacuacaucauggucggcaacgagaccggccucgagcugacgcugaccaacaccuccaucaucaaccacaaguucugcaaccucagcgacgcccacaagaagaaccuguacgaccacgcccugauguccaucaucagcaccuuccaccucuccauccccaacuucaaccaguacgaggccaugagcugcgacuucaacgggggcaagaucuccgugcaguacaaccugagccacuccuacgccggggacgcggccaaccacugcggcacgguggccaacgggguccugcagaccuucaugcggauggccuggggcggcagcuacaucgcgcucgacuccgggcgcggcaacugggacugcaucaugaccagcuaccaguaccugaucauccagaacaccacgugggaggaccacugccaguucucccggcccagccccaucggguaccugggccuccugucccagcgcacccgggacaucuacaucagccgccggcugcucggcaccuucaccuggacgcugagcgacuccgagggggaggacaccccgggcggguacugccugacccgcuggaugcucaucgaggccgagcugaagugcuucggcaacaccgccguggccaagugcaacgagaagcacgacgaggaguucugcgacaugcugcggcuguucgacuucaacaagcaggccauccagcgccugaaggcggaggcccagaugagcauccagcugaucaacaaggccgugaacgcccucaucaacgaccagcugaucaugaagaaccaccuccgggacaucauggggauccccuacugcaacuacuccaaguacugcuaccucaaccacacgaccaccggccgcaccagccugcccaagugcugccuggucuccaacggcagcuaccucaacgagacgcacuucuccgacgacaucgagcagcaggccgacaacaugaucaccgagaugcugcagaaggaguacauggagcggcaggggaagacgccccugggccucguggaccuguucguguucagcaccuccuucuaccugaucagcaucuuccugcaccucgucaagaucccgacccaccgccacaucguggggaaguccugccccaagccccaccggcugaaccacaugggcaucugcagcugcgggcuguacaagcagcccggcgugccggucaaguggaagcgcugaggacuaguuauaagacugacuagcccgaugggccucccaacgggcccuccuccccuccuugcaccgagauuaaucaaaggcucuuuucagagccaccaaaaaaaaaaaaaaaaaaaaaaaaaaaaaaaaaaaaaaaaaaaaaaaaaaaaaaaaaaaaaaaaaaaaaaaaaaaaaaaaaaaaaaaaaaaaaaaaaaaaa

SEQ ID NO: 39681 - RNA, 1689 nt, Artificial Sequence
  mRNA product Design i-3 (hSL-A100) comprising derived and/or modified sequence from LASV(LM765-SLE-2012;Clade IV)__AIT17814__GPCmut11 (opt1)
aggagaaagcuuaccaugggccagaucgugaccuucuuccaggaggucccccacgugaucgaggaggugaugaacaucguccugaucgcccucagcauccuggccgugcugaaggggcucuacaacuucgcgaccugcggccugguggggcuggucacguuccuccugcugugcggccgcuccugcaccaccagccucuacaaggggguguacgagcugcagacccuggagcucaacauggagacgcugaacaugaccaugccgcuguccugcaccaagaacaacagccaccacuacaucauggugggcaacgagaccggccucgagcugacgcugaccaacaccuccaucaucgaccacaaguucugcaaccucagcgacgcccaccggaagaaccuguacgaccacgcccugauguccaucaucagcaccuuccaccucuccauccccaacuucaaccaguacgaggccaugagcugcgacuucaacgggggcaagaucuccguccaguacaaccugagccacuccuacgccaaggacgcggccgaccacugcgggacgguggccaacggcgugcugcagaccuucaugcgcauggccuggggcgggagcuacaucgcgcucgacuccggccgggggcgcugggacugcaucaugaccagcuaccaguaccugaucauccagaacaccacgugggaggaccacugccaguucucccggcccagccccaucggcuaccuggggcuccugucccagcgcacccgggacaucuacaucagccgccggcugcucggcaccuucaccuggacgcugagcgacuccgagggcaaggacacccccgggggcuacugccugacccgcuggaugcucaucgaggccgagcugaagugcuucgggaacaccgccgucgccaagugcaacgagaagcacgacgaggaguucugcgacaugcugcggcuguucgacuucaacaagcaggccauccagcgccugaaggcggaggcccagaugagcauccagcugaucaacaaggccgugaacgcccucaucaacgaccagcugaucaugaagaaccaccuccgggacaucaugggcauccccuacugcaacuacuccaaguacugcuaccucaaccacacgaccaccgggaagaccagccugcccaagugcugccugguguccaacggcagcuaccucaacgagacgcacuucuccgacgacaucgagcagcaggccgacaacaugaucaccgagaugcugcagaaggaguacauggagcgccagggcaagaccccgcuggggcucgucgaccuguucguguucagcaccuccuucuaccugaucagcaucuuccugcaccucgugaagaucccgacgcaccggcacaucgucggcaagcccugccccaagccccaccgccugaaccacauggggaucugcuccugcggccuguacaagcagccgggggugcccgugaaguggaagcggugaggacuaguuauaagacugacuagcccgaugggccucccaacgggcccuccuccccuccuugcaccgagauuaaucaaaggcucuuuucagagccaccaaaaaaaaaaaaaaaaaaaaaaaaaaaaaaaaaaaaaaaaaaaaaaaaaaaaaaaaaaaaaaaaaaaaaaaaaaaaaaaaaaaaaaaaaaaaaaaaaaaaa

SEQ ID NO: 39682 - RNA, 1689 nt, Artificial Sequence
  mRNA product Design i-3 (hSL-A100) comprising derived and/or modified sequence from LASV(LM776-SLE-2012;Clade IV)__AIT17824__GPCmut11 (opt1)
aggagaaagcuuaccaugggccagaucgugaccuucuuccaggaggucccccacgugaucgaggaggugaugaacaucguccugaucgcccucagcauccuggccgugcugaaggggcucuacaacuucgcgaccugcggccugguggggcuggucacguuccuccugcugugcggccgcuccugcaccaccagcguguacaaggggguguacgagcuccagacccuggagcugaacauggagacgcucaacaugaccaugccgcuguccugcaccaagaacaacagccaccacuacaucauggucggcaacgagaccggccuggagcucacgcugaccaacaccuccaucaucaaccacaaguucugcaaccugagcgacgcccacaagaagaaccucuacgaccacgcccugauguccaucaucagcaccuuccaccuguccauccccaacuucaaccaguacgaggccaugagcugcgacuucaacgggggcaagaucuccgugcaguacaaccucagccacuccuacgccggggacgcggccaaccacugcggcacgguggccaacgggguccugcagaccuucaugcggauggccuggggcggcagcuacaucgcgcuggacuccgggcacggcaagugggacugcaucaugaccagcuaccaguaccucaucauccagaacaccacgugggaggaccacugccaguucucccgccccagccccaucggguaccugggccugcucucccagcggacccgcgacaucuacaucagccggcgccugcugggcaccuucaccuggacgcucagcgacuccgaggggaaggacaccccgggcggguacugccugacccgguggaugcugaucgaggccgagcucaagugcuucggcaacaccgccguggccaagugcaacgagaagcacgacgaggaguucugcgacaugcugcgccuguucgacuucaacaagcaggccauccagcggcucaaggcggaggcccagaugagcauccagcugaucaacaaggccgugaacgcccugaucaacgaccagcucaucaugaagaaccaccuccgcgacaucauggggauccccuacugcaacuacuccaaguacugcuaccugaaccacacgaccaccggcaagaccagccugcccaagugcugccuggucuccaacggcagcuaccugaacgagacgcacuucuccgacgacaucgagcagcaggccgacaacaugaucaccgagaugcuccagaaggaguacauggagcggcaggggaagacgccccugggccugguggaccucuucguguucagcaccuccuucuaccugaucagcaucuuccugcaccuggucaagaucccgacccaccgccacaucguggggaaguccugccccaagccccaccggcucaaccacaugggcaucugcagcugcgggcuguacaagcagcccggcgugccgguccgcuggaagcggugaggacuaguuauaagacugacuagcccgaugggccucccaacgggcccuccuccccuccuugcaccgagauuaaucaaaggcucuuuucagagccaccaaaaaaaaaaaaaaaaaaaaaaaaaaaaaaaaaaaaaaaaaaaaaaaaaaaaaaaaaaaaaaaaaaaaaaaaaaaaaaaaaaaaaaaaaaaaaaaaaaaaa

SEQ ID NO: 39683 - RNA, 1689 nt, Artificial Sequence
  mRNA product Design i-3 (hSL-A100) comprising derived and/or modified sequence from LASV(Mad39;Clade IV)__ANH09722__GPCmut11 (opt1)
aggagaaagcuuaccaugggccagaucgugaccuucuuccaggaggucccccacgugaucgaggaggugaugaacaucguccugaucgcccucagcauccuggccgugcugaaggggcucuacaacguggcgaccugcggccugaucgggcuggucacguuccuccugcugugcggccgcuccugcaccaccacccucuacaaggggguguacgagcugcaggcccuggagcucaacauggagacgcugaacaugaccaugccgcugagcugcaccaagaacaacucccaccacuacauccgggugggcaacgagaccggccucgagcugacgcugaccaacaccagccucaucaaccacaaguucugcaaccuguccgacgcccacaagaagaaccuguacgaccacgcccucaugagcaucaucuccaccuuccaccugagcauccccaacuucaaccaguacgaggccauguccugcgacuucaacgacgggaagaucagcguccaguacaaccugucccacacguacgcgggcgacaccgccaaccacugcgggaccguggccaacggcgugcuccagaccuucaugcgcauggccuggggcgggagcuacaucgcgcuggacuccggccgcgggggcugggacugcaucaugacgagcuaccaguaccugaucauccagaacaccaccugggaggaccacugccaguucucccggcccagccccaucggguaccucggccugcugucccagcggacccgcgacaucuacaucagccggcgccuccugggcacguucaccuggacccuguccgacagcgaggggaaggacaccccgggcggguacugccucacgcgguggaugcugaucgaggccgagcugaagugcuucggcaacaccgccgucgccaagugcaacgagaagcacgacgaggaguucugcgacaugcuccgccuguucgacuucaacaagcaggccauccagcggcugaaggcggaggcccagaugagcauccagcucaucaacaaggccgugaacgcccugaucaacgaccagcugaucaugaagaaccaccuccgcgacaucauggggauccccuacugcaacuacuccaaguacugcuaccugaaccacaccgugaccggcaagacgagccugcccaagugcugccucgucuccaacggcagcuaccugaacgagacccacuucuccgacgacaucgagcagcaggccgacaacaugaucaccgagaugcugcagaaggaguacauggagcggcaggggaagacgccccucggccugguggaccuguucguguucagcaccuccuucuaccugaucagcaucuuccuccaccuggucaagaucccgacccaccgccacgugguggggaagcccugccccaagccccaccggcugaaccacaugggcaucugcuccugcggguucuacaagcagccgggcguccccgugcgcuggaagcggugaggacuaguuauaagacugacuagcccgaugggccucccaacgggcccuccuccccuccuugcaccgagauuaaucaaaggcucuuuucagagccaccaaaaaaaaaaaaaaaaaaaaaaaaaaaaaaaaaaaaaaaaaaaaaaaaaaaaaaaaaaaaaaaaaaaaaaaaaaaaaaaaaaaaaaaaaaaaaaaaaaaaa

SEQ ID NO: 39684 - RNA, 1689 nt, Artificial Sequence
  mRNA product Design i-3 (hSL-A100) comprising derived and/or modified sequence from LASV(Z0947-SLE-2011;Clade IV)__AIT17840__GPCmut11 (opt1)
aggagaaagcuuaccaugggccagaucgugaccuucuuccaggaggucccccacgugaucgaggaggugaugaacaucguccugaucgcccucagcauccuggccgugcugaaggggcucuacaacuucgcgaccugcggccugguggggcuggucacguuccuccugcugugcggccgcuccugcaccaucagccucuacaaggggguguacgagcugcagacccuggagcucaacauggagacccugaacaugacgaugccgcuguccugcaccaagaacaacagccaccacuacaucauggugggcaacgagaccggccucgagcugacccugacgaacaccuccaucaucaaccacaaguucugcaaccucagcgacgcccacaagaagaaccuguacgaccacgcccugauguccaucaucagcaccuuccaccucuccauccccaacuucaaccaguacgaggccaugagcugcgacuucaacgggggcaagaucuccguccaguacaaccugagccacuccuacgccggggacgcggccaaccacugcggcaccguggccaacggggugcugcagacguucaugcggauggccuggggcggcagcuacaucgcgcucgacuccgggcgcgaccggugggacugcaucaugaccagcuaccaguaccugaucauccagaacaccaccugggaggaccacugccaguucucccgccccagccccaucggcuaccuggggcuccugucccagcggacgcgcgacaucuacaucagccggcgccugcucggcaccuucaccuggacccugagcgacuccgagggcaaggacacgcccgggggcuacugccugacccgguggaugcucaucgaggccgagcugaagugcuucgggaacaccgccgucgccaagugcaacgagaagcacgacgaggaguucugcgacaugcugcgccucuucgacuucaacaagcaggccauccagcggcugaaggcggaggcccagaugagcauccagcugaucaacaaggccgugaacgcccucaucaacgaccagcugaucaugaagaaccaccuccgcgacaucaugggcauccccuacugcaacuacuccaaguacugcuaccugaaccacaccacgaccgggaagaccagccugcccaagugcugccugguguccaacggcagcuaccucaacgagacccacuucuccgacgacaucgagcagcaggccgacaacaugaucacggagaugcugcagaaggaguacauggagcggcagggcaagaccccgcuggggcucgucgaccuguucguguucagcaccuccuucuaccugaucagcaucuuccugcaccucgugaagaucccgacccaccgccacaucgucggcaagcccugccccaagccccaccggcugaaccacauggggaucugcuccugcggccuguacaagcagccgggggugcccgugaaguggaagcgcugaggacuaguuauaagacugacuagcccgaugggccucccaacgggcccuccuccccuccuugcaccgagauuaaucaaaggcucuuuucagagccaccaaaaaaaaaaaaaaaaaaaaaaaaaaaaaaaaaaaaaaaaaaaaaaaaaaaaaaaaaaaaaaaaaaaaaaaaaaaaaaaaaaaaaaaaaaaaaaaaaaaaa

SEQ ID NO: 39685 - RNA, 1689 nt, Artificial Sequence
  mRNA product Design i-3 (hSL-A100) comprising derived and/or modified sequence from LASV(Josiah;Clade IV)__NP_694870__GPCmut11 (opt1)
aggagaaagcuuaccaugggccagaucgugaccuucuuccaggaggucccccacgugaucgaggaggugaugaacaucguccugaucgcccucagcgugcuggccgugcugaaggggcucuacaacuucgcgaccugcggccuggucgggcuggugacguuccuccugcugugcggccgcuccugcaccaccagccucuacaaggggguguacgagcugcagacccuggagcucaacauggagacgcugaacaugaccaugccgcuguccugcaccaagaacaacagccaccacuacaucauggucggcaacgagaccggccucgagcugacgcugaccaacaccuccaucaucaaccacaaguucugcaaccucagcgacgcccacaagaagaaccuguacgaccacgcccugauguccaucaucagcaccuuccaccucuccauccccaacuucaaccaguacgaggccaugagcugcgacuucaacgggggcaagaucuccgugcaguacaaccugagccacuccuacgccggggacgcggccaaccacugcggcacgguggccaacgggguccugcagaccuucaugcggauggccuggggcggcagcuacaucgcgcucgacuccgggcgcggcaacugggacugcaucaugaccagcuaccaguaccugaucauccagaacaccacgugggaggaccacugccaguucucccggcccagccccaucggguaccugggccuccugucccagcgcacccgggacaucuacaucagccgccggcugcucggcaccuucaccuggacgcugagcgacuccgaggggaaggacaccccgggcggguacugccugacccgcuggaugcucaucgaggccgagcugaagugcuucggcaacaccgccguggccaagugcaacgagaagcacgacgaggaguucugcgacaugcugcggcuguucgacuucaacaagcaggccauccagcgccugaaggcggaggcccagaugagcauccagcugaucaacaaggccgugaacgcccucaucaacgaccagcugaucaugaagaaccaccuccgggacaucauggggauccccuacugcaacuacuccaaguacugcuaccucaaccacacgaccaccggccgcaccagccugcccaagugcugccuggucuccaacggcagcuaccucaacgagacgcacuucuccgacgacaucgagcagcaggccgacaacaugaucaccgagaugcugcagaaggaguacauggagcggcaggggaagacgccccugggccugguggaccucuucguguucagcaccuccuucuaccugaucagcaucuuccugcaccucgucaagaucccgacccaccgccacaucguggggaaguccugccccaagccccaccggcugaaccacaugggcaucugcagcugcgggcuguacaagcagcccggcgugccggucaaguggaagcgcugaggacuaguuauaagacugacuagcccgaugggccucccaacgggcccuccuccccuccuugcaccgagauuaaucaaaggcucuuuucagagccaccaaaaaaaaaaaaaaaaaaaaaaaaaaaaaaaaaaaaaaaaaaaaaaaaaaaaaaaaaaaaaaaaaaaaaaaaaaaaaaaaaaaaaaaaaaaaaaaaaaaaa

SEQ ID NO: 39686 - RNA, 1686 nt, Artificial Sequence
  mRNA product Design i-3 (hSL-A100) comprising derived and/or modified sequence from LASV(LP;Clade I)__AAF86701__GPCmut11 (opt1)
aggagaaagcuuaccaugggccagaucaucaccuucuuccaggaggugccccacgucaucgaggaggugaugaacaucgugcugaucgcccucagccugcuggccauccucaaggggcuguacaacaucgcgaccugcggcaucaucgggcuggucgccuuccucuuccugugcggcaaguccugcagccugacgcucaagggcggguacgagcugcagacccuggagcucaacauggagacccugaacaugaccaugccgcuguccugcacgaagaacagcucccaccacuacauccgcgugggcaacgagaccgggcucgagcugacccugaccaacacgagcaucaucaaccacaaguucugcaaccucuccgacgcccacaagaagaaccuguacgaccacgcccugaugagcaucaucuccaccuuccaccucagcauccccaacuucaaccaguacgaggccauguccugcgacuucaacggcgggaagaucagcgugcaguacaaccugucccacagcuacgcgggcgacgccgccgagcacugcgggaccgucgccaacggcgugcugcagaccuucaugcggauggcguggggcgggcgcuacaucgcccucgacuccggcaaggggaacugggacugcaucaugacgagcuaccaguaccugaucauccagaacaccaccugggaggaccacugccaguucucccggcccagccccaucggcuaccugggccuccugucccagcgcacccgggacaucuacaucagccgccggcugcucgggacguucaccuggacccugagcgacuccgagggcaacgagacccccgggggcuacugccugacgcgcuggaugcucaucgaggccgagcugaagugcuucgggaacaccgccguggccaagugcaacgagaagcacgacgaggaguucugcgacaugcugcggcuguucgacuucaacaagcaggcgauccgccggcugaaggccgaggcccagaugagcauccagcugaucaacaaggccgucaacgcccucaucaacgaccagcugaucaugaagaaccaccuccgcgacaucaugggcauccccuacugcaacuacuccaaguacugcuaccucaaccacaccagcuccggccggaccagccugcccaagugcugccugaucuccaacgggagcuaccucaacgagacgcaguucuccgacgacaucgagcagcaggcggacaacaugaucaccgagaugcugcagaaggaguacaucgagcgccagggcaagaccccgcuggggcugguggacaucuucaucuucagcaccuccuucuaccucaucagcaucuuccugcaccugaucaagaucccgacgcaccggcacaucgugggcaagcccugccccaagccccaccgccucaaccacaugggggucugcuccugcggccuguacaagcacccgggcgugcccaccaaguggaagcggugaggacuaguuauaagacugacuagcccgaugggccucccaacgggcccuccuccccuccuugcaccgagauuaaucaaaggcucuuuucagagccaccaaaaaaaaaaaaaaaaaaaaaaaaaaaaaaaaaaaaaaaaaaaaaaaaaaaaaaaaaaaaaaaaaaaaaaaaaaaaaaaaaaaaaaaaaaaaaaaaaaaaa

SEQ ID NO: 39687 - RNA, 1686 nt, Artificial Sequence
  mRNA product Design i-3 (hSL-A100) comprising derived and/or modified sequence from LASV(803213;Clade II)__AAF86703__GPCmut11 (opt1)
aggagaaagcuuaccaugggccagaucaucaccuucuuccaggaggugccccacgucaucgaggaggugaugaacaucgugcugaucgcccucagccugcuggccauccucaaggggaucuacaacgucgcgaccugcggccuguucgggcugaucuccuuccuccugcugugcggccgcagcugcuccgugacguacaaggggguguacgagcuccagacccuggagcugaacauggccaaccucaacaugaccaugccgcugagcugcaccaagaacaacucccaccacuacaucauggucggcaacgagacgggccuggagcucacccugaccaacaccagcaucaucaaccacaaguucugcaaccuguccgacgcccacaagaagaaccucuacgaccacgcccugaugagcaucaucuccacguuccaccugagcauccccaacuucaaccaguacgaggccauguccugcgacuucaacgggggcaagaucagcgugcaguacaaccucucccacagcuucgcgguggacgccgccaaccacugcgggaccaucgccaacggcguccugcagaccuucaugcggauggcguggggcggguccuacaucgcccuggacagcggcaaggggaacugggacugcaucaugaccuccuaccaguaccucaucauccagaacacgaccugggaggaccacugccaguucagccgccccucccccaucggcuaccuggggcugcucagccagcggacccgcgacaucuacaucagccggcgccugcugggcaccuucacguggacccucuccgacagcgagggcaacgaggcccccgggggcuacugccugacccgguggaugcugaucgaggccgagcucaagugcuucgggaacaccgccguggcgaagugcaacgagaagcacgacgaggaguucugcgacaugcugcgccuguucgacuucaacaagcaggccaucaagcggcucaagacggaggcccagauguccauccagcugaucaacaaggccgugaacgcccugaucaacgaccagcucaucaugaagaaccaccuccgcgacaucaugggcauccccuacugcaacuacagccgguacugcuaccugaaccacaccgucaccgggaagaccucccugccccgcugcugccuggugagcaacggcuccuaccugaacgagacgcacuucagcgacgacaucgagcagcaggcggacaacaugaucaccgagaugcuccagaaggaguacauggaccggcagggcaagaccccgcuggggcugguggaccuguucgucuucuccaccagcuucuaccucaucuccaucuuccugcaccuggugaagaucccgacgcaccgccacaucgugggcaagcccugccccaagccccaccggcucaaccacauggggaucugcagcugcggccuguacaagcacccggggguccccgugaaguggaagcgcugaggacuaguuauaagacugacuagcccgaugggccucccaacgggcccuccuccccuccuugcaccgagauuaaucaaaggcucuuuucagagccaccaaaaaaaaaaaaaaaaaaaaaaaaaaaaaaaaaaaaaaaaaaaaaaaaaaaaaaaaaaaaaaaaaaaaaaaaaaaaaaaaaaaaaaaaaaaaaaaaaaaaa

SEQ ID NO: 39688 - RNA, 1686 nt, Artificial Sequence
  mRNA product Design i-3 (hSL-A100) comprising derived and/or modified sequence from LASV(GA391;Clade III)__CAA36645__GPCmut11 (opt1)
aggagaaagcuuaccaugggccagaucgugaccuucuuccaggaggucccccacgugaucgaggaggugaugaacaucguccugaucgcccucagcauccuggccauccugaaggggcucuacaacguggcgaccugcggccugaucgggcuggugacguuccuccugcuguccggccgcagcugcucccucaucuacaaggggaccuacgagcugcagacccuggagcucaacauggagacccugaacaugacgaugccgcugagcugcaccaagaacaacucccaccacuacauccgggucggcaacgagaccggccucgagcugacccugacgaacaccagcauccucaaccacaaguucugcaaccuguccgacgcccacaagcgcaaccuguacgaccacagccucauguccaucaucagcaccuuccaccuguccauccccaacuucaaccaguacgaggccaugagcugcgacuucaacgggggcaagaucaccgugcaguacaaccugucccacagcuucgccguggacgccgcggggcacugcggcacgcucgccaacgggguccugcagaccuucaugcggauggccuggggcggcuccuacaucgcccuggacagcgggcgcggcaacugggacugcaucaugaccuccuaccaguaccucaucauccagaacaccacgugggacgaccacugccaguucagccggcccucccccaucggguaccugggccugcucagccagcgcacccgggacaucuacaucagccgccggcugcugggcaccuucaccuggacgcucuccgacagcgaggggaacgagaccccgggcggguacugccugacccgcuggaugcugaucgaggcggagcucaagugcuucggcaacaccgccguggccaagugcaacgagaagcacgacgaggaguucugcgacaugcugcggcuguucgacuucaacaagcaggccauccgccggcucaagacggaggcccagauguccauccagcugaucaacaaggcggugaacgcccugaucaacgaccagcucaucaugaagaaccaccuccgcgacaucauggggauccccuacugcaacuacagccgguacugcuaccugaaccacaccuccaccggcaagaccagccugccccgcugcugccugaucuccaacggcagcuaccugaacgagacgaaguucuccgacgacaucgagcagcaggccgacaacaugaucaccgagaugcugcagaaggaguacaucgaccggcaggggaagacgccccucggccuggucgaccuguucguguucagcaccuccuucuaccucaucagcaucuuccugcaccuggugaagaucccgacccaccgccacaucgucgggaagcccugccccaagccccaccggcucaaccacaugggcaucugcuccugcgggcuguacaagcagccgggcgugcccgugcgcuggaagcggugaggacuaguuauaagacugacuagcccgaugggccucccaacgggcccuccuccccuccuugcaccgagauuaaucaaaggcucuuuucagagccaccaaaaaaaaaaaaaaaaaaaaaaaaaaaaaaaaaaaaaaaaaaaaaaaaaaaaaaaaaaaaaaaaaaaaaaaaaaaaaaaaaaaaaaaaaaaaaaaaaaaaa

SEQ ID NO: 39689 - RNA, 1689 nt, Artificial Sequence
  mRNA product Design i-3 (hSL-A100) comprising derived and/or modified sequence from LASV(AV;Clade V)__CCA30314__GPCmut11 (opt1)
aggagaaagcuuaccaugggccagaucgugaccuucuuccaggaggucccccacgugaucgaggaggugaugaacaucguccugaucgcccucagcauccuggccgugcugaaggggcucuacaacaucgcgaccugcggccugaucgggcugaucacguuccuccugcugugcggccgcuccugcagcuccaaccucuacaaggggguguacgagcugcagagccuggaccucaacauggagacccugaacaugaccaugccgcuguccugcaccaagaacaacagccaccacuacauccgggucggcaacgacacgggccucgagcugacccugaccaacaccuccauccucaaccacaaguucugcaaccugagcgacgcccacaagaaggaccuguacgaccacgcccucauguccaucaucagcacguuccaccuguccauccccaacuucaaccaguacgaggccaugagcugcgacuucaacgggggcaagaucuccgugcaguacaaccugagccacuccuacgccaucgacgcggccaaccacugcgggaccguggccaacggcauccuccagaccuucaugcgcauggccuggggcgggagcuacaucgcgcuggacuccggccgggggaacugggacugcaucaugaccagcuaccaguaccugaucauccagaacacgaccugggagaaccacugccaguucucccgccccagccccaucggcuaccucgggcugcugagccagcggacccgcgacaucuacaucucccggcgccuccugggcaccuucacguggacccugagcgacuccgagggcaacgccacccccgggggcuacugccucacccgguggaugcugaucgaggccgagcugaagugcuucgggaacacggccgucgccaagugcaacgagaagcacgacgaggaguucugcgacaugcuccgccuguucgacuucaacaagcaggcgaucagccggcugaaguccgaggcccagaugagcauccagcucaucaacaaggccgugaacgcccugaucaacgaccagcugaucaugaagaaccaccuccgcgacaucaugggcauccccuacugcaacuacuccaaguacugcuaccugaaccacaccaucaccgggaagaccagccugcccaagugcugccucguguccaacggcagcuaccugaacgagacgcacuucuccgacgacaucgagcagcaggccgacaacaugaucaccgagaugcugcagaaggaguacauggagcggcagggcaagaccccgcuggggcucgucgaccuguucguguucagcaccuccuucuaccugaucagcaucuuccuccgccuggugaagaucccgacgcaccggcacaucgucggcaagcccugccccaagccccaccgccugaaccacauggggaucugcuccugcggccucuacaagcagccgggggugcccgugcgguggaagcgcugaggacuaguuauaagacugacuagcccgaugggccucccaacgggcccuccuccccuccuugcaccgagauuaaucaaaggcucuuuucagagccaccaaaaaaaaaaaaaaaaaaaaaaaaaaaaaaaaaaaaaaaaaaaaaaaaaaaaaaaaaaaaaaaaaaaaaaaaaaaaaaaaaaaaaaaaaaaaaaaaaaaaa

SEQ ID NO: 39690 - RNA, 1686 nt, Artificial Sequence
  mRNA product Design i-3 (hSL-A100) comprising derived and/or modified sequence from LASV(Togo/2016/7082;Clade VI)__AMR44577__GPCmut11 (opt1)
aggagaaagcuuaccaugggccagaucaucaccuucuuccaggaggugccccacgucaucgaggaggugaugaacaucgugcugaucgcccucagccugcuggccauccucaagggggucuacaacguggcgaccugcggcaucaucgggcuggugacguuccuguuccucugcggccgcuccugcagccugaucuacaagggguccuacgagcugcagacccucgagcugaacauggagacccugaacaugaccaugccgcucagcugcacgaagaacuccagccaccacuacauccgggucggcaacgagaccggccuggagcugacccucaccaacacguccaucaucaaccacaaguucugcaaccugagcgacgcccacaagcgcaaccuguacgaccacgcccucauguccauccugagcaccuuccaccuguccauccccaacuucaaccaguacgaggccaugagcugcgacuucaacgggggcaagaucuccgugcaguacaaccucagccacgccuacgcgguggacgccgccgagcacugcgggaccgucgccaacggcgugcugcagaccuucaugcggauggcguggggcggguccuacaucgcccuggacagcggccgcgggaacugggacugcaucaugacguccuaccaguaccucaucauccagaacaccaccugggaggaccacugccaguucagccggcccucccccaucggcuaccuggggcugcucagccagcgcacccgggacaucuacaucagccgccggcugcugggcacguucaccuggacccucuccgacagcgagggcaacgagacccccgggggcuacugccugacgcgcuggaugcugaucgaggccgagcucaagugcuucgggaacaccgccguggccaagugcaacgagaagcacgacgaggaguucugcgacaugcugcggcuguucgacuucaacaagcaggcgauccagcgccucaaguccgaggcccagaugagcauccagcugaucaacaaggccgucaacgcccugaucaacgaccagcucaucaugaagaaccaccuccgggacaugaugggcauccccuacugcaacuacuccaaguacugcuaccugaaccacaccagcuccgggcgcaccagccugcccaagugcugccugguguccaacggcagcuaccugaacgagacgcacuucuccgacgacaucgagcagcaggccgacaacaugaucaccgagaugcuccagaaggaguacaucgaccggcagggcaagaccccgcuggggcugguggaccuguucgucuucagcaccuccuucuaccucaucagcaucuuccugcaccugaucaagaucccgacgcaccgccacaucgugggcaagcccugccccaagccccaccggcucaaccacauggggaucugcuccugcggccuguacaagcagccgggggugcccacccgcuggaagcggugaggacuaguuauaagacugacuagcccgaugggccucccaacgggcccuccuccccuccuugcaccgagauuaaucaaaggcucuuuucagagccaccaaaaaaaaaaaaaaaaaaaaaaaaaaaaaaaaaaaaaaaaaaaaaaaaaaaaaaaaaaaaaaaaaaaaaaaaaaaaaaaaaaaaaaaaaaaaaaaaaaaaa

SEQ ID NO: 39691 - RNA, 1686 nt, Artificial Sequence
  mRNA product Design i-3 (hSL-A100) comprising derived and/or modified sequence from LASV(KAK-428;Clade n.d. (VII))__ANH09740__GPCmut11 (opt1)
aggagaaagcuuaccaugggccagaucgugaccuucuuccaggaggucccccacgugaucgaggaggugaugaacaucguccugaucgcccucagccugcuggccauccucaaggggcuguacaacuucgcgaccugcggcgugaucgggcugaucacguuccuccugcugugcggccgcuccugcagcgccaccuacaaggggcaguacgagcuccagacccuggagcugaacauggagucccucaacaugaccaugccgcugagcugcacgaagaacaacucccaccacuacauccgggccggcaacaacaccggccuggagcucacccugaccaacacgagcaucaucucccacaaguucugcaaccugagcgacgcccacaagaagaaccucuacgaccacacccugauguccaucaucaccaccuuccaccugagcauccccaacuucaaccaguacgaggccauguccugcgacuucaacgggggcaagaucagcauccaguacaaccucucccacagcuacgcgggggacgccgcccagcacugcggcacgguggccaacgggguccugcagaccuucaugcgcauggcguggggcggcuccuaccuggcccucgacagcgggcggcgcggcugggacugcaucaucuccagcuaccaguaccugaucauccagaacaccaccugggacgaccacugccaguucucccggcccagccccaucggguaccugggcuucgugagccagaagacgcgcgacaucuacaucucccggcgccuccugggcaccuucaccuggacccugagcgacuccgaggggcacgacaugccgggcggguacugccucacgcgguggaugcugaucgaggccgaccugaagugcuucggcaacaccgccguggccaagugcaacgagaagcacgacgaggaguucugcgacauguggcgccucuucgacuucaacaagcaggcgauccagcggcugaaggccgaggcccagaugaacauccagcugaucaacaaggccgucaacgcccucaucaacgaccagcugaugaugaagaaccaccuccgcgacaucauggggauccccuacugcaacuacagcaaguucugcuaccugaacaacaccaccacgggccggaccucccugccccgcugcugccugaucagcaacggcuccuaccucaacgagacccacuucagcgacgacaucgagcagcaggcggacaacaugaucaccgagaugcugcagaaggaguacauggaccggcaggggaagacgccccugggccucguggaccuguucguguucuccaccagcuucuaccugaucaccaucuuccugcaccucgucaagaucccgacccaccgccacaucguggggaagcccugccccaagccccaccggcugaaccacaugggcaucugcuccugcgggcuguacaagcagccgggcgugcccguccgcuggaagcggugaggacuaguuauaagacugacuagcccgaugggccucccaacgggcccuccuccccuccuugcaccgagauuaaucaaaggcucuuuucagagccaccaaaaaaaaaaaaaaaaaaaaaaaaaaaaaaaaaaaaaaaaaaaaaaaaaaaaaaaaaaaaaaaaaaaaaaaaaaaaaaaaaaaaaaaaaaaaaaaaaaaaa

SEQ ID NO: 39692 - RNA, 1686 nt, Artificial Sequence; identical to SEQ ID NO: 39686
  mRNA product Design i-3 (hSL-A100) comprising derived and/or modified sequence from LASV(Pinneo-NIG-1969;Clade I)__AIT17836__GPCmut11 (opt1)

SEQ ID NO: 39693 - RNA, 1686 nt, Artificial Sequence
  mRNA product Design i-3 (hSL-A100) comprising derived and/or modified sequence from LASV(ISTH0009-NIG-2011;Clade II)__AIT17404__GPCmut11 (opt1)
aggagaaagcuuaccaugggccagaucaucaccuucuuccaggaggugccccacgucaucgaggaggugaugaacaucgugcugaucgcccucagccugcuggccauccucaaggggaucuacaacgucgcgaccugcggccuguucgggcugguguccuuccuccugcugugcggccgcagcugcuccacgaccuacaaggggguguacgagcuccagacccuggagcuggacauggccagccucaacaugaccaugccgcuguccugcacgaagaacaacagccaccacuacaucauggucggcaacgagaccggccuggagcucacccugaccaacacguccaucaucaaccacaaguucugcaaccugagcgacgcccacaagaagaaccucuacgaccacgcccugauguccaucaucagcaccuuccaccuguccauccccaacuucaaccaguacgaggccaugagcugcgacuucaacgggggcaagaucuccgugcaguacaaccucagccacgcguacgccguggacgccgccaaccacugcgggaccaucgcgaacggcguccugcagaccuucaugcggauggccuggggcggguccuacaucgcccuggacagcggcaagggguccugggacugcaucaugacgagcuaccaguaccucaucauccagaacaccaccugggaggaccacugccaguucucccgccccagccccaucggcuaccuggggcugcucagccagcggacccgcgacaucuacaucucccggcgccugcugggcacguucaccuggacccucagcgacuccgagggcaacgagacccccgggggcuacugccugacgcgguggaugcugaucgaggccgagcucaagugcuucgggaacaccgccguggcgaagugcaacgagaagcacgacgaggaguucugcgacaugcugcgccuguucgacuucaacaagcaggccauccggcgccucaagaccgaggcccagaugagcauccagcugaucaacaaggccgugaacgcccugaucaacgaccagcucaucaugaagaaccaccuccgggacaucaugggcaucccguacugcaacuacuccaaguacugcuaccugaaccacaccgucacggggaagaccagccugccccgcugcugccugguguccaacggcagcuaccugaacgagacccacuucuccgacgacaucgagcagcaggcggacaacaugaucaccgagcuccugcagaaggaguacauggaccggcagggcaagacgccccuggggcugguggaccucuucgucuucagcaccuccuucuaccugaucagcaucuuccugcaccucaucaagaucccgacccaccgccacaucaccggcaagcccugccccaagccccaccggcugaaccacauggggaucugcuccugcggccuguacaagcacccgggggugcccgugaaguggaagcgcugaggacuaguuauaagacugacuagcccgaugggccucccaacgggcccuccuccccuccuugcaccgagauuaaucaaaggcucuuuucagagccaccaaaaaaaaaaaaaaaaaaaaaaaaaaaaaaaaaaaaaaaaaaaaaaaaaaaaaaaaaaaaaaaaaaaaaaaaaaaaaaaaaaaaaaaaaaaaaaaaaaaaa

SEQ ID NO: 39694 - RNA, 1686 nt, Artificial Sequence
  mRNA product Design i-3 (hSL-A100) comprising derived and/or modified sequence from LASV(ISTH2010-NIG-2012;Clade II)__AIT17482__GPCmut11 (opt1)
aggagaaagcuuaccaugggccagaucaucaccuucuuccaggaggugccccacgucaucgaggaggugaugaacaucgugcugaucgcccucagccugcuggccauccucaaggggaucuacaacgucgcgaccugcggccuguucgggcugguguccuuccuccugcugugcggccgcagcugcuccacgaccuacaaggggguguacgagcuccagacccuggagcuggacauggccagccucaacaugaccaugccgcuguccugcacgaagaacaacagccaccacuacaucauggucggcaacgagaccggccuggagcucacccugaccaacacguccaucaucaaccacaaguucugcaaccugagcgacgcccacaagaagaaccucuacgaccacgcccugauguccaucaucagcaccuuccaccuguccauccccaacuucaaccaguacgaggccaugagcugcgacuucaacgggggcaagaucuccgugcaguacaaccucagccacgcguacgccguggacgccgccaaccacugcgggaccaucgcgaacggcguccugcagaccuucaugcggauggccuggggcggguccuacaucgcccuggacagcggcaagggguccugggacugcaucaugacgagcuaccaguaccucaucauccagaacaucaccugggaggaccacugccaguucucccgccccagccccaucggcuaccuggggcugcucagccagcggacccgcgacaucuacaucucccggcgccugcugggcaccuucacguggacccucagcgacuccgagggcaacgagacccccgggggcuacugccugacccgguggaugcugaucgaggccgagcucaagugcuucgggaacacggccguggcgaagugcaacgagaagcacgacgaggaguucugcgacaugcugcgccuguucgacuucaacaagcaggccauccggcgccucaagaccgaggcccagaugagcauccagcugaucaacaaggccgugaacgcccugaucaacgaccagcucaucaugaagaaccaccuccgggacaucaugggcauccccuacugcaacuacuccaaguacugcuaccugaaccacaccgucaccgggaagacgagccugccccgcugcugccugguguccaacggcagcuaccugaacgagacccacuucuccgacgacaucgagcagcaggcggacaacaugaucaccgagcuccugcagaaggaguacaucgaccggcagggcaagaccccgcuggggcugguggaccucuucgucuucagcacguccuucuaccugaucagcaucuuccugcaccucgugaagaucccgacccaccgccacguggucggcaagcccugccccaagccccaccggcugaaccacauggggaucugcuccugcggccuguacaagcacccgggggugcccgugaaguggaagcgcugaggacuaguuauaagacugacuagcccgaugggccucccaacgggcccuccuccccuccuugcaccgagauuaaucaaaggcucuuuucagagccaccaaaaaaaaaaaaaaaaaaaaaaaaaaaaaaaaaaaaaaaaaaaaaaaaaaaaaaaaaaaaaaaaaaaaaaaaaaaaaaaaaaaaaaaaaaaaaaaaaaaaa

SEQ ID NO: 39695 - RNA, 1686 nt, Artificial Sequence
  mRNA product Design i-3 (hSL-A100) comprising derived and/or modified sequence from LASV(Lassa virus/H.sapiens-wt/NGA/2015/ISTH_0543;Clade II)__AVO03639__GPCmut11 (opt1)
aggagaaagcuuaccaugggccagaucaucaccuucuuccaggaggugccccacgucaucgaggaggugaugaacaucgugcugaucgcccucagccugcuggccauccucaaggggaucuacaacgucgcgaccugcggccuguucgggcugguguccuuccuccugcugugcggccgcagcugcuccacgaccuacaaggggguguacgagcuccagacccuggagcuggacauggccaaccucaacaugaccaugccgcugagcugcacgaagaacaacucccaccacuacaucauggucggcaacgagaccggccuggagcucacccugaccaacacgagcaucaucaaccacaaguucugcaaccuguccgacgcccacaagaagaaccucuacgaccacgcccugaugagcaucaucuccaccuuccaccugagcauccccaacuucaaccaguacgaggccauguccugcgacuucaacgggggcaagaucagcgugcaguacaaccucucccacaccuacgcgguggacgccgccaaccacugcgggaccaucgccaacggcguccugcagacguucaugcggauggcguggggcgggagcuacaucgcccuggacuccggcaaggggagcugggacugcaucaugaccuccuaccaguaccucgugauccagaacaccaccugggaggaccacugccaguucagccgccccucccccaucggcuaccuggggcugcucagccagcggacgcgcgacaucuacaucagccggcgccugcugggcaccuucaccuggacccucuccgacagcgagggcaacgagacgcccgggggcuacugccugacccgguggaugcugaucgaggccgagcucaagugcuucgggaacaccgccguggccaagugcaacgagaagcacgacgaggaguucugcgacaugcugcgccuguucgacuucaacaagcaggcgauccggcgccucaagaccgaggcccagauguccauccagcugaucaacaaggccgucaacgcccugaucaacgaccagcucaucaugaagaaccaccuccgggacaucaugggcauccccuacugcaacuacagcaaguacugcuaccugaaccacacggugaccgggaagaccucccugccccgcugcugccuggugagcaacggcuccuaccugaacgagacccacuucagcgacgacaucgagcagcaggccgacaacaugaucacggagcuccugcagaaggaguacaucgaccggcagggcaagaccccgcuggggcuggucgaccucuucguguucuccaccagcuucuaccugaucuccaucuuccugcaccucgugaagaucccgacccaccgccacaucacgggcaagcccugccccaagccccaccggcugaaccacauggggaucugcagcugcggccuguacaagcacccggggguccccgugaaguggaagcgcugaggacuaguuauaagacugacuagcccgaugggccucccaacgggcccuccuccccuccuugcaccgagauuaaucaaaggcucuuuucagagccaccaaaaaaaaaaaaaaaaaaaaaaaaaaaaaaaaaaaaaaaaaaaaaaaaaaaaaaaaaaaaaaaaaaaaaaaaaaaaaaaaaaaaaaaaaaaaaaaaaaaaa

SEQ ID NO: 39696 - RNA, 1686 nt, Artificial Sequence
  mRNA product Design i-3 (hSL-A100) comprising derived and/or modified sequence from LASV(Lassa virus/H.sapiens-wt/NGA/2016/ISTH_0009;Clade II)__AVO03571__GPCmut11 (opt1)
aggagaaagcuuaccaugggccagaucaucaccuucuuccaggaggugccccacgucaucgaggaggugaugaacaucgugcugaucgcccucagccugcuggccauccucaaggggaucuacaacgucgcgaccugcggccugcuggggcucguguccuuccugcugcucugcggccgcagcugcuccacgaccuacaaggggguguacgagcugcagacccuggagcucgacauggccagccugaacaugaccaugccgcuguccugcacgaagaacaacagccaccacuacaucauggucggcaacgagaccggccucgagcugacccugaccaacacguccaucaucaaccacaaguucugcaaccucagcgacgcccacaagaagaaccuguacgaccacgcccugauguccaucaucagcaccuuccaccucuccauccccaacuucaaccaguacgaggccaugagcugcgacuucaacgggggccggaucuccgugcaguacaaccugagccacuccuacgcgguggacgccgccaaccacugcgggaccaucgccaacggcguccugcagaccuucaugcgcauggcguggggcgggagcuacaucgcccucgacuccggcaaggggagcugggacugcaucaugacguccuaccaguaccugaucauccagaacaccaccugggaggaccacugccaguucagccggcccagccccaucggcuaccuggggcuccugucccagcgcacccgggacaucuacaucagccgccggcugcucggcacguucaccuggacccuguccgacagcgagggcaacgagacccccgggggcuacugccugacgcgcuggaugcucaucgaggccgagcugaagugcuucgggaacaccgccguggccaagugcaacgagaagcacgacgaggaguucugcgacaugcugcggcuguucgacuucaacaagcaggcgauccgccggcugaagaccgaggcccagauguccauccagcugaucaacaaggccgugaacgcccucaucaacgaccagcugaucaugaagaaccaccuccgcgacaucaugggcaucccguacugcaacuacagcaaguacugcuaccucaaccacaccgucacggggaagaccucccugccccggugcugccuggugagcaacggcuccuaccucaacgagacccacuucagcgacgacaucgagcagcaggccgacaacaugaucaccgagcugcugcagaaggaguacaucgaccgccagggcaagacgccccuggggcucguggaccuguucgucuucuccaccagcuucuaccugaucuccaucuuccuccaccuggugaagaucccgacccaccggcacaucaccggcaagcccugccccaagccccaccgccugaaccacauggggaucugcagcugcggccucuacaaccacccgggggugcccgucaaguggaagcggugaggacuaguuauaagacugacuagcccgaugggccucccaacgggcccuccuccccuccuugcaccgagauuaaucaaaggcucuuuucagagccaccaaaaaaaaaaaaaaaaaaaaaaaaaaaaaaaaaaaaaaaaaaaaaaaaaaaaaaaaaaaaaaaaaaaaaaaaaaaaaaaaaaaaaaaaaaaaaaaaaaaaa

SEQ ID NO: 39697 - RNA, 1686 nt, Artificial Sequence
  mRNA product Design i-3 (hSL-A100) comprising derived and/or modified sequence from LASV(Lassa virus/H.sapiens-wt/NGA/2016/ISTH_0017;Clade II)__AVO03567__GPCmut11 (opt1)
aggagaaagcuuaccaugggccagaucaucaccuucuuccaggaggugccccacgucaucgaggaggugaugaacaucgugcugaucgcccucagccugcuggccauccucaaggggaucuacaacgucgcgaccugcggccuguucgggcugguguccuuccuccugcugugcggccgcagcugcuccacgaccuacaaggggguguacgagcuccagacccuggagcuggacauggccagccucaacaugaccaugccgcuguccugcacgaagaacaacagccaccacuacaucauggucggcaacgagaccggccuggagcucacccugaccaacacguccaucaucaaccacaaguucugcaaccugagcgacgcccacaagaagaaccucuacgaccacgcccugauguccaucaucagcaccuuccaccuguccauccccaacuucaaccaguacgaggccaugagcugcgacuucaacgggggcaagaucuccgugcaguacaaccucagccacaccuacgcgaucgacgccgccaaccacugcgggaccaucgccaacggcgugcugcagacguucaugcggauggcguggggcggguccuacaucgcccuggacagcggcaagggguccugggacugcaucaugaccagcuaccaguaccucaucauccagaacaccaccugggaggaccacugccaguucucccgccccagccccaucggcuaccuggggcugcucagccagcggacgcgcgacaucuacaucucccggcgccugcugggcaccuucaccuggacccucagcgacuccgagggcaacgagacgcccgggggcuacugccugacccgguggaugcugaucgaggccgagcucaagugcuucgggaacaccgccgucgccaagugcaacgagaagcacgacgaggaguucugcgacaugcugcgccuguucgacuucaacaagcaggcgauccggcgccucaagaccgaggcccagaugagcauccagcugaucaacaaggccgugaacgcccugaucaacgaccagcucaucaugaagaaccaccuccgggacaucaugggcauccccuacugcaacuacuccaaguacugcuaccugaaccacacggugaccgggaagaccagccugccccgcugcugccuggucuccaacggcagcuaccugaacgagacccacuucuccgacgacaucgagcagcaggccgacaacaugaucacggagcuccugcagaaggaguacauggaccggcagggcaagaccccgcuggggcugguggaccucuucguguucagcaccuccuucuaccugaucagcaucuuccugcaccucguccgcaucccgacccaccggcacgugaucggcaagcccugccccaagccccaccgccugaaccacauggggaucugcuccugcggccuguacaagcacccgggggugcccgucaaguggaagcggugaggacuaguuauaagacugacuagcccgaugggccucccaacgggcccuccuccccuccuugcaccgagauuaaucaaaggcucuuuucagagccaccaaaaaaaaaaaaaaaaaaaaaaaaaaaaaaaaaaaaaaaaaaaaaaaaaaaaaaaaaaaaaaaaaaaaaaaaaaaaaaaaaaaaaaaaaaaaaaaaaaaaa

SEQ ID NO: 39698 - RNA, 1686 nt, Artificial Sequence
  mRNA product Design i-3 (hSL-A100) comprising derived and/or modified sequence from LASV(Lassa virus/H.sapiens-wt/NGA/2018/ISTH_0959;Clade II)__AVV65099__GPCmut11 (opt1)
aggagaaagcuuaccaugggccagaucaucaccuucuuccaggaggugccccacgucaucgaggaggugaugaacaucgugcugaucgcccucagccugcuggccauccucaaggggaucuacaacgucgugaccugcggccuguucgggcugguguccuuccuccugcugugcggccgcagcugcuccacgaccuacaagggggucuacgagcuccagacccuggagcuggacauggcgagccucaacaugaccaugccgcuguccugcacgaagaacaacagccaccacuacaucauggugggcaacgagaccggccuggagcucacccugaccaacacguccaucaucaaccacaaguucugcaaccugagcgacgcccacaagaagaaccucuacgaccacgcccugauguccaucaucagcaccuuccaccuguccauccccaacuucaaccaguacgaggccaugagcugcgacuucaacgggggcaagaucuccgugcaguacaaccucagccacgccuacgcgaucgacgccgccaaccacugcgggaccaucgccaacggcguccugcagaccuucaugcggauggcguggggcggguccuacaucgcccuggacagcggcaagggguccugggacugcaucaugacgagcuaccaguaccucaucauccagaacaccaccugggaggaccacugccaguucucccgccccagccccaucggcuaccuggggcugcucagccagcggacccgcgacaucuacaucucccggcgccugcugggcacguucaccuggacccucagcgacuccgagggcaacgagacccccgggggcuacugccugacgcgguggaugcugaucgaggccgagcucaagugcuucgggaacaccgccguggccaagugcaacgagaagcacgacgaggaguucugcgacaugcugcgccuguucgacuucaacaagcaggcgauccggcgccucaagaccgaggcccagaugagcauccagcugaucaacaaggccgugaacgcccugaucaacgaccagcucaucaugaagaaccaccuccgggacaucaugggcaucccguacugcaacuacuccaaguacugcuaccugaaccacaccgucacggggaagaccagccugccccgcugcugccugguguccaacggcagcuaccugaacgagacccacuucuccgacgacaucgagcagcaggccgacaacaugaucaccgagcuccugcagaaggaguacaucgaccggcagggcaagacgccccuggggcugguggaccucuucgucuucagcaccuccuucuaccugaucagcaucuuccugcaccucgugaagaucccgacccaccgccacgugaucggcaagcccugccccaagccccaccggcugaaccacauggggaucugcuccugcggccuguacaagcacccggggguccccgugaaguggaagcgcugaggacuaguuauaagacugacuagcccgaugggccucccaacgggcccuccuccccuccuugcaccgagauuaaucaaaggcucuuuucagagccaccaaaaaaaaaaaaaaaaaaaaaaaaaaaaaaaaaaaaaaaaaaaaaaaaaaaaaaaaaaaaaaaaaaaaaaaaaaaaaaaaaaaaaaaaaaaaaaaaaaaaa

SEQ ID NO: 39699 - RNA, 1686 nt, Artificial Sequence
  mRNA product Design i-3 (hSL-A100) comprising derived and/or modified sequence from LASV(LASV003-NIG-2008;Clade II)__AIT17580__GPCmut11 (opt1)
aggagaaagcuuaccaugggccagaucaucaccuucuuccaggaggugccccacgucaucgaggaggugaugaacaucgugcugaucgcccucagccugcuggccauccucaaggggaucuacaacgucgcgaccugcggccuguucgggcugguguccuuccuccugcugugcggccgcagcugcuccacgaccuacaaggggguguacgagcuccagacccuggagcuggacauggccagccucaacaugaccaugccgcuguccugcacgaagaacaacagccaccacuacaucauggucggcaacgagaccggccuggagcucacccugaccaacacguccaucaucaaccacaaguucugcaaccugagcgacgcccacaagaagaaccucuacgaccacgcccugauguccaucaucagcaccuuccaccuguccauccccaacuucaaccaguacgaggccaugagcugcgacuucaacgggggcaagaucuccgugcaguacaaccucagccacaccuacgcgguggacgccgccaaccacugcgggaccaucgccaacggcguccugcagacguucaugcggauggcguggggcggguccuacaucgcccuggacagcggcaagggguccugggacugcaucaugaccagcuaccaguaccucaucauccagaacaccaccugggaggaccacugccaguucucccgccccagccccaucggcuaccuggggcugcucagccagcggacgcgcgacaucuacaucucccggcgccugcugggcaccuucaccuggacccucagcgacuccgagagcaacgagacgccgggcggguacugccugacccgguggaugcugaucgaggccgagcucaagugcuucggcaacaccgccguggccaagugcaacgagaagcacgacgaggaguucugcgacaugcugcgccuguucgacuucaacaagcaggcgauccggcgccucaaggccgaggcccagauguccauccagcugaucaacaaggccgugaacgcccugaucaacgaccagcucaucaugaagaaccaccuccgggacaucauggggauccccuacugcaacuacagcaaguacugcuaccugaaccacaccgucacgggccgcaccucccugccccggugcugccuggugagcaacggguccuaccugaacgagacccacuucagcgacgacaucgagcagcaggcggacaacaugaucaccgagcuccugcagaaggaguacauggaccgccagggcaagacgccccugggccugguggaccucuucgucuucuccaccagcuucuaccugaucuccaucuuccugcaccucgugaagaucccgacccaccggcacgugaucgggaagcccugccccaagccccaccgccugaaccacaugggcaucugcagcugcgggcuguacaagcacccgggcguccccgugaaguggaagcggugaggacuaguuauaagacugacuagcccgaugggccucccaacgggcccuccuccccuccuugcaccgagauuaaucaaaggcucuuuucagagccaccaaaaaaaaaaaaaaaaaaaaaaaaaaaaaaaaaaaaaaaaaaaaaaaaaaaaaaaaaaaaaaaaaaaaaaaaaaaaaaaaaaaaaaaaaaaaaaaaaaaaa

SEQ ID NO: 39700 - RNA, 1686 nt, Artificial Sequence
  mRNA product Design i-3 (hSL-A100) comprising derived and/or modified sequence from LASV(LASV035-NIG-2009;Clade II)__AIT17588__GPCmut11 (opt1)
aggagaaagcuuaccaugggccagaucaucaccuucuuccaggaggugccccacgucaucgaggaggugaugaacaucgugcugaucgcccucagccugcuggccauccucaaggggaucuacaacgucgcgaccugcggccuguucgggcugguguccuuccuccugcugugcggccgcagcugcuccacgaccuacaaggggguguacgagcuccagacccuggagcuggacauggccagccucaacaugaccaugccgcuguccugcacgaagaacaacagccaccacuacaucauggucggcaacgagaccggccuggagcucacccugaccaacacguccaucaucaaccacaaguucugcaaccugagcgacgcccacaagaagaaccucuacgaccacgcccugauguccaucaucagcaccuuccaccuguccauccccaacuucaaccaguacgaggccaugagcugcgacuucaacgggggcaagaucuccgugcaguacaaccucagccacgcguacgccguggacgccgccaaccacugcgggaccaucgcgaacggcguccugcagaccuucaugcggauggccuggggcggguccuacaucgcccuggacagcggcaagggguccugggacugcaucaugacgagcuaccaguaccucaucauccagaacaccaccugggaggaccacugccaguucucccgccccagccccaucggcuaccuggggcugcucagccagcggacccgcgacaucuacaucucccggcgccugcugggcacguucaccuggacccucagcgacuccgagggcaacgagacccccgggggcuacugccugacgcgguggaugcugaucgaggccgagcucaagugcuucgggaacaccgccguggcgaagugcaacgagaagcacgacgaggaguucugcgacaugcugcgccuguucgacuucaacaagcaggccauccggcgccucaaggccgaggcccagaugagcauccagcugaucaacaaggccgugaacgcgcugaucaacgaccagcucaucaugaagaaccaccuccgggacaucaugggcauccccuacugcaacuacuccaaguacugcuaccugaaccacaccgucaccgggaagacgagccugccccgcugcugccugguguccaacggcagcuaccugaacgagacccacuucuccgacgacaucgagcagcaggccgacaacaugaucaccgagcuccugcagaaggaguacaucgaccggcagggcaagaccccgcuggggcugguggaccucuucgucuucagcacguccuucuaccugaucagcaucuuccugcaccucgugaagaucccgacccaccgccacgugaucggcaagcccugccccaagccccaccggcugaaccacauggggaucugcuccugcggccuguacaagcacccggggguccccgugaaguggaagcgcugaggacuaguuauaagacugacuagcccgaugggccucccaacgggcccuccuccccuccuugcaccgagauuaaucaaaggcucuuuucagagccaccaaaaaaaaaaaaaaaaaaaaaaaaaaaaaaaaaaaaaaaaaaaaaaaaaaaaaaaaaaaaaaaaaaaaaaaaaaaaaaaaaaaaaaaaaaaaaaaaaaaaa

SEQ ID NO: 39701 - RNA, 1686 nt, Artificial Sequence
  mRNA product Design i-3 (hSL-A100) comprising derived and/or modified sequence from LASV(LASV1000-NIG-2009;Clade II)__AIT17782__GPCmut11 (opt1)
aggagaaagcuuaccaugggccagaucaucaccuucuuccaggaggugccccacgucaucgaggaggugaugaacaucgugcugaucgcccucagccugcuggccauccucaaggggaucuacaacgucgcgaccugcggccuguucgggcugguguccuuccuccugcugugcggccgcagcugcuccacgaccuacaaggggguguacgagcuccagacccuggagcuggacauggccagccucaacaugaccaugccgcuguccugcacgaagaacaacagccaccacuacaucauggucggcaacgagaccggccuggagcucacccugaccaacacguccaucaucaaccacaaguucugcaaccugagcgacgcccacaagaagaaccucuacgaccacgcccugauguccaucaucagcaccuuccaccuguccauccccaacuucaaccaguacgaggccaugagcugcgacuucaacgggggcaagaucuccgugcaguacaaccucagccacaccuacgcgguggacgccgccaaccacugcgggaccaucgccaacggcguccugcagacguucaugcggauggcguggggcggguccuacaucgcccuggacagcggcaagggguccugggacugcaucaugaccagcuaccaguaccucaucauccagaacaccaccugggaggaccacugccaguucucccgccccagccccaucggcuaccuggggcugcucagccagcggacgcgcgacaucuacaucucccggcgccugcugggcaccuucaccuggacccucagcgacuccgagggcaacgagacgcccgggggcuacugccugacccgguggaugcugaucgaggccgagcucaagugcuucgggaacaccgccguggccaagugcaacgagaagcacgacgaggaguucugcgacaugcugcgccuguucgacuucaacaagcaggcgaucaagcggcucaagaccgaggcccagaugagcauccagcugaucaacaaggccgugaacgcccugaucaacgaccagcucaucaugaagaaccaccuccgcgacaucaugggcauccccuacugcaacuacuccaaguacugcuaccugaaccacacggucaccgggaagaccagccugccccggugcugccugguguccaacggcagcuaccugaacgagacccacuucuccgacgacaucgagcagcaggccgacaacaugaucacggagcuccugcagaaggaguacaucgaccgccagggcaagaccccgcuggggcugguggaccucuucgucuucagcaccuccuucuaccugaucagcaucuuccugcaccucgugaagaucccgacccaccggcacguggucggcaagcccugccccaagccccaccgccugaaccacauggggaucugcuccugcggccuguacaagcacccgggggugcccgugaaguggaagcggugaggacuaguuauaagacugacuagcccgaugggccucccaacgggcccuccuccccuccuugcaccgagauuaaucaaaggcucuuuucagagccaccaaaaaaaaaaaaaaaaaaaaaaaaaaaaaaaaaaaaaaaaaaaaaaaaaaaaaaaaaaaaaaaaaaaaaaaaaaaaaaaaaaaaaaaaaaaaaaaaaaaaa

SEQ ID NO: 39702 - RNA, 1686 nt, Artificial Sequence
  mRNA product Design i-3 (hSL-A100) comprising derived and/or modified sequence from LASV(LASV221-NIG-2010;Clade II)__AIT17624__GPCmut11 (opt1)
aggagaaagcuuaccaugggccagaucaucaccuucuuccaggaggugccccacgucaucgaggaggugaugaacaucgugcugaucgcccucagccugcuggccauccucaaggggaucuacaacgucgcgaccugcggccuguucgggcugguguccuuccuccugcugugcggccgcagcugcuccacgaccuacaaggggguguacgagcuccagacccuggagcuggacauggccagccucaacaugaccaugccgcuguccugcacgaagaacaacagccaccacuacaucauggucggcaacgagaccggccuggagcucacccugaccaacacguccaucaucaaccacaaguucugcaaccugagcgacgcccacaagaagaaccucuacgaccacgcccugauguccaucaucagcaccuuccaccuguccauccccaacuucaaccaguacgaggccaugagcugcgacuucaacgggggcaagaucuccgugcaguacaaccucagccacaccuacgcgaucgacgccgccaaccacugcgggaccaucgccaacggcgugcugcagacguucaugcggauggcguggggcggguccuacaucgcccuggacagcggcaagggguccugggacugcaucaugaccagcuaccaguaccucaucauccagaacaccaccugggaggaccacugccaguucucccgccccagccccaucggcuaccuggggcugcucagccagcggacgcgcgacaucuacaucucccggcgccugcugggcaccuucaccuggacccucagcgacuccgagggcaacgagacgcccgggggcuacugccugacccgguggaugcugaucgaggccgagcucaagugcuucgggaacaccgccgucgccaagugcaacgagaagcacgacgaggaguucugcgacaugcugcgccuguucgacuucaacaagcaggcgauccggcgccucaagaccgaggcccagaugagcauccagcugaucaacaaggccgugaacgcccugaucaacgaccagcucaucaugaagaaccaccuccgggacaucaugggcauccccuacugcaacuacuccaaguacugcuaccugaaccacacggugaccgggaagaccagccugccccgcugcugccuggucuccaacggcagcuaccugaacgagacccacuucuccgacgacaucgagcagcaggccgacaacaugaucacggagaugcuccagaaggaguacauggaccggcagggcaagaccccgcuggggcugguggaccuguucguguucagcaccuccuucuaccucaucagcaucuuccugcaccuggucaagaucccgacccaccgccacgugaucggcaagcccugccccaagccccaccggcucaaccacauggggaucugcuccugcggccuguacaagcacccgggggugcccgucaaguggaagcgcugaggacuaguuauaagacugacuagcccgaugggccucccaacgggcccuccuccccuccuugcaccgagauuaaucaaaggcucuuuucagagccaccaaaaaaaaaaaaaaaaaaaaaaaaaaaaaaaaaaaaaaaaaaaaaaaaaaaaaaaaaaaaaaaaaaaaaaaaaaaaaaaaaaaaaaaaaaaaaaaaaaaaa

SEQ ID NO: 39703 - RNA, 1686 nt, Artificial Sequence
  mRNA product Design i-3 (hSL-A100) comprising derived and/or modified sequence from LASV(LASV237-NIG-2010;Clade II)__AIT17638__GPCmut11 (opt1)
aggagaaagcuuaccaugggccagaucaucaccuucuuccaggaggugccccacgucaucgaggaggugaugaacaucgugcugaucgcccucagccugcuggccauccucaaggggaucuacaacgucgcgaccugcggccuguucgggcugguguccuuccuccugcugugcggccgcagcugcuccacgaccuacaaggggguguacgagcuccagacccuggagcuggacauggccagccucaacaugaccaugccgcuguccugcacgaagaacaacagccaccacuacaucauggucggcaacgagaccggccuggagcucacccugaccaacacguccaucaucaaccacaaguucugcaaccugagcgacgcccacaagaaggaccucuacgaccacgcccugauguccaucaucagcaccuuccaccuguccauccccaacuucaaccaguacgaggccaugagcugcgacuucaacgggggcaagaucuccgugcaguacaaccucagccacaccuacgcgguggacgccgccaaccacugcgggaccaucgccaacggcguccugcagacguucaugcggauggcguggggcggguccuacaucgcccuggacagcggcaagggguccugggacugcaucaugaccagcuaccaguaccucaucauccagaacaccaccugggaggaccacugccaguucucccgccccagccccaucggcuaccuggggcugcucagccagcggacgcgcgacaucuacaucucccggcgccugcugggcaccuucaccuggacccucagcgacuccgagggcaacgagacgcccgggggcuacugccugacccgguggaugcugaucgaggccgagcucaagugcuucgggaacaccgccguggccaagugcaacgagaagcacgacgaggaguucugcgacaugcugcgccuguucgacuucaacaagcaggcgauccggcgccucaagaccgaggcccagaugagcauccagcugaucaacaaggccgugaacgcccugaucaacgaccagcucaucaugaagaaccaccuccgggacaucaugggcauccccuacugcaacuacuccaaguacugcuaccugaaccacacggucaccgggaagaccagccugccccgcugcugccugguguccaacggcagcuaccugaacgagacccacuucuccgacgacaucgagcagcaggccgacaacaugaucacggagcuccugcagaaggaguacauggaccggcagggcaagaccccgcuggggcugguggaccucuucgucuucagcaccuccuucuaccugaucagcaucuuccugcaccucaucaagaucccgacccaccgccacaucacgggcaagcccugccccaagccccaccggcugaaccacauggggaucugcuccugcggccuguacaagcacccgggggugcccgugaaguggaagcgcugaggacuaguuauaagacugacuagcccgaugggccucccaacgggcccuccuccccuccuugcaccgagauuaaucaaaggcucuuuucagagccaccaaaaaaaaaaaaaaaaaaaaaaaaaaaaaaaaaaaaaaaaaaaaaaaaaaaaaaaaaaaaaaaaaaaaaaaaaaaaaaaaaaaaaaaaaaaaaaaaaaaaa

SEQ ID NO: 39704 - RNA, 1686 nt, Artificial Sequence
  mRNA product Design i-3 (hSL-A100) comprising derived and/or modified sequence from LASV(LASV253-NIG-2011;Clade II)__AIT17670__GPCmut11 (opt1)
aggagaaagcuuaccaugggccagaucaucaccuucuuccaggaggugccccacgucaucgaggaggugaugaacaucgugcugaucgcccucagccugcuggccauccucaaggggaucuacaacgucgcgaccugcggccuguucgggcugguguccuuccuccugcugugcggccgcagcugcuccacgaccuacaaggggguguacgagcuccagacccuggagcuggacauggccagccucaacaugaccaugccgcuguccugcacgaagaacaacagccaccacuacaucauggucggcaacgagaccggccuggagcucacccugaccaacacguccaucaucaaccacaaguucugcaaccugagcgacgcccacaagaagaaccucuacgaccacgcccugauguccaucaucagcaccuuccaccuguccauccccaacuucaaccaguacgaggccaugagcugcgacuucaacgggggcaagaucuccgugcaguacaaccucagccacaccuacgcgguggacgccgccaaccacugcgggaccaucgccaacggcguccugcagacguucaugcggauggcguggggcggguccuacaucgcccuggacagcggcaagggguccugggacugcaucaugaccagcuaccaguaccucaucauccagaacaccaccugggaggaccacugccaguucucccgccccagccccaucggcuaccuggggcugcucagccagcggacgcgcgacaucuacaucucccggcgccugcugggcaccuucaccuggacccucagcgacuccgagggcaacgagacgcccgggggcuacugccugacccgguggaugcugaucgaggccgagcucaagugcuucgggaacaccgccguggccaagugcaacgagaagcacgacgaggaguucugcgacaugcugcgccuguucgacuucaacaagcaggcgauccggcgccucaaggccgaggcccagaugagcauccagcugaucaacaaggccgugaacgcccugaucaacgaccagcucaucaugaagaaccaccuccgggacaucaugggcaucccguacugcaacuacuccaaguacugcuaccugaaccacaccgucacggggcgcaccagccugccccggugcugccugguguccaacggcagcuaccugaacgagacccacuucuccgacgacaucgagcagcaggcggacaacaugaucaccgagcuccugcagaaggaguacaucgaccgccagggcaagacgccccuggggcugguggaccucuucgucuucagcaccuccuucuaccugaucagcaucuuccugcaccucgugaagaucccgacccaccggcacaucaucggcaagcccugccccaagccccaccgccugaaccacauggggaucugcuccugcggccuguacaagcacccgggggugcccgucaaguggaagcggugaggacuaguuauaagacugacuagcccgaugggccucccaacgggcccuccuccccuccuugcaccgagauuaaucaaaggcucuuuucagagccaccaaaaaaaaaaaaaaaaaaaaaaaaaaaaaaaaaaaaaaaaaaaaaaaaaaaaaaaaaaaaaaaaaaaaaaaaaaaaaaaaaaaaaaaaaaaaaaaaaaaaa

SEQ ID NO: 39705 - RNA, 1686 nt, Artificial Sequence
  mRNA product Design i-3 (hSL-A100) comprising derived and/or modified sequence from LASV(LASV254-NIG-2011;Clade II)__AIT17674__GPCmut11 (opt1)
aggagaaagcuuaccaugggccagaucaucaccuucuuccaggaggugccccacgucaucgaggaggugaugaacaucgugcugaucgcccucagccugcuggccauccucaaggggaucuacaacgucgcgaccugcggccuguucgggcugguguccuuccuccugcugugcggccgcagcugcuccacgaccuacaaggggguguacgagcuccagacccuggagcuggacaugaccaaccucaacaugacgaugccgcugagcugcaccaagaacaacucccaccacuacaucauggucggcaacgagaccggccuggagcucacccugacgaacaccagcaucaucaaccacaaguucugcaaccuguccgacgcccacaagaagaaccucuacaaccacgcccugaugagcaucaucuccaccuuccaccugagcauccccaacuucaaccaguacgaggccauguccugcgacuucaacgggggcaagaucagcgugcaguacaaccucucccacagcuacgccguggacgcggccaaccacugcgggaccaucgccaacggcguccugcagacguucaugcggauggccuggggcggguccuacaucgcgcuggacagcggcaaggggaacugggacugcaucaugaccuccuaccaguaccucaucauccagaacaccaccugggaggaccacugccaguucagccgccccucccccaucggcuaccuggggcugcucagccagcggacgcgcgacaucuacaucagccggcgccugcugggcaccuucaccuggacccucuccgacagcgagggcaacgagacgcccgggggcuacugccugacccgguggaugcugaucgaggccgagcucaagugcuucgggaacaccgccguggccaagugcaacgagaagcacgacgaggaguucugcgacaugcugcgccuguucgacuucaacaagcaggccauccggcgccucaagaccgaggcgcaggccaacauccagcugaucaacaaggccgugaacgcccugaucaacgaccagcucaucaugaagaaccaccuccgggacaucaugggcauccccuacugcaacuacuccaaguacugcuaccugaaccacacggucaccgggaagaccagccugccccgcugcugccugguguccaacggcagcuaccugaacgagacccacuucuccgacgacaucgagcagcaggccgacaacaugaucacggagcuccugcagaaggaguacauggaccggcagggcaagaccccgcuggggcugguggaccucuucgucuucagcaccuccuucuaccugaucagcaucuuccugcaccucgugaagaucccgacccaccgccacgugaucggcaagcccugccccaagccccaccggcugaaccacauggggaucugcuccugcggccuguacaagcacccggggguccccgugaaguggaagcgcugaggacuaguuauaagacugacuagcccgaugggccucccaacgggcccuccuccccuccuugcaccgagauuaaucaaaggcucuuuucagagccaccaaaaaaaaaaaaaaaaaaaaaaaaaaaaaaaaaaaaaaaaaaaaaaaaaaaaaaaaaaaaaaaaaaaaaaaaaaaaaaaaaaaaaaaaaaaaaaaaaaaaa

SEQ ID NO: 39706 - RNA, 1686 nt, Artificial Sequence
  mRNA product Design i-3 (hSL-A100) comprising derived and/or modified sequence from LASV(Nig08-A19;Clade III)__ADU56618__GPCmut11 (opt1)
aggagaaagcuuaccaugggccagaucgugaccuucuuccaggaggucccccacgugaucgaggaggugaugaacaucguccugaucgcccucagcauccuggccauccugaaggggcucuacaacaucgcgaccugcggccugaucgggcuggugacguuccuccugcuguccggccgcagcugcuccaugaccuacaaggggguguacgagcuccagacccuggagcugaacaugaacacccucaacaugacgaugccgcugagcugcaccaagaacaacucccaccacuacaucauggucggcaacgagaccggccuggagcucacccugacgaacaccagccugcuccaccacaaguucugcaaccuguccgacgcccacaagaagaaccuguacgaccacacccucaugagcaucaucuccaccuuccaccugagcauccccaacuucaaccaguacgaggccauguccugcgacuucaacgggggcaagaucacggugcaguacaaccugagccacuccuacgccaucgacgccgcgaaccacugcgggaccguggccaacggcguccuccagaccuucaugcggauggccuggggcgggagcuacaucgcccuggacuccggccgcgggaagugggacugcaucaugaccagcuaccaguaccugaucauccagaacacgaccugggaggaccacugccaguucucccggcccagccccaucggcuaccucgggcugcugucccagcgcacccgggacaucuacaucagccgccggcuccugggcaccuucacguggacccugagcgacuccgagggcaacgagacccccgggggcuacugccucacccgcuggaugcugaucgaggcggagcugaagugcuucgggaacacggccguggccaagugcaacgagaagcacgacgaggaguucugcgacaugcuccggcuguucgacuucaacaagcaggccauccgccggcugaaggccgaggcgcagaugagcauccagcucaucaacaaggccgugaacgcccugaucaacgaccagcugaucaugaagaaccaccuccgcgacaucaugggcauccccuacugcaacuacuccaaguacugcuaccugaaccacaccagcaccgggcggaccucccugccccgcugcugccucgucagcaacggcuccuaccugaacgagacgcacuucagcgacgacaucgagcagcaggccgacaacaugaucaccgagaugcugcagaaggaguaccuggaccggcagggcaagaccccgcucgggcugguggaccuguucguguucuccaccagcuucuaccucaucuccaucuuccugcaccuggucaagaucccgacgcaccgccacaucgugggcaagcccugccccaagccccaccggcucaaccacauggggaucugcagcugcggccuguacaagcagccgggggugcccguccgcuggaagcggugaggacuaguuauaagacugacuagcccgaugggccucccaacgggcccuccuccccuccuugcaccgagauuaaucaaaggcucuuuucagagccaccaaaaaaaaaaaaaaaaaaaaaaaaaaaaaaaaaaaaaaaaaaaaaaaaaaaaaaaaaaaaaaaaaaaaaaaaaaaaaaaaaaaaaaaaaaaaaaaaaaaaa

SEQ ID NO: 39707 - RNA, 1689 nt, Artificial Sequence
  mRNA product Design i-3 (hSL-A100) comprising derived and/or modified sequence from LASV(G1180-SLE-2010;Clade IV)__AIT17168__GPCmut11 (opt1)
aggagaaagcuuaccaugggccagaucgugaccuucuuccaggaggucccccacgugaucgaggaggugaugaacaucguccugaucgcccucagcauccuggccgugcugaaggggcucuacaacuucgcgaccugcggccugguggggcugcucaccuuccugcugcucugcggccgcuccugcaccgccagccgguacaagggggucuacgagcugcagacccuggagcucaacauggagacccugaacaugacgaugccgcuguccugcaccaagaacaacagccaccacuacaucauggugggcaacgagaccggccucgagcugacccugacgaacaccuccaucaucaaccacaaguucugcaaccucagcgacgcccacaagaagaaccuguacgaccacgcccugauguccaucaucagcaccuuccaccucuccauccccaacuucaaccaguacgaggccaugagcugcgacuucaacgggggcaagaucuccgugcaguacaaccugagccacuccuacgcgggggacgccgccaaccacugcggcaccgucgccaacggggugcugcagacguucaugcgcauggcguggggcggcagcuacaucgcccucgacuccgggcacggcagcugggacugcaucaugaccuccuaccaguaccugaucauccagaacaccaccugggaggaccacugccaguucagccggcccucccccaucggguaccugggccuccugagccagcgcacgcgggacaucuacaucagccgccggcugcucggcaccuucaccuggacccuguccgacagcgaggggaaggacacgccgggcggguacugccugacccgcuggaugcucaucgaggccgagcugaagugcuucggcaacaccgccguggccaagugcaacgagaagcacgacgaggaguucugcgacaugcugcggcuguucgacuucaacaagcaggcgauccagcgccugaaggccgaggcccagauguccauccagcugaucaacaaggccgucaacgcccucaucaacgaccagcugaucaugaagaaccaccuccgggacaucauggggauccccuacugcaacuacagcaaguacugcuaccucaaccacaccacgaccggcaagaccucccugcccaagugcugccuggugagcaacggcuccuaccucaacgagacccacuucagcgacgacaucgagcagcaggcggacaacaugaucacggagaugcugcagaaggaguacauggagcgccaggggaagacgccccugggccugguggaccucuucgucuucuccaccagcuucuaccugaucuccaucuuccugcaccucgugaagaucccgacccaccggcacaucgugggcaagagcugccccaagccccaccgccugaaccacauggggaucugcuccugcgggcuguacaagcagcccggcgucccggugaaguggaagcggugaggacuaguuauaagacugacuagcccgaugggccucccaacgggcccuccuccccuccuugcaccgagauuaaucaaaggcucuuuucagagccaccaaaaaaaaaaaaaaaaaaaaaaaaaaaaaaaaaaaaaaaaaaaaaaaaaaaaaaaaaaaaaaaaaaaaaaaaaaaaaaaaaaaaaaaaaaaaaaaaaaaaa

SEQ ID NO: 39708 - RNA, 1689 nt, Artificial Sequence
  mRNA product Design i-3 (hSL-A100) comprising derived and/or modified sequence from LASV(G1442-SLE-2011;Clade IV)__AIT17180__GPCmut11 (opt1)
aggagaaagcuuaccaugggccagaucgugaccuucuuccaggaggucccccacgugaucgaggaggugaugaacaucguccugaucgcccucagcauccuggccgugcugaaggggcucuacaacguggcgaccugcggccugaucgggcuggucacguuccuccugcugugcggccgcuccugcaccaccacccucuacaaggggguguacgagcugcagacgcuggagcucaacauggagacccugaacaugaccaugccgcugagcugcaccaagaacaacucccaccacuacauccgggugggcaacgagacgggccucgagcugacccugaccaacaccagcaucaucaaccacaaguucugcaaccucuccgacgcccacaagaagaaccuguacgaccacgcccugaugagcaucaucuccacguuccaccucagcauccccaacuucaaccaguacgaggccauguccugcgacuucaacgggggcaagaucagcguccaguacaaccugucccacagcuacgccggggacgcggccaaccacugcggcaccguggccaacggggugcugcagaccuucaugcgcauggccuggggcggcuccuacaucgcgcucgacagcgggcggggcaacugggacugcaucaugaccuccuaccaguaccugaucauccagaacacgaccugggacgaccacugccaguucagccgccccucccccaucggguaccugggccuccugagccagcggacccgcgacgucuacaucucccggcgccugcucggcaccuucacguggacccugagcgacagcgaggggaaggacaccccgggcggguacugccugacccgguggaugcucaucgaggccgagcugaagugcuucggcaacacggccguggccaagugcaacgagaagcacgacgaggaguucugcgacaugcugcgccucuucgacuucaacaagcaggccauccagcggcugaaggcggaggcccagauguccauccagcugaucaacaaggccgugaacgcccucaucaacgaccagcugaucaugaagaaccaccuccgcgacaucauggggauccccuacugcaacuacagcaaguacugcuaccugaacaacaccgccaccggcaagaccucccugcccaagugcugccugaucagcaacggcuccuaccucaacgagacgcacuucagcgacgacaucgagcaggaggcggacaacaugaucaccgagaugcugcagaaggaguacauggagcggcaggggaagacgccccugggccuggucgaccucuucguguucuccaccagcuucuaccugaucuccaucuuccugcaccucgugaagaucccgacccaccgccacaucgucggcaagagcugccccaagccccaccggcugaaccacauggggaucugcuccugcgggcuguacaagcagcccggcgugccggugcgcuggaagcggugaggacuaguuauaagacugacuagcccgaugggccucccaacgggcccuccuccccuccuugcaccgagauuaaucaaaggcucuuuucagagccaccaaaaaaaaaaaaaaaaaaaaaaaaaaaaaaaaaaaaaaaaaaaaaaaaaaaaaaaaaaaaaaaaaaaaaaaaaaaaaaaaaaaaaaaaaaaaaaaaaaaaa

SEQ ID NO: 39709 - RNA, 1689 nt, Artificial Sequence
  mRNA product Design i-3 (hSL-A100) comprising derived and/or modified sequence from LASV(G3010-SLE-2013;Clade IV)__AIT17344__GPCmut11 (opt1)
aggagaaagcuuaccaugggccagaucgugaccuucuuccaggaggucccccacgugaucgaggaggugaugaacaucguccugaucgcccucagcauccuggccgugcugaaggggcucuacaacuucgcgaccugcggccugguggggcuggucacguuccuccugcugugcggccgcuccugcaccaccagccucuacaaggggguguacgagcugcagacccuggagcucaacauggagacgcugaacaugaccaugccgcuguccugcaccaagaacaacagccaccacuacaucauggugggcaacgagaccggccucgagcugacgcugaccaacaccuccaucaucaaccacaaguucugcaaccucagcgacgcccacaagaagaaccuguacaaccacgcccugauguccaucaucagcaccuuccaccucuccauccccaacuucaaccaguacgaggccaugagcugcgacuucaacgggggcaagaucuccguccaguacaaccugagccacuccuacgccggggacgcggccagccacugcggcacgguggccaacggggugcugcagaccuucaugcggauggccuggggcggcuccuacaucgcgcucgacagcggguacggcaagugggacugcaucaugaccuccuaccaguaccugaucauccagaacaccacgugggaggaccacugccaguucagccgccccucccccaucggguaccugggccuccugagccagcggacccgcgacaucuacaucagccggcgccugcucggcaccuucaccuggacgcuguccgacagcgaggggaaggacaccccgggcggguacugccugacccgguggaugcucaucgaggccgagcugaagugcuucggcaacaccgccgucgccaagugcaacgagaagcacgacgaggaguucugcgacaugcugcgccucuucgacuucaacaagcaggccauccagcggcugaagacggaggcgcagauguccauccagcugaucaacaaggccgugaacgcccucaucaacgaccagcugaucaugaagaaccaccuccgcgacaucauggggauccccuacugcaacuacagcaaguacugcuaccugaaccacaccaccaccggcaagacgucccugcccaagugcugccuggugagcaacggcuccuaccucaacgagacccacuucagcgacgacaucgagcagcaggccgacaacaugaucaccgagaugcugcagaaggaguacauggagcggcaggggaagacgccccugggccuggucgaccucuucguguucuccaccagcuucuaccugaucuccaucuuccugcaccucgugaagaucccgacccaccgccacaucgucggcaagagcugccccaagccccaccggcugaaccacauggggaucugcuccugcgggcuguacaagcagcccggcgugccggugcgcuggaagcggugaggacuaguuauaagacugacuagcccgaugggccucccaacgggcccuccuccccuccuugcaccgagauuaaucaaaggcucuuuucagagccaccaaaaaaaaaaaaaaaaaaaaaaaaaaaaaaaaaaaaaaaaaaaaaaaaaaaaaaaaaaaaaaaaaaaaaaaaaaaaaaaaaaaaaaaaaaaaaaaaaaaaa

SEQ ID NO: 39710 - RNA, 1689 nt, Artificial Sequence
  mRNA product Design i-3 (hSL-A100) comprising derived and/or modified sequence from LASV(G502-SLE-2009;Clade IV)__AIT17126__GPCmut11 (opt1)
aggagaaagcuuaccaugggccagaucgugaccuucuuccaggaggucccccacgugaucgaggaggugaugaacaucguccugaucgcccucagcauccuggccgugcugaaggggcucuacaacuucgcgaccugcggccugguggggcugcucacguuccugcugcucugcggccgcuccugcaccaccgggcuguacaagggcgucuacgagcugcagacccucgagcugaacauggagacgcugaacaugaccaugccgcucagcugcaccaagaacaacucccaccacuacaucauggugggcaacgagaccgggcuggagcugacgcucaccaacaccagcaucaucaaccacaaguucugcaaccuguccgacgcccacaagaagaaccuguacgaccacgcccucaugagcaucaucuccaccuuccaccugagcauccccaacuucaaccaguacgaggccauguccugcgacuucaacggcgggaagaucagcgugcaguacaaccugucccacagcuacgccggcgacgcggccgaccacugcgggacggucgccaacggcgugcuccagaccuucaugcggauggccuggggcggguccuacaucgcgcuggacagcggccgcgggcggugggacugcaucaugaccuccuaccaguaccugaucauccagaacaccacgugggaggaccacugccaguucagccgccccucccccaucggcuaccucggccugcugagccagcggacccgcgacaucuacaucucccggcgccuccuggggaccuucaccuggacgcugagcgacagcgagggcaaggacacccccgggggcuacugccucacccgguggaugcugaucgaggccgagcugaagugcuucgggaacaccgccguggccaagugcaacgagaagcacgacgaggaguucugcgacaugcuccgccuguucgacuucaacaagcaggccauccagcggcugaaggcggaggcccagauguccauccagcucaucaacaaggccgucaacgcccugaucaacgaccagcuggugaugaagaaccaccuccgcgacaucaugggcauccccuacugcaacuacagccgguacugcuaccugaaccacacgaccaccggccgcaccucccugcccaagugcugccucgugagcaacggguccuaccugaacgagacgcacuucagcgacgacaucgagcagcaggccgacaacaugaucaccgagaugcugcagaaggaguacauggagcggcagggcaagaccccgcuggggcucgucgaccuguucguguucuccaccagcuucuaccugaucuccaucuuccuccaccuggugaagaucccgacgcaccgccacaucgucggcaagagcugccccaagccccaccggcugaaccacauggggaucugcuccugcggccucuacaagcagcccggcgugccggugaaguggaagcgcugaggacuaguuauaagacugacuagcccgaugggccucccaacgggcccuccuccccuccuugcaccgagauuaaucaaaggcucuuuucagagccaccaaaaaaaaaaaaaaaaaaaaaaaaaaaaaaaaaaaaaaaaaaaaaaaaaaaaaaaaaaaaaaaaaaaaaaaaaaaaaaaaaaaaaaaaaaaaaaaaaaaaa

SEQ ID NO: 39711 - RNA, 1689 nt, Artificial Sequence
  mRNA product Design i-3 (hSL-A100) comprising derived and/or modified sequence from LASV(G733-SLE-2010;Clade IV)__AIT17154__GPCmut11 (opt1)
aggagaaagcuuaccaugggccagaucgugaccuucuuccaggaggucccccacgugaucgaggaggugaugaacaucguccugaucgcccucagcauccuggccgugcugaaggggcucuacaacuucgcgaccugcggcaucguggggcuggucuccuuccugcuccugugcggccgcagcugcacgaccucccuguacaaggggguguacgagcuccagacccuggagcugaacauggagacccucaacaugacgaugccgcugagcugcaccaagaacaacucccaccacuacaucauggugggcaacgagaccggccuggagcucacccugacgaacaccagcaucaucaaccacaaguucugcaaccuguccgacgcccacaagaagaaccucuacgaccacgcccugaugagcaucaucuccaccuuccaccugagcauccccaacuucaaccaguacgaggccauguccugcgacuucaacgggggcaagaucagcguccaguacaaccucucccacagcuacgccggggacgcggccaaccacugcggcaccaucgccaacggggugcugcagacguucaugcggauggccuggggcggcuccuacaucgcgcuggacagcgggcgcgaccggugggacugcaucaugaccuccuaccaguaccucaucauccagaacaccaccugggaggaccacugccaguucagccgccccucccccaucggcuaccuggggcugcucagccagcggacgcgcgacaucuacaucagccggcgccugcugggcaccuucaccuggacccucuccgacagcgagggcaaggacacgcccgggggcuacugccugacccgguggaugcugaucgaggccgagcucaagugcuucgggaacaccgccguggccaagugcaacgagaagcacgacgaggaguucugcgacaugcugcgccuguucgacuucaacaagcaggccauccagcggcucaaggcggaggcccagauguccauccagcugaucaacaaggccgucaacgcccugaucaacgaccagcucaucaugaagaaccaccuccgcgacaucaugggcauccccuacugcaacuacagcaaguacugcuaccugaaccacaccacgaccgggaagaccucccugcccaagugcugccuggugagcaacggcuccuaccugaacgagacccacuucagcgacgacaucgagcagcaggccgacaacaugaucacggagaugcuccagaaggaguacauggagcggcagggcaagaccccgcuggggcugguggaccuguucgucuucuccaccagcuucuaccucaucuccaucuuccugcaccuggugaagaucccgacccaccgccacguggucggcaagagcugccccaagccccaccggcucaaccacauggggaucugcuccugcggccuguacgggcagcccggcgugccggugaaguggaagcgcugaggacuaguuauaagacugacuagcccgaugggccucccaacgggcccuccuccccuccuugcaccgagauuaaucaaaggcucuuuucagagccaccaaaaaaaaaaaaaaaaaaaaaaaaaaaaaaaaaaaaaaaaaaaaaaaaaaaaaaaaaaaaaaaaaaaaaaaaaaaaaaaaaaaaaaaaaaaaaaaaaaaaa

SEQ ID NO: 39712 - RNA, 1689 nt, Artificial Sequence
  mRNA product Design i-3 (hSL-A100) comprising derived and/or modified sequence from MOPV/LASV reassortant(IGS-1;Clade IV)__AFY05576__GPCmut11 (opt1)
aggagaaagcuuaccaugggccagaucgugaccuucuuccaggaggucccccacgugaucgaggaggugaugaacaucguccugaucgcccucagcgugcuggccgugcugaaggggcucuacaacuucgcgaccugcggccuggucgggcuggugacguuccuccugcugugcggccgcuccugcaccaccagccucuacaaggggguguacgagcugcagacccuggagcucaacauggagacgcugaacaugaccaugccgcuguccugcaccaagaacaacagccaccacuacaucauggucggcaacgagaccggccucgagcugacgcugaccaacaccuccaucaucaaccacaaguucugcaaccucagcgacgcccacaagaagaaccuguacgaccacgcccugauguccaucaucagcaccuuccaccucuccauccccaacuucaaccaguacgaggccaugagcugcgacuucaacgggggcaagaucuccgugcaguacaaccugagccacuccuacgccggggacgcggccaaccacugcggcacgguggccaacgggguccugcagaccuucaugcggauggccuggggcggcagcuacaucgcgcucgacuccgggcgcggcaacugggacugcaucaugaccagcuaccaguaccugaucauccagaacaccacgugggaggaccacugccaguucucccggcccagccccaucggguaccugggccuccugucccagcgcacccgggacaucuacaucagccgccggcugcucggcaccuucaccuggacgcugagcgacuccgagggggaggacaccccgggcggguacugccugacccgcuggaugcucaucgaggccgagcugaagugcuucggcaacaccgccguggccaagugcaacgagaagcacgacgaggaguucugcgacaugcugcggcuguucgacuucaacaagcaggccauccagcgccugaaggcggaggcccagaugagcauccagcugaucaacaaggccgugaacgcccucaucaacgaccagcugaucaugaagaaccaccuccgggacaucauggggauccccuacugcaacuacuccaaguacugcuaccucaaccacacgaccaccggccgcaccagccugcccaagugcugccuggucuccaacggcagcuaccucaacgagacgcacuucuccgacgacaucgagcagcaggccgacaacaugaucaccgagaugcugcagaaggaguacauggagcggcaggggaagacgccccugggccugguggaccucuucguguucagcaccuccuucuaccugaucagcaucuuccugcaccucgucaagaucccgacccaccgccacaucguggggaaguccugccccaagccccaccggcugaaccacaugggcaucugcagcugcgggcuguacaagcagcccggcgugccggucaaguggaagcgcugaggacuaguuauaagacugacuagcccgaugggccucccaacgggcccuccuccccuccuugcaccgagauuaaucaaaggcucuuuucagagccaccaaaaaaaaaaaaaaaaaaaaaaaaaaaaaaaaaaaaaaaaaaaaaaaaaaaaaaaaaaaaaaaaaaaaaaaaaaaaaaaaaaaaaaaaaaaaaaaaaaaaa

SEQ ID NO: 39713 - RNA, 1689 nt, Artificial Sequence
  mRNA product Design i-3 (hSL-A100) comprising derived and/or modified sequence from LASV(LM765-SLE-2012;Clade IV)__AIT17814__GPCmut11 (opt1)
aggagaaagcuuaccaugggccagaucgugaccuucuuccaggaggucccccacgugaucgaggaggugaugaacaucguccugaucgcccucagcauccuggccgugcugaaggggcucuacaacuucgcgaccugcggccugguggggcuggucacguuccuccugcugugcggccgcuccugcaccaccagccucuacaaggggguguacgagcugcagacccuggagcucaacauggagacgcugaacaugaccaugccgcuguccugcaccaagaacaacagccaccacuacaucauggugggcaacgagaccggccucgagcugacgcugaccaacaccuccaucaucgaccacaaguucugcaaccucagcgacgcccaccggaagaaccuguacgaccacgcccugauguccaucaucagcaccuuccaccucuccauccccaacuucaaccaguacgaggccaugagcugcgacuucaacgggggcaagaucuccguccaguacaaccugagccacuccuacgccaaggacgcggccgaccacugcgggacgguggccaacggcgugcugcagaccuucaugcgcauggccuggggcgggagcuacaucgcgcucgacuccggccgggggcgcugggacugcaucaugaccagcuaccaguaccugaucauccagaacaccacgugggaggaccacugccaguucucccggcccagccccaucggcuaccuggggcuccugucccagcgcacccgggacaucuacaucagccgccggcugcucggcaccuucaccuggacgcugagcgacuccgagggcaaggacacccccgggggcuacugccugacccgcuggaugcucaucgaggccgagcugaagugcuucgggaacaccgccgucgccaagugcaacgagaagcacgacgaggaguucugcgacaugcugcggcuguucgacuucaacaagcaggccauccagcgccugaaggcggaggcccagaugagcauccagcugaucaacaaggccgugaacgcccucaucaacgaccagcugaucaugaagaaccaccuccgggacaucaugggcauccccuacugcaacuacuccaaguacugcuaccucaaccacacgaccaccgggaagaccagccugcccaagugcugccugguguccaacggcagcuaccucaacgagacgcacuucuccgacgacaucgagcagcaggccgacaacaugaucaccgagaugcugcagaaggaguacauggagcgccagggcaagaccccgcuggggcuggucgaccucuucguguucagcaccuccuucuaccugaucagcaucuuccugcaccucgugaagaucccgacgcaccggcacaucgucggcaagcccugccccaagccccaccgccugaaccacauggggaucugcuccugcggccuguacaagcagccgggggugcccgugaaguggaagcggugaggacuaguuauaagacugacuagcccgaugggccucccaacgggcccuccuccccuccuugcaccgagauuaaucaaaggcucuuuucagagccaccaaaaaaaaaaaaaaaaaaaaaaaaaaaaaaaaaaaaaaaaaaaaaaaaaaaaaaaaaaaaaaaaaaaaaaaaaaaaaaaaaaaaaaaaaaaaaaaaaaaaa

SEQ ID NO: 39714 - RNA, 1689 nt, Artificial Sequence
  mRNA product Design i-3 (hSL-A100) comprising derived and/or modified sequence from LASV(LM776-SLE-2012;Clade IV)__AIT17824__GPCmut11 (opt1)
aggagaaagcuuaccaugggccagaucgugaccuucuuccaggaggucccccacgugaucgaggaggugaugaacaucguccugaucgcccucagcauccuggccgugcugaaggggcucuacaacuucgcgaccugcggccugguggggcuggucacguuccuccugcugugcggccgcuccugcaccaccagcguguacaaggggguguacgagcuccagacccuggagcugaacauggagacgcucaacaugaccaugccgcuguccugcaccaagaacaacagccaccacuacaucauggucggcaacgagaccggccuggagcucacgcugaccaacaccuccaucaucaaccacaaguucugcaaccugagcgacgcccacaagaagaaccucuacgaccacgcccugauguccaucaucagcaccuuccaccuguccauccccaacuucaaccaguacgaggccaugagcugcgacuucaacgggggcaagaucuccgugcaguacaaccucagccacuccuacgccggggacgcggccaaccacugcggcacgguggccaacgggguccugcagaccuucaugcggauggccuggggcggcagcuacaucgcgcuggacuccgggcacggcaagugggacugcaucaugaccagcuaccaguaccucaucauccagaacaccacgugggaggaccacugccaguucucccgccccagccccaucggguaccugggccugcucucccagcggacccgcgacaucuacaucagccggcgccugcugggcaccuucaccuggacgcucagcgacuccgaggggaaggacaccccgggcggguacugccugacccgguggaugcugaucgaggccgagcucaagugcuucggcaacaccgccguggccaagugcaacgagaagcacgacgaggaguucugcgacaugcugcgccuguucgacuucaacaagcaggccauccagcggcucaaggcggaggcccagaugagcauccagcugaucaacaaggccgugaacgcccugaucaacgaccagcucaucaugaagaaccaccuccgcgacaucauggggauccccuacugcaacuacuccaaguacugcuaccugaaccacacgaccaccggcaagaccagccugcccaagugcugccuggucuccaacggcagcuaccugaacgagacgcacuucuccgacgacaucgagcagcaggccgacaacaugaucaccgagaugcuccagaaggaguacauggagcggcaggggaagacgccccugggccugguggaccuguucguguucagcaccuccuucuaccucaucagcaucuuccugcaccuggucaagaucccgacccaccgccacaucguggggaaguccugccccaagccccaccggcucaaccacaugggcaucugcagcugcgggcuguacaagcagcccggcgugccgguccgcuggaagcggugaggacuaguuauaagacugacuagcccgaugggccucccaacgggcccuccuccccuccuugcaccgagauuaaucaaaggcucuuuucagagccaccaaaaaaaaaaaaaaaaaaaaaaaaaaaaaaaaaaaaaaaaaaaaaaaaaaaaaaaaaaaaaaaaaaaaaaaaaaaaaaaaaaaaaaaaaaaaaaaaaaaaa

SEQ ID NO: 39715 - RNA, 1689 nt, Artificial Sequence
  mRNA product Design i-3 (hSL-A100) comprising derived and/or modified sequence from LASV(Mad39;Clade IV)__ANH09722__GPCmut11 (opt1)
aggagaaagcuuaccaugggccagaucgugaccuucuuccaggaggucccccacgugaucgaggaggugaugaacaucguccugaucgcccucagcauccuggccgugcugaaggggcucuacaacguggcgaccugcggccugaucgggcuggucacguuccuccugcugugcggccgcuccugcaccaccacccucuacaaggggguguacgagcugcaggcccuggagcucaacauggagacgcugaacaugaccaugccgcugagcugcaccaagaacaacucccaccacuacauccgggugggcaacgagaccggccucgagcugacgcugaccaacaccagccucaucaaccacaaguucugcaaccuguccgacgcccacaagaagaaccuguacgaccacgcccucaugagcaucaucuccaccuuccaccugagcauccccaacuucaaccaguacgaggccauguccugcgacuucaacgacgggaagaucagcguccaguacaaccugucccacacguacgcgggcgacaccgccaaccacugcgggaccguggccaacggcgugcuccagaccuucaugcgcauggccuggggcgggagcuacaucgcgcuggacuccggccgcgggggcugggacugcaucaugacgagcuaccaguaccugaucauccagaacaccaccugggaggaccacugccaguucucccggcccagccccaucggguaccucggccugcugucccagcggacccgcgacaucuacaucagccggcgccuccugggcacguucaccuggacccuguccgacagcgaggggaaggacaccccgggcggguacugccucacgcgguggaugcugaucgaggccgagcugaagugcuucggcaacaccgccgucgccaagugcaacgagaagcacgacgaggaguucugcgacaugcuccgccuguucgacuucaacaagcaggccauccagcggcugaaggcggaggcccagaugagcauccagcucaucaacaaggccgugaacgcccugaucaacgaccagcugaucaugaagaaccaccuccgcgacaucauggggauccccuacugcaacuacuccaaguacugcuaccugaaccacaccgugaccggcaagacgagccugcccaagugcugccucgucuccaacggcagcuaccugaacgagacccacuucuccgacgacaucgagcagcaggccgacaacaugaucaccgagaugcugcagaaggaguacauggagcggcaggggaagacgccccugggccucguggaccuguucguguucagcaccuccuucuaccugaucagcaucuuccuccaccuggucaagaucccgacccaccgccacgugguggggaagcccugccccaagccccaccggcugaaccacaugggcaucugcuccugcggguucuacaagcagccgggcguccccgugcgcuggaagcggugaggacuaguuauaagacugacuagcccgaugggccucccaacgggcccuccuccccuccuugcaccgagauuaaucaaaggcucuuuucagagccaccaaaaaaaaaaaaaaaaaaaaaaaaaaaaaaaaaaaaaaaaaaaaaaaaaaaaaaaaaaaaaaaaaaaaaaaaaaaaaaaaaaaaaaaaaaaaaaaaaaaaa

SEQ ID NO: 39716 - RNA, 1689 nt, Artificial Sequence
  mRNA product Design i-3 (hSL-A100) comprising derived and/or modified sequence from LASV(Z0947-SLE-2011;Clade IV)__AIT17840__GPCmut11 (opt1)
aggagaaagcuuaccaugggccagaucgugaccuucuuccaggaggucccccacgugaucgaggaggugaugaacaucguccugaucgcccucagcauccuggccgugcugaaggggcucuacaacuucgcgaccugcggccugguggggcuggucacguuccuccugcugugcggccgcuccugcaccaucagccucuacaaggggguguacgagcugcagacccuggagcucaacauggagacccugaacaugacgaugccgcuguccugcaccaagaacaacagccaccacuacaucauggugggcaacgagaccggccucgagcugacccugacgaacaccuccaucaucaaccacaaguucugcaaccucagcgacgcccacaagaagaaccuguacgaccacgcccugauguccaucaucagcaccuuccaccucuccauccccaacuucaaccaguacgaggccaugagcugcgacuucaacgggggcaagaucuccguccaguacaaccugagccacuccuacgccggggacgcggccaaccacugcggcaccguggccaacggggugcugcagacguucaugcggauggccuggggcggcagcuacaucgcgcucgacuccgggcgcgaccggugggacugcaucaugaccagcuaccaguaccugaucauccagaacaccaccugggaggaccacugccaguucucccgccccagccccaucggcuaccuggggcuccugucccagcggacgcgcgacaucuacaucagccggcgccugcucggcaccuucaccuggacccugagcgacuccgagggcaaggacacgcccgggggcuacugccugacccgguggaugcucaucgaggccgagcugaagugcuucgggaacaccgccgucgccaagugcaacgagaagcacgacgaggaguucugcgacaugcugcgccucuucgacuucaacaagcaggccauccagcggcugaaggcggaggcccagaugagcauccagcugaucaacaaggccgugaacgcccucaucaacgaccagcugaucaugaagaaccaccuccgcgacaucaugggcauccccuacugcaacuacuccaaguacugcuaccugaaccacaccacgaccgggaagaccagccugcccaagugcugccugguguccaacggcagcuaccucaacgagacccacuucuccgacgacaucgagcagcaggccgacaacaugaucacggagaugcugcagaaggaguacauggagcggcagggcaagaccccgcuggggcuggucgaccucuucguguucagcaccuccuucuaccugaucagcaucuuccugcaccucgugaagaucccgacccaccgccacaucgucggcaagcccugccccaagccccaccggcugaaccacauggggaucugcuccugcggccuguacaagcagccgggggugcccgugaaguggaagcgcugaggacuaguuauaagacugacuagcccgaugggccucccaacgggcccuccuccccuccuugcaccgagauuaaucaaaggcucuuuucagagccaccaaaaaaaaaaaaaaaaaaaaaaaaaaaaaaaaaaaaaaaaaaaaaaaaaaaaaaaaaaaaaaaaaaaaaaaaaaaaaaaaaaaaaaaaaaaaaaaaaaaaa

SEQ ID NO: 39717 - RNA, 1689 nt, Artificial Sequence
  mRNA product Design i-3 (hSL-A100) comprising derived and/or modified sequence from LASV(Josiah;Clade IV)__NP_694870__GPCmut11 (opt4)
aggagaaagcuuaccaugggccagaucgugaccuucuuccaggaggugccccacgugaucgaggaggugaugaacaucgugcugaucgcccugagcgugcuggccgugcugaagggccuguacaacuucgccaccugcggccuggugggccuggugaccuuccugcugcugugcggcagaagcugcaccaccagccuguacaagggcguguacgagcugcagacccuggagcugaacauggagacccugaacaugaccaugccccugagcugcaccaagaacaacagccaccacuacaucauggugggcaacgagaccggccuggagcugacccugaccaacaccagcaucaucaaccacaaguucugcaaccugagcgacgcccacaagaagaaccuguacgaccacgcccugaugagcaucaucagcaccuuccaccugagcauccccaacuucaaccaguacgaggccaugagcugcgacuucaacggcggcaagaucagcgugcaguacaaccugagccacagcuacgccggcgacgccgccaaccacugcggcaccguggccaacggcgugcugcagaccuucaugagaauggccuggggcggcagcuacaucgcccuggacagcggcagaggcaacugggacugcaucaugaccagcuaccaguaccugaucauccagaacaccaccugggaggaccacugccaguucagcagacccagccccaucggcuaccugggccugcugagccagagaaccagagacaucuacaucagcagaagacugcugggcaccuucaccuggacccugagcgacagcgagggcaaggacacccccggcggcuacugccugaccagauggaugcugaucgaggccgagcugaagugcuucggcaacaccgccguggccaagugcaacgagaagcacgacgaggaguucugcgacaugcugagacuguucgacuucaacaagcaggccauccagagacugaaggccgaggcccagaugagcauccagcugaucaacaaggccgugaacgcccugaucaacgaccagcugaucaugaagaaccaccugagagacaucaugggcauccccuacugcaacuacagcaaguacugcuaccugaaccacaccaccaccggcagaaccagccugcccaagugcugccuggugagcaacggcagcuaccugaacgagacccacuucagcgacgacaucgagcagcaggccgacaacaugaucaccgagaugcugcagaaggaguacauggagagacagggcaagaccccccugggccugguggaccuguucguguucagcaccagcuucuaccugaucagcaucuuccugcaccuggugaagauccccacccacagacacaucgugggcaagagcugccccaagccccacagacugaaccacaugggcaucugcagcugcggccuguacaagcagcccggcgugcccgugaaguggaagagaugaggacuaguuauaagacugacuagcccgaugggccucccaacgggcccuccuccccuccuugcaccgagauuaaucaaaggcucuuuucagagccaccaaaaaaaaaaaaaaaaaaaaaaaaaaaaaaaaaaaaaaaaaaaaaaaaaaaaaaaaaaaaaaaaaaaaaaaaaaaaaaaaaaaaaaaaaaaaaaaaaaaaa

SEQ ID NO: 39718 - RNA, 1686 nt, Artificial Sequence
  mRNA product Design i-3 (hSL-A100) comprising derived and/or modified sequence from LASV(LP;Clade I)__AAF86701__GPCmut11 (opt4)
aggagaaagcuuaccaugggccagaucaucaccuucuuccaggaggugccccacgugaucgaggaggugaugaacaucgugcugaucgcccugagccugcuggccauccugaagggccuguacaacaucgccaccugcggcaucaucggccugguggccuuccuguuccugugcggcaagagcugcagccugacccugaagggcggcuacgagcugcagacccuggagcugaacauggagacccugaacaugaccaugccccugagcugcaccaagaacagcagccaccacuacaucagagugggcaacgagaccggccuggagcugacccugaccaacaccagcaucaucaaccacaaguucugcaaccugagcgacgcccacaagaagaaccuguacgaccacgcccugaugagcaucaucagcaccuuccaccugagcauccccaacuucaaccaguacgaggccaugagcugcgacuucaacggcggcaagaucagcgugcaguacaaccugagccacagcuacgccggcgacgccgccgagcacugcggcaccguggccaacggcgugcugcagaccuucaugagaauggccuggggcggcagauacaucgcccuggacagcggcaagggcaacugggacugcaucaugaccagcuaccaguaccugaucauccagaacaccaccugggaggaccacugccaguucagcagacccagccccaucggcuaccugggccugcugagccagagaaccagagacaucuacaucagcagaagacugcugggcaccuucaccuggacccugagcgacagcgagggcaacgagacccccggcggcuacugccugaccagauggaugcugaucgaggccgagcugaagugcuucggcaacaccgccguggccaagugcaacgagaagcacgacgaggaguucugcgacaugcugagacuguucgacuucaacaagcaggccaucagaagacugaaggccgaggcccagaugagcauccagcugaucaacaaggccgugaacgcccugaucaacgaccagcugaucaugaagaaccaccugagagacaucaugggcauccccuacugcaacuacagcaaguacugcuaccugaaccacaccagcagcggcagaaccagccugcccaagugcugccugaucagcaacggcagcuaccugaacgagacccaguucagcgacgacaucgagcagcaggccgacaacaugaucaccgagaugcugcagaaggaguacaucgagagacagggcaagaccccccugggccugguggacaucuucaucuucagcaccagcuucuaccugaucagcaucuuccugcaccugaucaagauccccacccacagacacaucgugggcaagcccugccccaagccccacagacugaaccacaugggcgugugcagcugcggccuguacaagcaccccggcgugcccaccaaguggaagagaugaggacuaguuauaagacugacuagcccgaugggccucccaacgggcccuccuccccuccuugcaccgagauuaaucaaaggcucuuuucagagccaccaaaaaaaaaaaaaaaaaaaaaaaaaaaaaaaaaaaaaaaaaaaaaaaaaaaaaaaaaaaaaaaaaaaaaaaaaaaaaaaaaaaaaaaaaaaaaaaaaaaaa

SEQ ID NO: 39719 - RNA, 1686 nt, Artificial Sequence
  mRNA product Design i-3 (hSL-A100) comprising derived and/or modified sequence from LASV(803213;Clade II)__AAF86703__GPCmut11 (opt4)
aggagaaagcuuaccaugggccagaucaucaccuucuuccaggaggugccccacgugaucgaggaggugaugaacaucgugcugaucgcccugagccugcuggccauccugaagggcaucuacaacguggccaccugcggccuguucggccugaucagcuuccugcugcugugcggcagaagcugcagcgugaccuacaagggcguguacgagcugcagacccuggagcugaacauggccaaccugaacaugaccaugccccugagcugcaccaagaacaacagccaccacuacaucauggugggcaacgagaccggccuggagcugacccugaccaacaccagcaucaucaaccacaaguucugcaaccugagcgacgcccacaagaagaaccuguacgaccacgcccugaugagcaucaucagcaccuuccaccugagcauccccaacuucaaccaguacgaggccaugagcugcgacuucaacggcggcaagaucagcgugcaguacaaccugagccacagcuucgccguggacgccgccaaccacugcggcaccaucgccaacggcgugcugcagaccuucaugagaauggccuggggcggcagcuacaucgcccuggacagcggcaagggcaacugggacugcaucaugaccagcuaccaguaccugaucauccagaacaccaccugggaggaccacugccaguucagcagacccagccccaucggcuaccugggccugcugagccagagaaccagagacaucuacaucagcagaagacugcugggcaccuucaccuggacccugagcgacagcgagggcaacgaggcccccggcggcuacugccugaccagauggaugcugaucgaggccgagcugaagugcuucggcaacaccgccguggccaagugcaacgagaagcacgacgaggaguucugcgacaugcugagacuguucgacuucaacaagcaggccaucaagagacugaagaccgaggcccagaugagcauccagcugaucaacaaggccgugaacgcccugaucaacgaccagcugaucaugaagaaccaccugagagacaucaugggcauccccuacugcaacuacagcagauacugcuaccugaaccacaccgugaccggcaagaccagccugcccagaugcugccuggugagcaacggcagcuaccugaacgagacccacuucagcgacgacaucgagcagcaggccgacaacaugaucaccgagaugcugcagaaggaguacauggacagacagggcaagaccccccugggccugguggaccuguucguguucagcaccagcuucuaccugaucagcaucuuccugcaccuggugaagauccccacccacagacacaucgugggcaagcccugccccaagccccacagacugaaccacaugggcaucugcagcugcggccuguacaagcaccccggcgugcccgugaaguggaagagaugaggacuaguuauaagacugacuagcccgaugggccucccaacgggcccuccuccccuccuugcaccgagauuaaucaaaggcucuuuucagagccaccaaaaaaaaaaaaaaaaaaaaaaaaaaaaaaaaaaaaaaaaaaaaaaaaaaaaaaaaaaaaaaaaaaaaaaaaaaaaaaaaaaaaaaaaaaaaaaaaaaaaa

SEQ ID NO: 39720 - RNA, 1686 nt, Artificial Sequence
  mRNA product Design i-3 (hSL-A100) comprising derived and/or modified sequence from LASV(GA391;Clade III)__CAA36645__GPCmut11 (opt4)
aggagaaagcuuaccaugggccagaucgugaccuucuuccaggaggugccccacgugaucgaggaggugaugaacaucgugcugaucgcccugagcauccuggccauccugaagggccuguacaacguggccaccugcggccugaucggccuggugaccuuccugcugcugagcggcagaagcugcagccugaucuacaagggcaccuacgagcugcagacccuggagcugaacauggagacccugaacaugaccaugccccugagcugcaccaagaacaacagccaccacuacaucagagugggcaacgagaccggccuggagcugacccugaccaacaccagcauccugaaccacaaguucugcaaccugagcgacgcccacaagagaaaccuguacgaccacagccugaugagcaucaucagcaccuuccaccugagcauccccaacuucaaccaguacgaggccaugagcugcgacuucaacggcggcaagaucaccgugcaguacaaccugagccacagcuucgccguggacgccgccggccacugcggcacccuggccaacggcgugcugcagaccuucaugagaauggccuggggcggcagcuacaucgcccuggacagcggcagaggcaacugggacugcaucaugaccagcuaccaguaccugaucauccagaacaccaccugggacgaccacugccaguucagcagacccagccccaucggcuaccugggccugcugagccagagaaccagagacaucuacaucagcagaagacugcugggcaccuucaccuggacccugagcgacagcgagggcaacgagacccccggcggcuacugccugaccagauggaugcugaucgaggccgagcugaagugcuucggcaacaccgccguggccaagugcaacgagaagcacgacgaggaguucugcgacaugcugagacuguucgacuucaacaagcaggccaucagaagacugaagaccgaggcccagaugagcauccagcugaucaacaaggccgugaacgcccugaucaacgaccagcugaucaugaagaaccaccugagagacaucaugggcauccccuacugcaacuacagcagauacugcuaccugaaccacaccagcaccggcaagaccagccugcccagaugcugccugaucagcaacggcagcuaccugaacgagaccaaguucagcgacgacaucgagcagcaggccgacaacaugaucaccgagaugcugcagaaggaguacaucgacagacagggcaagaccccccugggccugguggaccuguucguguucagcaccagcuucuaccugaucagcaucuuccugcaccuggugaagauccccacccacagacacaucgugggcaagcccugccccaagccccacagacugaaccacaugggcaucugcagcugcggccuguacaagcagcccggcgugcccgugagauggaagagaugaggacuaguuauaagacugacuagcccgaugggccucccaacgggcccuccuccccuccuugcaccgagauuaaucaaaggcucuuuucagagccaccaaaaaaaaaaaaaaaaaaaaaaaaaaaaaaaaaaaaaaaaaaaaaaaaaaaaaaaaaaaaaaaaaaaaaaaaaaaaaaaaaaaaaaaaaaaaaaaaaaaaa

SEQ ID NO: 39721 - RNA, 1689 nt, Artificial Sequence
  mRNA product Design i-3 (hSL-A100) comprising derived and/or modified sequence from LASV(AV;Clade V)__CCA30314__GPCmut11 (opt4)
aggagaaagcuuaccaugggccagaucgugaccuucuuccaggaggugccccacgugaucgaggaggugaugaacaucgugcugaucgcccugagcauccuggccgugcugaagggccuguacaacaucgccaccugcggccugaucggccugaucaccuuccugcugcugugcggcagaagcugcagcagcaaccuguacaagggcguguacgagcugcagagccuggaccugaacauggagacccugaacaugaccaugccccugagcugcaccaagaacaacagccaccacuacaucagagugggcaacgacaccggccuggagcugacccugaccaacaccagcauccugaaccacaaguucugcaaccugagcgacgcccacaagaaggaccuguacgaccacgcccugaugagcaucaucagcaccuuccaccugagcauccccaacuucaaccaguacgaggccaugagcugcgacuucaacggcggcaagaucagcgugcaguacaaccugagccacagcuacgccaucgacgccgccaaccacugcggcaccguggccaacggcauccugcagaccuucaugagaauggccuggggcggcagcuacaucgcccuggacagcggcagaggcaacugggacugcaucaugaccagcuaccaguaccugaucauccagaacaccaccugggagaaccacugccaguucagcagacccagccccaucggcuaccugggccugcugagccagagaaccagagacaucuacaucagcagaagacugcugggcaccuucaccuggacccugagcgacagcgagggcaacgccacccccggcggcuacugccugaccagauggaugcugaucgaggccgagcugaagugcuucggcaacaccgccguggccaagugcaacgagaagcacgacgaggaguucugcgacaugcugagacuguucgacuucaacaagcaggccaucagcagacugaagagcgaggcccagaugagcauccagcugaucaacaaggccgugaacgcccugaucaacgaccagcugaucaugaagaaccaccugagagacaucaugggcauccccuacugcaacuacagcaaguacugcuaccugaaccacaccaucaccggcaagaccagccugcccaagugcugccuggugagcaacggcagcuaccugaacgagacccacuucagcgacgacaucgagcagcaggccgacaacaugaucaccgagaugcugcagaaggaguacauggagagacagggcaagaccccccugggccugguggaccuguucguguucagcaccagcuucuaccugaucagcaucuuccugagacuggugaagauccccacccacagacacaucgugggcaagcccugccccaagccccacagacugaaccacaugggcaucugcagcugcggccuguacaagcagcccggcgugcccgugagauggaagagaugaggacuaguuauaagacugacuagcccgaugggccucccaacgggcccuccuccccuccuugcaccgagauuaaucaaaggcucuuuucagagccaccaaaaaaaaaaaaaaaaaaaaaaaaaaaaaaaaaaaaaaaaaaaaaaaaaaaaaaaaaaaaaaaaaaaaaaaaaaaaaaaaaaaaaaaaaaaaaaaaaaaaa

SEQ ID NO: 39722 - RNA, 1686 nt, Artificial Sequence
  mRNA product Design i-3 (hSL-A100) comprising derived and/or modified sequence from LASV(Togo/2016/7082;Clade VI)__AMR44577__GPCmut11 (opt4)
aggagaaagcuuaccaugggccagaucaucaccuucuuccaggaggugccccacgugaucgaggaggugaugaacaucgugcugaucgcccugagccugcuggccauccugaagggcguguacaacguggccaccugcggcaucaucggccuggugaccuuccuguuccugugcggcagaagcugcagccugaucuacaagggcagcuacgagcugcagacccuggagcugaacauggagacccugaacaugaccaugccccugagcugcaccaagaacagcagccaccacuacaucagagugggcaacgagaccggccuggagcugacccugaccaacaccagcaucaucaaccacaaguucugcaaccugagcgacgcccacaagagaaaccuguacgaccacgcccugaugagcauccugagcaccuuccaccugagcauccccaacuucaaccaguacgaggccaugagcugcgacuucaacggcggcaagaucagcgugcaguacaaccugagccacgccuacgccguggacgccgccgagcacugcggcaccguggccaacggcgugcugcagaccuucaugagaauggccuggggcggcagcuacaucgcccuggacagcggcagaggcaacugggacugcaucaugaccagcuaccaguaccugaucauccagaacaccaccugggaggaccacugccaguucagcagacccagccccaucggcuaccugggccugcugagccagagaaccagagacaucuacaucagcagaagacugcugggcaccuucaccuggacccugagcgacagcgagggcaacgagacccccggcggcuacugccugaccagauggaugcugaucgaggccgagcugaagugcuucggcaacaccgccguggccaagugcaacgagaagcacgacgaggaguucugcgacaugcugagacuguucgacuucaacaagcaggccauccagagacugaagagcgaggcccagaugagcauccagcugaucaacaaggccgugaacgcccugaucaacgaccagcugaucaugaagaaccaccugagagacaugaugggcauccccuacugcaacuacagcaaguacugcuaccugaaccacaccagcagcggcagaaccagccugcccaagugcugccuggugagcaacggcagcuaccugaacgagacccacuucagcgacgacaucgagcagcaggccgacaacaugaucaccgagaugcugcagaaggaguacaucgacagacagggcaagaccccccugggccugguggaccuguucguguucagcaccagcuucuaccugaucagcaucuuccugcaccugaucaagauccccacccacagacacaucgugggcaagcccugccccaagccccacagacugaaccacaugggcaucugcagcugcggccuguacaagcagcccggcgugcccaccagauggaagagaugaggacuaguuauaagacugacuagcccgaugggccucccaacgggcccuccuccccuccuugcaccgagauuaaucaaaggcucuuuucagagccaccaaaaaaaaaaaaaaaaaaaaaaaaaaaaaaaaaaaaaaaaaaaaaaaaaaaaaaaaaaaaaaaaaaaaaaaaaaaaaaaaaaaaaaaaaaaaaaaaaaaaa

SEQ ID NO: 39723 - RNA, 1686 nt, Artificial Sequence
  mRNA product Design i-3 (hSL-A100) comprising derived and/or modified sequence from LASV(KAK-428;Clade n.d. (VII))__ANH09740__GPCmut11 (opt4)
aggagaaagcuuaccaugggccagaucgugaccuucuuccaggaggugccccacgugaucgaggaggugaugaacaucgugcugaucgcccugagccugcuggccauccugaagggccuguacaacuucgccaccugcggcgugaucggccugaucaccuuccugcugcugugcggcagaagcugcagcgccaccuacaagggccaguacgagcugcagacccuggagcugaacauggagagccugaacaugaccaugccccugagcugcaccaagaacaacagccaccacuacaucagagccggcaacaacaccggccuggagcugacccugaccaacaccagcaucaucagccacaaguucugcaaccugagcgacgcccacaagaagaaccuguacgaccacacccugaugagcaucaucaccaccuuccaccugagcauccccaacuucaaccaguacgaggccaugagcugcgacuucaacggcggcaagaucagcauccaguacaaccugagccacagcuacgccggcgacgccgcccagcacugcggcaccguggccaacggcgugcugcagaccuucaugagaauggccuggggcggcagcuaccuggcccuggacagcggcagaagaggcugggacugcaucaucagcagcuaccaguaccugaucauccagaacaccaccugggacgaccacugccaguucagcagacccagccccaucggcuaccugggcuucgugagccagaagaccagagacaucuacaucagcagaagacugcugggcaccuucaccuggacccugagcgacagcgagggccacgacaugcccggcggcuacugccugaccagauggaugcugaucgaggccgaccugaagugcuucggcaacaccgccguggccaagugcaacgagaagcacgacgaggaguucugcgacauguggagacuguucgacuucaacaagcaggccauccagagacugaaggccgaggcccagaugaacauccagcugaucaacaaggccgugaacgcccugaucaacgaccagcugaugaugaagaaccaccugagagacaucaugggcauccccuacugcaacuacagcaaguucugcuaccugaacaacaccaccaccggcagaaccagccugcccagaugcugccugaucagcaacggcagcuaccugaacgagacccacuucagcgacgacaucgagcagcaggccgacaacaugaucaccgagaugcugcagaaggaguacauggacagacagggcaagaccccccugggccugguggaccuguucguguucagcaccagcuucuaccugaucaccaucuuccugcaccuggugaagauccccacccacagacacaucgugggcaagcccugccccaagccccacagacugaaccacaugggcaucugcagcugcggccuguacaagcagcccggcgugcccgugagauggaagagaugaggacuaguuauaagacugacuagcccgaugggccucccaacgggcccuccuccccuccuugcaccgagauuaaucaaaggcucuuuucagagccaccaaaaaaaaaaaaaaaaaaaaaaaaaaaaaaaaaaaaaaaaaaaaaaaaaaaaaaaaaaaaaaaaaaaaaaaaaaaaaaaaaaaaaaaaaaaaaaaaaaaaa

SEQ ID NO: 39724 - RNA, 1686 nt, Artificial Sequence; identical to SEQ ID NO: 39718
  mRNA product Design i-3 (hSL-A100) comprising derived and/or modified sequence from LASV(Pinneo-NIG-1969;Clade I)__AIT17836__GPCmut11 (opt4)

SEQ ID NO: 39725 - RNA, 1686 nt, Artificial Sequence
  mRNA product Design i-3 (hSL-A100) comprising derived and/or modified sequence from LASV(ISTH0009-NIG-2011;Clade II)__AIT17404__GPCmut11 (opt4)
aggagaaagcuuaccaugggccagaucaucaccuucuuccaggaggugccccacgugaucgaggaggugaugaacaucgugcugaucgcccugagccugcuggccauccugaagggcaucuacaacguggccaccugcggccuguucggccuggugagcuuccugcugcugugcggcagaagcugcagcaccaccuacaagggcguguacgagcugcagacccuggagcuggacauggccagccugaacaugaccaugccccugagcugcaccaagaacaacagccaccacuacaucauggugggcaacgagaccggccuggagcugacccugaccaacaccagcaucaucaaccacaaguucugcaaccugagcgacgcccacaagaagaaccuguacgaccacgcccugaugagcaucaucagcaccuuccaccugagcauccccaacuucaaccaguacgaggccaugagcugcgacuucaacggcggcaagaucagcgugcaguacaaccugagccacgccuacgccguggacgccgccaaccacugcggcaccaucgccaacggcgugcugcagaccuucaugagaauggccuggggcggcagcuacaucgcccuggacagcggcaagggcagcugggacugcaucaugaccagcuaccaguaccugaucauccagaacaccaccugggaggaccacugccaguucagcagacccagccccaucggcuaccugggccugcugagccagagaaccagagacaucuacaucagcagaagacugcugggcaccuucaccuggacccugagcgacagcgagggcaacgagacccccggcggcuacugccugaccagauggaugcugaucgaggccgagcugaagugcuucggcaacaccgccguggccaagugcaacgagaagcacgacgaggaguucugcgacaugcugagacuguucgacuucaacaagcaggccaucagaagacugaagaccgaggcccagaugagcauccagcugaucaacaaggccgugaacgcccugaucaacgaccagcugaucaugaagaaccaccugagagacaucaugggcauccccuacugcaacuacagcaaguacugcuaccugaaccacaccgugaccggcaagaccagccugcccagaugcugccuggugagcaacggcagcuaccugaacgagacccacuucagcgacgacaucgagcagcaggccgacaacaugaucaccgagcugcugcagaaggaguacauggacagacagggcaagaccccccugggccugguggaccuguucguguucagcaccagcuucuaccugaucagcaucuuccugcaccugaucaagauccccacccacagacacaucaccggcaagcccugccccaagccccacagacugaaccacaugggcaucugcagcugcggccuguacaagcaccccggcgugcccgugaaguggaagagaugaggacuaguuauaagacugacuagcccgaugggccucccaacgggcccuccuccccuccuugcaccgagauuaaucaaaggcucuuuucagagccaccaaaaaaaaaaaaaaaaaaaaaaaaaaaaaaaaaaaaaaaaaaaaaaaaaaaaaaaaaaaaaaaaaaaaaaaaaaaaaaaaaaaaaaaaaaaaaaaaaaaaa

SEQ ID NO: 39726 - RNA, 1686 nt, Artificial Sequence
  mRNA product Design i-3 (hSL-A100) comprising derived and/or modified sequence from LASV(ISTH2010-NIG-2012;Clade II)__AIT17482__GPCmut11 (opt4)
aggagaaagcuuaccaugggccagaucaucaccuucuuccaggaggugccccacgugaucgaggaggugaugaacaucgugcugaucgcccugagccugcuggccauccugaagggcaucuacaacguggccaccugcggccuguucggccuggugagcuuccugcugcugugcggcagaagcugcagcaccaccuacaagggcguguacgagcugcagacccuggagcuggacauggccagccugaacaugaccaugccccugagcugcaccaagaacaacagccaccacuacaucauggugggcaacgagaccggccuggagcugacccugaccaacaccagcaucaucaaccacaaguucugcaaccugagcgacgcccacaagaagaaccuguacgaccacgcccugaugagcaucaucagcaccuuccaccugagcauccccaacuucaaccaguacgaggccaugagcugcgacuucaacggcggcaagaucagcgugcaguacaaccugagccacgccuacgccguggacgccgccaaccacugcggcaccaucgccaacggcgugcugcagaccuucaugagaauggccuggggcggcagcuacaucgcccuggacagcggcaagggcagcugggacugcaucaugaccagcuaccaguaccugaucauccagaacaucaccugggaggaccacugccaguucagcagacccagccccaucggcuaccugggccugcugagccagagaaccagagacaucuacaucagcagaagacugcugggcaccuucaccuggacccugagcgacagcgagggcaacgagacccccggcggcuacugccugaccagauggaugcugaucgaggccgagcugaagugcuucggcaacaccgccguggccaagugcaacgagaagcacgacgaggaguucugcgacaugcugagacuguucgacuucaacaagcaggccaucagaagacugaagaccgaggcccagaugagcauccagcugaucaacaaggccgugaacgcccugaucaacgaccagcugaucaugaagaaccaccugagagacaucaugggcauccccuacugcaacuacagcaaguacugcuaccugaaccacaccgugaccggcaagaccagccugcccagaugcugccuggugagcaacggcagcuaccugaacgagacccacuucagcgacgacaucgagcagcaggccgacaacaugaucaccgagcugcugcagaaggaguacaucgacagacagggcaagaccccccugggccugguggaccuguucguguucagcaccagcuucuaccugaucagcaucuuccugcaccuggugaagauccccacccacagacacguggugggcaagcccugccccaagccccacagacugaaccacaugggcaucugcagcugcggccuguacaagcaccccggcgugcccgugaaguggaagagaugaggacuaguuauaagacugacuagcccgaugggccucccaacgggcccuccuccccuccuugcaccgagauuaaucaaaggcucuuuucagagccaccaaaaaaaaaaaaaaaaaaaaaaaaaaaaaaaaaaaaaaaaaaaaaaaaaaaaaaaaaaaaaaaaaaaaaaaaaaaaaaaaaaaaaaaaaaaaaaaaaaaaa

SEQ ID NO: 39727 - RNA, 1686 nt, Artificial Sequence
  mRNA product Design i-3 (hSL-A100) comprising derived and/or modified sequence from LASV(Lassa virus/H.sapiens-wt/NGA/2015/ISTH_0543;Clade II)__AVO03639__GPCmut11 (opt4)
aggagaaagcuuaccaugggccagaucaucaccuucuuccaggaggugccccacgugaucgaggaggugaugaacaucgugcugaucgcccugagccugcuggccauccugaagggcaucuacaacguggccaccugcggccuguucggccuggugagcuuccugcugcugugcggcagaagcugcagcaccaccuacaagggcguguacgagcugcagacccuggagcuggacauggccaaccugaacaugaccaugccccugagcugcaccaagaacaacagccaccacuacaucauggugggcaacgagaccggccuggagcugacccugaccaacaccagcaucaucaaccacaaguucugcaaccugagcgacgcccacaagaagaaccuguacgaccacgcccugaugagcaucaucagcaccuuccaccugagcauccccaacuucaaccaguacgaggccaugagcugcgacuucaacggcggcaagaucagcgugcaguacaaccugagccacaccuacgccguggacgccgccaaccacugcggcaccaucgccaacggcgugcugcagaccuucaugagaauggccuggggcggcagcuacaucgcccuggacagcggcaagggcagcugggacugcaucaugaccagcuaccaguaccuggugauccagaacaccaccugggaggaccacugccaguucagcagacccagccccaucggcuaccugggccugcugagccagagaaccagagacaucuacaucagcagaagacugcugggcaccuucaccuggacccugagcgacagcgagggcaacgagacccccggcggcuacugccugaccagauggaugcugaucgaggccgagcugaagugcuucggcaacaccgccguggccaagugcaacgagaagcacgacgaggaguucugcgacaugcugagacuguucgacuucaacaagcaggccaucagaagacugaagaccgaggcccagaugagcauccagcugaucaacaaggccgugaacgcccugaucaacgaccagcugaucaugaagaaccaccugagagacaucaugggcauccccuacugcaacuacagcaaguacugcuaccugaaccacaccgugaccggcaagaccagccugcccagaugcugccuggugagcaacggcagcuaccugaacgagacccacuucagcgacgacaucgagcagcaggccgacaacaugaucaccgagcugcugcagaaggaguacaucgacagacagggcaagaccccccugggccugguggaccuguucguguucagcaccagcuucuaccugaucagcaucuuccugcaccuggugaagauccccacccacagacacaucaccggcaagcccugccccaagccccacagacugaaccacaugggcaucugcagcugcggccuguacaagcaccccggcgugcccgugaaguggaagagaugaggacuaguuauaagacugacuagcccgaugggccucccaacgggcccuccuccccuccuugcaccgagauuaaucaaaggcucuuuucagagccaccaaaaaaaaaaaaaaaaaaaaaaaaaaaaaaaaaaaaaaaaaaaaaaaaaaaaaaaaaaaaaaaaaaaaaaaaaaaaaaaaaaaaaaaaaaaaaaaaaaaaa

SEQ ID NO: 39728 - RNA, 1686 nt, Artificial Sequence
  mRNA product Design i-3 (hSL-A100) comprising derived and/or modified sequence from LASV(Lassa virus/H.sapiens-wt/NGA/2016/ISTH_0009;Clade II)__AVO03571__GPCmut11 (opt4)
aggagaaagcuuaccaugggccagaucaucaccuucuuccaggaggugccccacgugaucgaggaggugaugaacaucgugcugaucgcccugagccugcuggccauccugaagggcaucuacaacguggccaccugcggccugcugggccuggugagcuuccugcugcugugcggcagaagcugcagcaccaccuacaagggcguguacgagcugcagacccuggagcuggacauggccagccugaacaugaccaugccccugagcugcaccaagaacaacagccaccacuacaucauggugggcaacgagaccggccuggagcugacccugaccaacaccagcaucaucaaccacaaguucugcaaccugagcgacgcccacaagaagaaccuguacgaccacgcccugaugagcaucaucagcaccuuccaccugagcauccccaacuucaaccaguacgaggccaugagcugcgacuucaacggcggcagaaucagcgugcaguacaaccugagccacagcuacgccguggacgccgccaaccacugcggcaccaucgccaacggcgugcugcagaccuucaugagaauggccuggggcggcagcuacaucgcccuggacagcggcaagggcagcugggacugcaucaugaccagcuaccaguaccugaucauccagaacaccaccugggaggaccacugccaguucagcagacccagccccaucggcuaccugggccugcugagccagagaaccagagacaucuacaucagcagaagacugcugggcaccuucaccuggacccugagcgacagcgagggcaacgagacccccggcggcuacugccugaccagauggaugcugaucgaggccgagcugaagugcuucggcaacaccgccguggccaagugcaacgagaagcacgacgaggaguucugcgacaugcugagacuguucgacuucaacaagcaggccaucagaagacugaagaccgaggcccagaugagcauccagcugaucaacaaggccgugaacgcccugaucaacgaccagcugaucaugaagaaccaccugagagacaucaugggcauccccuacugcaacuacagcaaguacugcuaccugaaccacaccgugaccggcaagaccagccugcccagaugcugccuggugagcaacggcagcuaccugaacgagacccacuucagcgacgacaucgagcagcaggccgacaacaugaucaccgagcugcugcagaaggaguacaucgacagacagggcaagaccccccugggccugguggaccuguucguguucagcaccagcuucuaccugaucagcaucuuccugcaccuggugaagauccccacccacagacacaucaccggcaagcccugccccaagccccacagacugaaccacaugggcaucugcagcugcggccuguacaaccaccccggcgugcccgugaaguggaagagaugaggacuaguuauaagacugacuagcccgaugggccucccaacgggcccuccuccccuccuugcaccgagauuaaucaaaggcucuuuucagagccaccaaaaaaaaaaaaaaaaaaaaaaaaaaaaaaaaaaaaaaaaaaaaaaaaaaaaaaaaaaaaaaaaaaaaaaaaaaaaaaaaaaaaaaaaaaaaaaaaaaaaa

SEQ ID NO: 39729 - RNA, 1686 nt, Artificial Sequence
  mRNA product Design i-3 (hSL-A100) comprising derived and/or modified sequence from LASV(Lassa virus/H.sapiens-wt/NGA/2016/ISTH_0017;Clade II)__AVO03567__GPCmut11 (opt4)
aggagaaagcuuaccaugggccagaucaucaccuucuuccaggaggugccccacgugaucgaggaggugaugaacaucgugcugaucgcccugagccugcuggccauccugaagggcaucuacaacguggccaccugcggccuguucggccuggugagcuuccugcugcugugcggcagaagcugcagcaccaccuacaagggcguguacgagcugcagacccuggagcuggacauggccagccugaacaugaccaugccccugagcugcaccaagaacaacagccaccacuacaucauggugggcaacgagaccggccuggagcugacccugaccaacaccagcaucaucaaccacaaguucugcaaccugagcgacgcccacaagaagaaccuguacgaccacgcccugaugagcaucaucagcaccuuccaccugagcauccccaacuucaaccaguacgaggccaugagcugcgacuucaacggcggcaagaucagcgugcaguacaaccugagccacaccuacgccaucgacgccgccaaccacugcggcaccaucgccaacggcgugcugcagaccuucaugagaauggccuggggcggcagcuacaucgcccuggacagcggcaagggcagcugggacugcaucaugaccagcuaccaguaccugaucauccagaacaccaccugggaggaccacugccaguucagcagacccagccccaucggcuaccugggccugcugagccagagaaccagagacaucuacaucagcagaagacugcugggcaccuucaccuggacccugagcgacagcgagggcaacgagacccccggcggcuacugccugaccagauggaugcugaucgaggccgagcugaagugcuucggcaacaccgccguggccaagugcaacgagaagcacgacgaggaguucugcgacaugcugagacuguucgacuucaacaagcaggccaucagaagacugaagaccgaggcccagaugagcauccagcugaucaacaaggccgugaacgcccugaucaacgaccagcugaucaugaagaaccaccugagagacaucaugggcauccccuacugcaacuacagcaaguacugcuaccugaaccacaccgugaccggcaagaccagccugcccagaugcugccuggugagcaacggcagcuaccugaacgagacccacuucagcgacgacaucgagcagcaggccgacaacaugaucaccgagcugcugcagaaggaguacauggacagacagggcaagaccccccugggccugguggaccuguucguguucagcaccagcuucuaccugaucagcaucuuccugcaccuggugagaauccccacccacagacacgugaucggcaagcccugccccaagccccacagacugaaccacaugggcaucugcagcugcggccuguacaagcaccccggcgugcccgugaaguggaagagaugaggacuaguuauaagacugacuagcccgaugggccucccaacgggcccuccuccccuccuugcaccgagauuaaucaaaggcucuuuucagagccaccaaaaaaaaaaaaaaaaaaaaaaaaaaaaaaaaaaaaaaaaaaaaaaaaaaaaaaaaaaaaaaaaaaaaaaaaaaaaaaaaaaaaaaaaaaaaaaaaaaaaa

SEQ ID NO: 39730 - RNA, 1686 nt, Artificial Sequence
  mRNA product Design i-3 (hSL-A100) comprising derived and/or modified sequence from LASV(Lassa virus/H.sapiens-wt/NGA/2018/ISTH_0959;Clade II)__AVV65099__GPCmut11 (opt4)
aggagaaagcuuaccaugggccagaucaucaccuucuuccaggaggugccccacgugaucgaggaggugaugaacaucgugcugaucgcccugagccugcuggccauccugaagggcaucuacaacguggugaccugcggccuguucggccuggugagcuuccugcugcugugcggcagaagcugcagcaccaccuacaagggcguguacgagcugcagacccuggagcuggacauggccagccugaacaugaccaugccccugagcugcaccaagaacaacagccaccacuacaucauggugggcaacgagaccggccuggagcugacccugaccaacaccagcaucaucaaccacaaguucugcaaccugagcgacgcccacaagaagaaccuguacgaccacgcccugaugagcaucaucagcaccuuccaccugagcauccccaacuucaaccaguacgaggccaugagcugcgacuucaacggcggcaagaucagcgugcaguacaaccugagccacgccuacgccaucgacgccgccaaccacugcggcaccaucgccaacggcgugcugcagaccuucaugagaauggccuggggcggcagcuacaucgcccuggacagcggcaagggcagcugggacugcaucaugaccagcuaccaguaccugaucauccagaacaccaccugggaggaccacugccaguucagcagacccagccccaucggcuaccugggccugcugagccagagaaccagagacaucuacaucagcagaagacugcugggcaccuucaccuggacccugagcgacagcgagggcaacgagacccccggcggcuacugccugaccagauggaugcugaucgaggccgagcugaagugcuucggcaacaccgccguggccaagugcaacgagaagcacgacgaggaguucugcgacaugcugagacuguucgacuucaacaagcaggccaucagaagacugaagaccgaggcccagaugagcauccagcugaucaacaaggccgugaacgcccugaucaacgaccagcugaucaugaagaaccaccugagagacaucaugggcauccccuacugcaacuacagcaaguacugcuaccugaaccacaccgugaccggcaagaccagccugcccagaugcugccuggugagcaacggcagcuaccugaacgagacccacuucagcgacgacaucgagcagcaggccgacaacaugaucaccgagcugcugcagaaggaguacaucgacagacagggcaagaccccccugggccugguggaccuguucguguucagcaccagcuucuaccugaucagcaucuuccugcaccuggugaagauccccacccacagacacgugaucggcaagcccugccccaagccccacagacugaaccacaugggcaucugcagcugcggccuguacaagcaccccggcgugcccgugaaguggaagagaugaggacuaguuauaagacugacuagcccgaugggccucccaacgggcccuccuccccuccuugcaccgagauuaaucaaaggcucuuuucagagccaccaaaaaaaaaaaaaaaaaaaaaaaaaaaaaaaaaaaaaaaaaaaaaaaaaaaaaaaaaaaaaaaaaaaaaaaaaaaaaaaaaaaaaaaaaaaaaaaaaaaaa

SEQ ID NO: 39731 - RNA, 1686 nt, Artificial Sequence
  mRNA product Design i-3 (hSL-A100) comprising derived and/or modified sequence from LASV(LASV003-NIG-2008;Clade II)__AIT17580__GPCmut11 (opt4)
aggagaaagcuuaccaugggccagaucaucaccuucuuccaggaggugccccacgugaucgaggaggugaugaacaucgugcugaucgcccugagccugcuggccauccugaagggcaucuacaacguggccaccugcggccuguucggccuggugagcuuccugcugcugugcggcagaagcugcagcaccaccuacaagggcguguacgagcugcagacccuggagcuggacauggccagccugaacaugaccaugccccugagcugcaccaagaacaacagccaccacuacaucauggugggcaacgagaccggccuggagcugacccugaccaacaccagcaucaucaaccacaaguucugcaaccugagcgacgcccacaagaagaaccuguacgaccacgcccugaugagcaucaucagcaccuuccaccugagcauccccaacuucaaccaguacgaggccaugagcugcgacuucaacggcggcaagaucagcgugcaguacaaccugagccacaccuacgccguggacgccgccaaccacugcggcaccaucgccaacggcgugcugcagaccuucaugagaauggccuggggcggcagcuacaucgcccuggacagcggcaagggcagcugggacugcaucaugaccagcuaccaguaccugaucauccagaacaccaccugggaggaccacugccaguucagcagacccagccccaucggcuaccugggccugcugagccagagaaccagagacaucuacaucagcagaagacugcugggcaccuucaccuggacccugagcgacagcgagagcaacgagacccccggcggcuacugccugaccagauggaugcugaucgaggccgagcugaagugcuucggcaacaccgccguggccaagugcaacgagaagcacgacgaggaguucugcgacaugcugagacuguucgacuucaacaagcaggccaucagaagacugaaggccgaggcccagaugagcauccagcugaucaacaaggccgugaacgcccugaucaacgaccagcugaucaugaagaaccaccugagagacaucaugggcauccccuacugcaacuacagcaaguacugcuaccugaaccacaccgugaccggcagaaccagccugcccagaugcugccuggugagcaacggcagcuaccugaacgagacccacuucagcgacgacaucgagcagcaggccgacaacaugaucaccgagcugcugcagaaggaguacauggacagacagggcaagaccccccugggccugguggaccuguucguguucagcaccagcuucuaccugaucagcaucuuccugcaccuggugaagauccccacccacagacacgugaucggcaagcccugccccaagccccacagacugaaccacaugggcaucugcagcugcggccuguacaagcaccccggcgugcccgugaaguggaagagaugaggacuaguuauaagacugacuagcccgaugggccucccaacgggcccuccuccccuccuugcaccgagauuaaucaaaggcucuuuucagagccaccaaaaaaaaaaaaaaaaaaaaaaaaaaaaaaaaaaaaaaaaaaaaaaaaaaaaaaaaaaaaaaaaaaaaaaaaaaaaaaaaaaaaaaaaaaaaaaaaaaaaa

SEQ ID NO: 39732 - RNA, 1686 nt, Artificial Sequence
  mRNA product Design i-3 (hSL-A100) comprising derived and/or modified sequence from LASV(LASV035-NIG-2009;Clade II)__AIT17588__GPCmut11 (opt4)
aggagaaagcuuaccaugggccagaucaucaccuucuuccaggaggugccccacgugaucgaggaggugaugaacaucgugcugaucgcccugagccugcuggccauccugaagggcaucuacaacguggccaccugcggccuguucggccuggugagcuuccugcugcugugcggcagaagcugcagcaccaccuacaagggcguguacgagcugcagacccuggagcuggacauggccagccugaacaugaccaugccccugagcugcaccaagaacaacagccaccacuacaucauggugggcaacgagaccggccuggagcugacccugaccaacaccagcaucaucaaccacaaguucugcaaccugagcgacgcccacaagaagaaccuguacgaccacgcccugaugagcaucaucagcaccuuccaccugagcauccccaacuucaaccaguacgaggccaugagcugcgacuucaacggcggcaagaucagcgugcaguacaaccugagccacgccuacgccguggacgccgccaaccacugcggcaccaucgccaacggcgugcugcagaccuucaugagaauggccuggggcggcagcuacaucgcccuggacagcggcaagggcagcugggacugcaucaugaccagcuaccaguaccugaucauccagaacaccaccugggaggaccacugccaguucagcagacccagccccaucggcuaccugggccugcugagccagagaaccagagacaucuacaucagcagaagacugcugggcaccuucaccuggacccugagcgacagcgagggcaacgagacccccggcggcuacugccugaccagauggaugcugaucgaggccgagcugaagugcuucggcaacaccgccguggccaagugcaacgagaagcacgacgaggaguucugcgacaugcugagacuguucgacuucaacaagcaggccaucagaagacugaaggccgaggcccagaugagcauccagcugaucaacaaggccgugaacgcccugaucaacgaccagcugaucaugaagaaccaccugagagacaucaugggcauccccuacugcaacuacagcaaguacugcuaccugaaccacaccgugaccggcaagaccagccugcccagaugcugccuggugagcaacggcagcuaccugaacgagacccacuucagcgacgacaucgagcagcaggccgacaacaugaucaccgagcugcugcagaaggaguacaucgacagacagggcaagaccccccugggccugguggaccuguucguguucagcaccagcuucuaccugaucagcaucuuccugcaccuggugaagauccccacccacagacacgugaucggcaagcccugccccaagccccacagacugaaccacaugggcaucugcagcugcggccuguacaagcaccccggcgugcccgugaaguggaagagaugaggacuaguuauaagacugacuagcccgaugggccucccaacgggcccuccuccccuccuugcaccgagauuaaucaaaggcucuuuucagagccaccaaaaaaaaaaaaaaaaaaaaaaaaaaaaaaaaaaaaaaaaaaaaaaaaaaaaaaaaaaaaaaaaaaaaaaaaaaaaaaaaaaaaaaaaaaaaaaaaaaaaa

SEQ ID NO: 39733 - RNA, 1686 nt, Artificial Sequence
  mRNA product Design i-3 (hSL-A100) comprising derived and/or modified sequence from LASV(LASV1000-NIG-2009;Clade II)__AIT17782__GPCmut11 (opt4)
aggagaaagcuuaccaugggccagaucaucaccuucuuccaggaggugccccacgugaucgaggaggugaugaacaucgugcugaucgcccugagccugcuggccauccugaagggcaucuacaacguggccaccugcggccuguucggccuggugagcuuccugcugcugugcggcagaagcugcagcaccaccuacaagggcguguacgagcugcagacccuggagcuggacauggccagccugaacaugaccaugccccugagcugcaccaagaacaacagccaccacuacaucauggugggcaacgagaccggccuggagcugacccugaccaacaccagcaucaucaaccacaaguucugcaaccugagcgacgcccacaagaagaaccuguacgaccacgcccugaugagcaucaucagcaccuuccaccugagcauccccaacuucaaccaguacgaggccaugagcugcgacuucaacggcggcaagaucagcgugcaguacaaccugagccacaccuacgccguggacgccgccaaccacugcggcaccaucgccaacggcgugcugcagaccuucaugagaauggccuggggcggcagcuacaucgcccuggacagcggcaagggcagcugggacugcaucaugaccagcuaccaguaccugaucauccagaacaccaccugggaggaccacugccaguucagcagacccagccccaucggcuaccugggccugcugagccagagaaccagagacaucuacaucagcagaagacugcugggcaccuucaccuggacccugagcgacagcgagggcaacgagacccccggcggcuacugccugaccagauggaugcugaucgaggccgagcugaagugcuucggcaacaccgccguggccaagugcaacgagaagcacgacgaggaguucugcgacaugcugagacuguucgacuucaacaagcaggccaucaagagacugaagaccgaggcccagaugagcauccagcugaucaacaaggccgugaacgcccugaucaacgaccagcugaucaugaagaaccaccugagagacaucaugggcauccccuacugcaacuacagcaaguacugcuaccugaaccacaccgugaccggcaagaccagccugcccagaugcugccuggugagcaacggcagcuaccugaacgagacccacuucagcgacgacaucgagcagcaggccgacaacaugaucaccgagcugcugcagaaggaguacaucgacagacagggcaagaccccccugggccugguggaccuguucguguucagcaccagcuucuaccugaucagcaucuuccugcaccuggugaagauccccacccacagacacguggugggcaagcccugccccaagccccacagacugaaccacaugggcaucugcagcugcggccuguacaagcaccccggcgugcccgugaaguggaagagaugaggacuaguuauaagacugacuagcccgaugggccucccaacgggcccuccuccccuccuugcaccgagauuaaucaaaggcucuuuucagagccaccaaaaaaaaaaaaaaaaaaaaaaaaaaaaaaaaaaaaaaaaaaaaaaaaaaaaaaaaaaaaaaaaaaaaaaaaaaaaaaaaaaaaaaaaaaaaaaaaaaaaa

SEQ ID NO: 39734 - RNA, 1686 nt, Artificial Sequence
  mRNA product Design i-3 (hSL-A100) comprising derived and/or modified sequence from LASV(LASV221-NIG-2010;Clade II)__AIT17624__GPCmut11 (opt4)
aggagaaagcuuaccaugggccagaucaucaccuucuuccaggaggugccccacgugaucgaggaggugaugaacaucgugcugaucgcccugagccugcuggccauccugaagggcaucuacaacguggccaccugcggccuguucggccuggugagcuuccugcugcugugcggcagaagcugcagcaccaccuacaagggcguguacgagcugcagacccuggagcuggacauggccagccugaacaugaccaugccccugagcugcaccaagaacaacagccaccacuacaucauggugggcaacgagaccggccuggagcugacccugaccaacaccagcaucaucaaccacaaguucugcaaccugagcgacgcccacaagaagaaccuguacgaccacgcccugaugagcaucaucagcaccuuccaccugagcauccccaacuucaaccaguacgaggccaugagcugcgacuucaacggcggcaagaucagcgugcaguacaaccugagccacaccuacgccaucgacgccgccaaccacugcggcaccaucgccaacggcgugcugcagaccuucaugagaauggccuggggcggcagcuacaucgcccuggacagcggcaagggcagcugggacugcaucaugaccagcuaccaguaccugaucauccagaacaccaccugggaggaccacugccaguucagcagacccagccccaucggcuaccugggccugcugagccagagaaccagagacaucuacaucagcagaagacugcugggcaccuucaccuggacccugagcgacagcgagggcaacgagacccccggcggcuacugccugaccagauggaugcugaucgaggccgagcugaagugcuucggcaacaccgccguggccaagugcaacgagaagcacgacgaggaguucugcgacaugcugagacuguucgacuucaacaagcaggccaucagaagacugaagaccgaggcccagaugagcauccagcugaucaacaaggccgugaacgcccugaucaacgaccagcugaucaugaagaaccaccugagagacaucaugggcauccccuacugcaacuacagcaaguacugcuaccugaaccacaccgugaccggcaagaccagccugcccagaugcugccuggugagcaacggcagcuaccugaacgagacccacuucagcgacgacaucgagcagcaggccgacaacaugaucaccgagaugcugcagaaggaguacauggacagacagggcaagaccccccugggccugguggaccuguucguguucagcaccagcuucuaccugaucagcaucuuccugcaccuggugaagauccccacccacagacacgugaucggcaagcccugccccaagccccacagacugaaccacaugggcaucugcagcugcggccuguacaagcaccccggcgugcccgugaaguggaagagaugaggacuaguuauaagacugacuagcccgaugggccucccaacgggcccuccuccccuccuugcaccgagauuaaucaaaggcucuuuucagagccaccaaaaaaaaaaaaaaaaaaaaaaaaaaaaaaaaaaaaaaaaaaaaaaaaaaaaaaaaaaaaaaaaaaaaaaaaaaaaaaaaaaaaaaaaaaaaaaaaaaaaa

SEQ ID NO: 39735 - RNA, 1686 nt, Artificial Sequence
  mRNA product Design i-3 (hSL-A100) comprising derived and/or modified sequence from LASV(LASV237-NIG-2010;Clade II)__AIT17638__GPCmut11 (opt4)
aggagaaagcuuaccaugggccagaucaucaccuucuuccaggaggugccccacgugaucgaggaggugaugaacaucgugcugaucgcccugagccugcuggccauccugaagggcaucuacaacguggccaccugcggccuguucggccuggugagcuuccugcugcugugcggcagaagcugcagcaccaccuacaagggcguguacgagcugcagacccuggagcuggacauggccagccugaacaugaccaugccccugagcugcaccaagaacaacagccaccacuacaucauggugggcaacgagaccggccuggagcugacccugaccaacaccagcaucaucaaccacaaguucugcaaccugagcgacgcccacaagaaggaccuguacgaccacgcccugaugagcaucaucagcaccuuccaccugagcauccccaacuucaaccaguacgaggccaugagcugcgacuucaacggcggcaagaucagcgugcaguacaaccugagccacaccuacgccguggacgccgccaaccacugcggcaccaucgccaacggcgugcugcagaccuucaugagaauggccuggggcggcagcuacaucgcccuggacagcggcaagggcagcugggacugcaucaugaccagcuaccaguaccugaucauccagaacaccaccugggaggaccacugccaguucagcagacccagccccaucggcuaccugggccugcugagccagagaaccagagacaucuacaucagcagaagacugcugggcaccuucaccuggacccugagcgacagcgagggcaacgagacccccggcggcuacugccugaccagauggaugcugaucgaggccgagcugaagugcuucggcaacaccgccguggccaagugcaacgagaagcacgacgaggaguucugcgacaugcugagacuguucgacuucaacaagcaggccaucagaagacugaagaccgaggcccagaugagcauccagcugaucaacaaggccgugaacgcccugaucaacgaccagcugaucaugaagaaccaccugagagacaucaugggcauccccuacugcaacuacagcaaguacugcuaccugaaccacaccgugaccggcaagaccagccugcccagaugcugccuggugagcaacggcagcuaccugaacgagacccacuucagcgacgacaucgagcagcaggccgacaacaugaucaccgagcugcugcagaaggaguacauggacagacagggcaagaccccccugggccugguggaccuguucguguucagcaccagcuucuaccugaucagcaucuuccugcaccugaucaagauccccacccacagacacaucaccggcaagcccugccccaagccccacagacugaaccacaugggcaucugcagcugcggccuguacaagcaccccggcgugcccgugaaguggaagagaugaggacuaguuauaagacugacuagcccgaugggccucccaacgggcccuccuccccuccuugcaccgagauuaaucaaaggcucuuuucagagccaccaaaaaaaaaaaaaaaaaaaaaaaaaaaaaaaaaaaaaaaaaaaaaaaaaaaaaaaaaaaaaaaaaaaaaaaaaaaaaaaaaaaaaaaaaaaaaaaaaaaaa

SEQ ID NO: 39736 - RNA, 1686 nt, Artificial Sequence
  mRNA product Design i-3 (hSL-A100) comprising derived and/or modified sequence from LASV(LASV253-NIG-2011;Clade II)__AIT17670__GPCmut11 (opt4)
aggagaaagcuuaccaugggccagaucaucaccuucuuccaggaggugccccacgugaucgaggaggugaugaacaucgugcugaucgcccugagccugcuggccauccugaagggcaucuacaacguggccaccugcggccuguucggccuggugagcuuccugcugcugugcggcagaagcugcagcaccaccuacaagggcguguacgagcugcagacccuggagcuggacauggccagccugaacaugaccaugccccugagcugcaccaagaacaacagccaccacuacaucauggugggcaacgagaccggccuggagcugacccugaccaacaccagcaucaucaaccacaaguucugcaaccugagcgacgcccacaagaagaaccuguacgaccacgcccugaugagcaucaucagcaccuuccaccugagcauccccaacuucaaccaguacgaggccaugagcugcgacuucaacggcggcaagaucagcgugcaguacaaccugagccacaccuacgccguggacgccgccaaccacugcggcaccaucgccaacggcgugcugcagaccuucaugagaauggccuggggcggcagcuacaucgcccuggacagcggcaagggcagcugggacugcaucaugaccagcuaccaguaccugaucauccagaacaccaccugggaggaccacugccaguucagcagacccagccccaucggcuaccugggccugcugagccagagaaccagagacaucuacaucagcagaagacugcugggcaccuucaccuggacccugagcgacagcgagggcaacgagacccccggcggcuacugccugaccagauggaugcugaucgaggccgagcugaagugcuucggcaacaccgccguggccaagugcaacgagaagcacgacgaggaguucugcgacaugcugagacuguucgacuucaacaagcaggccaucagaagacugaaggccgaggcccagaugagcauccagcugaucaacaaggccgugaacgcccugaucaacgaccagcugaucaugaagaaccaccugagagacaucaugggcauccccuacugcaacuacagcaaguacugcuaccugaaccacaccgugaccggcagaaccagccugcccagaugcugccuggugagcaacggcagcuaccugaacgagacccacuucagcgacgacaucgagcagcaggccgacaacaugaucaccgagcugcugcagaaggaguacaucgacagacagggcaagaccccccugggccugguggaccuguucguguucagcaccagcuucuaccugaucagcaucuuccugcaccuggugaagauccccacccacagacacaucaucggcaagcccugccccaagccccacagacugaaccacaugggcaucugcagcugcggccuguacaagcaccccggcgugcccgugaaguggaagagaugaggacuaguuauaagacugacuagcccgaugggccucccaacgggcccuccuccccuccuugcaccgagauuaaucaaaggcucuuuucagagccaccaaaaaaaaaaaaaaaaaaaaaaaaaaaaaaaaaaaaaaaaaaaaaaaaaaaaaaaaaaaaaaaaaaaaaaaaaaaaaaaaaaaaaaaaaaaaaaaaaaaaa

SEQ ID NO: 39737 - RNA, 1686 nt, Artificial Sequence
  mRNA product Design i-3 (hSL-A100) comprising derived and/or modified sequence from LASV(LASV254-NIG-2011;Clade II)__AIT17674__GPCmut11 (opt4)
aggagaaagcuuaccaugggccagaucaucaccuucuuccaggaggugccccacgugaucgaggaggugaugaacaucgugcugaucgcccugagccugcuggccauccugaagggcaucuacaacguggccaccugcggccuguucggccuggugagcuuccugcugcugugcggcagaagcugcagcaccaccuacaagggcguguacgagcugcagacccuggagcuggacaugaccaaccugaacaugaccaugccccugagcugcaccaagaacaacagccaccacuacaucauggugggcaacgagaccggccuggagcugacccugaccaacaccagcaucaucaaccacaaguucugcaaccugagcgacgcccacaagaagaaccuguacaaccacgcccugaugagcaucaucagcaccuuccaccugagcauccccaacuucaaccaguacgaggccaugagcugcgacuucaacggcggcaagaucagcgugcaguacaaccugagccacagcuacgccguggacgccgccaaccacugcggcaccaucgccaacggcgugcugcagaccuucaugagaauggccuggggcggcagcuacaucgcccuggacagcggcaagggcaacugggacugcaucaugaccagcuaccaguaccugaucauccagaacaccaccugggaggaccacugccaguucagcagacccagccccaucggcuaccugggccugcugagccagagaaccagagacaucuacaucagcagaagacugcugggcaccuucaccuggacccugagcgacagcgagggcaacgagacccccggcggcuacugccugaccagauggaugcugaucgaggccgagcugaagugcuucggcaacaccgccguggccaagugcaacgagaagcacgacgaggaguucugcgacaugcugagacuguucgacuucaacaagcaggccaucagaagacugaagaccgaggcccaggccaacauccagcugaucaacaaggccgugaacgcccugaucaacgaccagcugaucaugaagaaccaccugagagacaucaugggcauccccuacugcaacuacagcaaguacugcuaccugaaccacaccgugaccggcaagaccagccugcccagaugcugccuggugagcaacggcagcuaccugaacgagacccacuucagcgacgacaucgagcagcaggccgacaacaugaucaccgagcugcugcagaaggaguacauggacagacagggcaagaccccccugggccugguggaccuguucguguucagcaccagcuucuaccugaucagcaucuuccugcaccuggugaagauccccacccacagacacgugaucggcaagcccugccccaagccccacagacugaaccacaugggcaucugcagcugcggccuguacaagcaccccggcgugcccgugaaguggaagagaugaggacuaguuauaagacugacuagcccgaugggccucccaacgggcccuccuccccuccuugcaccgagauuaaucaaaggcucuuuucagagccaccaaaaaaaaaaaaaaaaaaaaaaaaaaaaaaaaaaaaaaaaaaaaaaaaaaaaaaaaaaaaaaaaaaaaaaaaaaaaaaaaaaaaaaaaaaaaaaaaaaaaa

SEQ ID NO: 39738 - RNA, 1686 nt, Artificial Sequence
  mRNA product Design i-3 (hSL-A100) comprising derived and/or modified sequence from LASV(Nig08-A19;Clade III)__ADU56618__GPCmut11 (opt4)
aggagaaagcuuaccaugggccagaucgugaccuucuuccaggaggugccccacgugaucgaggaggugaugaacaucgugcugaucgcccugagcauccuggccauccugaagggccuguacaacaucgccaccugcggccugaucggccuggugaccuuccugcugcugagcggcagaagcugcagcaugaccuacaagggcguguacgagcugcagacccuggagcugaacaugaacacccugaacaugaccaugccccugagcugcaccaagaacaacagccaccacuacaucauggugggcaacgagaccggccuggagcugacccugaccaacaccagccugcugcaccacaaguucugcaaccugagcgacgcccacaagaagaaccuguacgaccacacccugaugagcaucaucagcaccuuccaccugagcauccccaacuucaaccaguacgaggccaugagcugcgacuucaacggcggcaagaucaccgugcaguacaaccugagccacagcuacgccaucgacgccgccaaccacugcggcaccguggccaacggcgugcugcagaccuucaugagaauggccuggggcggcagcuacaucgcccuggacagcggcagaggcaagugggacugcaucaugaccagcuaccaguaccugaucauccagaacaccaccugggaggaccacugccaguucagcagacccagccccaucggcuaccugggccugcugagccagagaaccagagacaucuacaucagcagaagacugcugggcaccuucaccuggacccugagcgacagcgagggcaacgagacccccggcggcuacugccugaccagauggaugcugaucgaggccgagcugaagugcuucggcaacaccgccguggccaagugcaacgagaagcacgacgaggaguucugcgacaugcugagacuguucgacuucaacaagcaggccaucagaagacugaaggccgaggcccagaugagcauccagcugaucaacaaggccgugaacgcccugaucaacgaccagcugaucaugaagaaccaccugagagacaucaugggcauccccuacugcaacuacagcaaguacugcuaccugaaccacaccagcaccggcagaaccagccugcccagaugcugccuggugagcaacggcagcuaccugaacgagacccacuucagcgacgacaucgagcagcaggccgacaacaugaucaccgagaugcugcagaaggaguaccuggacagacagggcaagaccccccugggccugguggaccuguucguguucagcaccagcuucuaccugaucagcaucuuccugcaccuggugaagauccccacccacagacacaucgugggcaagcccugccccaagccccacagacugaaccacaugggcaucugcagcugcggccuguacaagcagcccggcgugcccgugagauggaagagaugaggacuaguuauaagacugacuagcccgaugggccucccaacgggcccuccuccccuccuugcaccgagauuaaucaaaggcucuuuucagagccaccaaaaaaaaaaaaaaaaaaaaaaaaaaaaaaaaaaaaaaaaaaaaaaaaaaaaaaaaaaaaaaaaaaaaaaaaaaaaaaaaaaaaaaaaaaaaaaaaaaaaa

SEQ ID NO: 39739 - RNA, 1689 nt, Artificial Sequence
  mRNA product Design i-3 (hSL-A100) comprising derived and/or modified sequence from LASV(G1180-SLE-2010;Clade IV)__AIT17168__GPCmut11 (opt4)
aggagaaagcuuaccaugggccagaucgugaccuucuuccaggaggugccccacgugaucgaggaggugaugaacaucgugcugaucgcccugagcauccuggccgugcugaagggccuguacaacuucgccaccugcggccuggugggccugcugaccuuccugcugcugugcggcagaagcugcaccgccagcagauacaagggcguguacgagcugcagacccuggagcugaacauggagacccugaacaugaccaugccccugagcugcaccaagaacaacagccaccacuacaucauggugggcaacgagaccggccuggagcugacccugaccaacaccagcaucaucaaccacaaguucugcaaccugagcgacgcccacaagaagaaccuguacgaccacgcccugaugagcaucaucagcaccuuccaccugagcauccccaacuucaaccaguacgaggccaugagcugcgacuucaacggcggcaagaucagcgugcaguacaaccugagccacagcuacgccggcgacgccgccaaccacugcggcaccguggccaacggcgugcugcagaccuucaugagaauggccuggggcggcagcuacaucgcccuggacagcggccacggcagcugggacugcaucaugaccagcuaccaguaccugaucauccagaacaccaccugggaggaccacugccaguucagcagacccagccccaucggcuaccugggccugcugagccagagaaccagagacaucuacaucagcagaagacugcugggcaccuucaccuggacccugagcgacagcgagggcaaggacacccccggcggcuacugccugaccagauggaugcugaucgaggccgagcugaagugcuucggcaacaccgccguggccaagugcaacgagaagcacgacgaggaguucugcgacaugcugagacuguucgacuucaacaagcaggccauccagagacugaaggccgaggcccagaugagcauccagcugaucaacaaggccgugaacgcccugaucaacgaccagcugaucaugaagaaccaccugagagacaucaugggcauccccuacugcaacuacagcaaguacugcuaccugaaccacaccaccaccggcaagaccagccugcccaagugcugccuggugagcaacggcagcuaccugaacgagacccacuucagcgacgacaucgagcagcaggccgacaacaugaucaccgagaugcugcagaaggaguacauggagagacagggcaagaccccccugggccugguggaccuguucguguucagcaccagcuucuaccugaucagcaucuuccugcaccuggugaagauccccacccacagacacaucgugggcaagagcugccccaagccccacagacugaaccacaugggcaucugcagcugcggccuguacaagcagcccggcgugcccgugaaguggaagagaugaggacuaguuauaagacugacuagcccgaugggccucccaacgggcccuccuccccuccuugcaccgagauuaaucaaaggcucuuuucagagccaccaaaaaaaaaaaaaaaaaaaaaaaaaaaaaaaaaaaaaaaaaaaaaaaaaaaaaaaaaaaaaaaaaaaaaaaaaaaaaaaaaaaaaaaaaaaaaaaaaaaaa

SEQ ID NO: 39740 - RNA, 1689 nt, Artificial Sequence
  mRNA product Design i-3 (hSL-A100) comprising derived and/or modified sequence from LASV(G1442-SLE-2011;Clade IV)__AIT17180__GPCmut11 (opt4)
aggagaaagcuuaccaugggccagaucgugaccuucuuccaggaggugccccacgugaucgaggaggugaugaacaucgugcugaucgcccugagcauccuggccgugcugaagggccuguacaacguggccaccugcggccugaucggccuggugaccuuccugcugcugugcggcagaagcugcaccaccacccuguacaagggcguguacgagcugcagacccuggagcugaacauggagacccugaacaugaccaugccccugagcugcaccaagaacaacagccaccacuacaucagagugggcaacgagaccggccuggagcugacccugaccaacaccagcaucaucaaccacaaguucugcaaccugagcgacgcccacaagaagaaccuguacgaccacgcccugaugagcaucaucagcaccuuccaccugagcauccccaacuucaaccaguacgaggccaugagcugcgacuucaacggcggcaagaucagcgugcaguacaaccugagccacagcuacgccggcgacgccgccaaccacugcggcaccguggccaacggcgugcugcagaccuucaugagaauggccuggggcggcagcuacaucgcccuggacagcggcagaggcaacugggacugcaucaugaccagcuaccaguaccugaucauccagaacaccaccugggacgaccacugccaguucagcagacccagccccaucggcuaccugggccugcugagccagagaaccagagacguguacaucagcagaagacugcugggcaccuucaccuggacccugagcgacagcgagggcaaggacacccccggcggcuacugccugaccagauggaugcugaucgaggccgagcugaagugcuucggcaacaccgccguggccaagugcaacgagaagcacgacgaggaguucugcgacaugcugagacuguucgacuucaacaagcaggccauccagagacugaaggccgaggcccagaugagcauccagcugaucaacaaggccgugaacgcccugaucaacgaccagcugaucaugaagaaccaccugagagacaucaugggcauccccuacugcaacuacagcaaguacugcuaccugaacaacaccgccaccggcaagaccagccugcccaagugcugccugaucagcaacggcagcuaccugaacgagacccacuucagcgacgacaucgagcaggaggccgacaacaugaucaccgagaugcugcagaaggaguacauggagagacagggcaagaccccccugggccugguggaccuguucguguucagcaccagcuucuaccugaucagcaucuuccugcaccuggugaagauccccacccacagacacaucgugggcaagagcugccccaagccccacagacugaaccacaugggcaucugcagcugcggccuguacaagcagcccggcgugcccgugagauggaagagaugaggacuaguuauaagacugacuagcccgaugggccucccaacgggcccuccuccccuccuugcaccgagauuaaucaaaggcucuuuucagagccaccaaaaaaaaaaaaaaaaaaaaaaaaaaaaaaaaaaaaaaaaaaaaaaaaaaaaaaaaaaaaaaaaaaaaaaaaaaaaaaaaaaaaaaaaaaaaaaaaaaaaa

SEQ ID NO: 39741 - RNA, 1689 nt, Artificial Sequence
  mRNA product Design i-3 (hSL-A100) comprising derived and/or modified sequence from LASV(G3010-SLE-2013;Clade IV)__AIT17344__GPCmut11 (opt4)
aggagaaagcuuaccaugggccagaucgugaccuucuuccaggaggugccccacgugaucgaggaggugaugaacaucgugcugaucgcccugagcauccuggccgugcugaagggccuguacaacuucgccaccugcggccuggugggccuggugaccuuccugcugcugugcggcagaagcugcaccaccagccuguacaagggcguguacgagcugcagacccuggagcugaacauggagacccugaacaugaccaugccccugagcugcaccaagaacaacagccaccacuacaucauggugggcaacgagaccggccuggagcugacccugaccaacaccagcaucaucaaccacaaguucugcaaccugagcgacgcccacaagaagaaccuguacaaccacgcccugaugagcaucaucagcaccuuccaccugagcauccccaacuucaaccaguacgaggccaugagcugcgacuucaacggcggcaagaucagcgugcaguacaaccugagccacagcuacgccggcgacgccgccagccacugcggcaccguggccaacggcgugcugcagaccuucaugagaauggccuggggcggcagcuacaucgcccuggacagcggcuacggcaagugggacugcaucaugaccagcuaccaguaccugaucauccagaacaccaccugggaggaccacugccaguucagcagacccagccccaucggcuaccugggccugcugagccagagaaccagagacaucuacaucagcagaagacugcugggcaccuucaccuggacccugagcgacagcgagggcaaggacacccccggcggcuacugccugaccagauggaugcugaucgaggccgagcugaagugcuucggcaacaccgccguggccaagugcaacgagaagcacgacgaggaguucugcgacaugcugagacuguucgacuucaacaagcaggccauccagagacugaagaccgaggcccagaugagcauccagcugaucaacaaggccgugaacgcccugaucaacgaccagcugaucaugaagaaccaccugagagacaucaugggcauccccuacugcaacuacagcaaguacugcuaccugaaccacaccaccaccggcaagaccagccugcccaagugcugccuggugagcaacggcagcuaccugaacgagacccacuucagcgacgacaucgagcagcaggccgacaacaugaucaccgagaugcugcagaaggaguacauggagagacagggcaagaccccccugggccugguggaccuguucguguucagcaccagcuucuaccugaucagcaucuuccugcaccuggugaagauccccacccacagacacaucgugggcaagagcugccccaagccccacagacugaaccacaugggcaucugcagcugcggccuguacaagcagcccggcgugcccgugagauggaagagaugaggacuaguuauaagacugacuagcccgaugggccucccaacgggcccuccuccccuccuugcaccgagauuaaucaaaggcucuuuucagagccaccaaaaaaaaaaaaaaaaaaaaaaaaaaaaaaaaaaaaaaaaaaaaaaaaaaaaaaaaaaaaaaaaaaaaaaaaaaaaaaaaaaaaaaaaaaaaaaaaaaaaa

SEQ ID NO: 39742 - RNA, 1689 nt, Artificial Sequence
  mRNA product Design i-3 (hSL-A100) comprising derived and/or modified sequence from LASV(G502-SLE-2009;Clade IV)__AIT17126__GPCmut11 (opt4)
aggagaaagcuuaccaugggccagaucgugaccuucuuccaggaggugccccacgugaucgaggaggugaugaacaucgugcugaucgcccugagcauccuggccgugcugaagggccuguacaacuucgccaccugcggccuggugggccugcugaccuuccugcugcugugcggcagaagcugcaccaccggccuguacaagggcguguacgagcugcagacccuggagcugaacauggagacccugaacaugaccaugccccugagcugcaccaagaacaacagccaccacuacaucauggugggcaacgagaccggccuggagcugacccugaccaacaccagcaucaucaaccacaaguucugcaaccugagcgacgcccacaagaagaaccuguacgaccacgcccugaugagcaucaucagcaccuuccaccugagcauccccaacuucaaccaguacgaggccaugagcugcgacuucaacggcggcaagaucagcgugcaguacaaccugagccacagcuacgccggcgacgccgccgaccacugcggcaccguggccaacggcgugcugcagaccuucaugagaauggccuggggcggcagcuacaucgcccuggacagcggcagaggcagaugggacugcaucaugaccagcuaccaguaccugaucauccagaacaccaccugggaggaccacugccaguucagcagacccagccccaucggcuaccugggccugcugagccagagaaccagagacaucuacaucagcagaagacugcugggcaccuucaccuggacccugagcgacagcgagggcaaggacacccccggcggcuacugccugaccagauggaugcugaucgaggccgagcugaagugcuucggcaacaccgccguggccaagugcaacgagaagcacgacgaggaguucugcgacaugcugagacuguucgacuucaacaagcaggccauccagagacugaaggccgaggcccagaugagcauccagcugaucaacaaggccgugaacgcccugaucaacgaccagcuggugaugaagaaccaccugagagacaucaugggcauccccuacugcaacuacagcagauacugcuaccugaaccacaccaccaccggcagaaccagccugcccaagugcugccuggugagcaacggcagcuaccugaacgagacccacuucagcgacgacaucgagcagcaggccgacaacaugaucaccgagaugcugcagaaggaguacauggagagacagggcaagaccccccugggccugguggaccuguucguguucagcaccagcuucuaccugaucagcaucuuccugcaccuggugaagauccccacccacagacacaucgugggcaagagcugccccaagccccacagacugaaccacaugggcaucugcagcugcggccuguacaagcagcccggcgugcccgugaaguggaagagaugaggacuaguuauaagacugacuagcccgaugggccucccaacgggcccuccuccccuccuugcaccgagauuaaucaaaggcucuuuucagagccaccaaaaaaaaaaaaaaaaaaaaaaaaaaaaaaaaaaaaaaaaaaaaaaaaaaaaaaaaaaaaaaaaaaaaaaaaaaaaaaaaaaaaaaaaaaaaaaaaaaaaa

SEQ ID NO: 39743 - RNA, 1689 nt, Artificial Sequence
  mRNA product Design i-3 (hSL-A100) comprising derived and/or modified sequence from LASV(G733-SLE-2010;Clade IV)__AIT17154__GPCmut11 (opt4)
aggagaaagcuuaccaugggccagaucgugaccuucuuccaggaggugccccacgugaucgaggaggugaugaacaucgugcugaucgcccugagcauccuggccgugcugaagggccuguacaacuucgccaccugcggcaucgugggccuggugagcuuccugcugcugugcggcagaagcugcaccaccagccuguacaagggcguguacgagcugcagacccuggagcugaacauggagacccugaacaugaccaugccccugagcugcaccaagaacaacagccaccacuacaucauggugggcaacgagaccggccuggagcugacccugaccaacaccagcaucaucaaccacaaguucugcaaccugagcgacgcccacaagaagaaccuguacgaccacgcccugaugagcaucaucagcaccuuccaccugagcauccccaacuucaaccaguacgaggccaugagcugcgacuucaacggcggcaagaucagcgugcaguacaaccugagccacagcuacgccggcgacgccgccaaccacugcggcaccaucgccaacggcgugcugcagaccuucaugagaauggccuggggcggcagcuacaucgcccuggacagcggcagagacagaugggacugcaucaugaccagcuaccaguaccugaucauccagaacaccaccugggaggaccacugccaguucagcagacccagccccaucggcuaccugggccugcugagccagagaaccagagacaucuacaucagcagaagacugcugggcaccuucaccuggacccugagcgacagcgagggcaaggacacccccggcggcuacugccugaccagauggaugcugaucgaggccgagcugaagugcuucggcaacaccgccguggccaagugcaacgagaagcacgacgaggaguucugcgacaugcugagacuguucgacuucaacaagcaggccauccagagacugaaggccgaggcccagaugagcauccagcugaucaacaaggccgugaacgcccugaucaacgaccagcugaucaugaagaaccaccugagagacaucaugggcauccccuacugcaacuacagcaaguacugcuaccugaaccacaccaccaccggcaagaccagccugcccaagugcugccuggugagcaacggcagcuaccugaacgagacccacuucagcgacgacaucgagcagcaggccgacaacaugaucaccgagaugcugcagaaggaguacauggagagacagggcaagaccccccugggccugguggaccuguucguguucagcaccagcuucuaccugaucagcaucuuccugcaccuggugaagauccccacccacagacacguggugggcaagagcugccccaagccccacagacugaaccacaugggcaucugcagcugcggccuguacggccagcccggcgugcccgugaaguggaagagaugaggacuaguuauaagacugacuagcccgaugggccucccaacgggcccuccuccccuccuugcaccgagauuaaucaaaggcucuuuucagagccaccaaaaaaaaaaaaaaaaaaaaaaaaaaaaaaaaaaaaaaaaaaaaaaaaaaaaaaaaaaaaaaaaaaaaaaaaaaaaaaaaaaaaaaaaaaaaaaaaaaaaa

SEQ ID NO: 39744 - RNA, 1689 nt, Artificial Sequence
  mRNA product Design i-3 (hSL-A100) comprising derived and/or modified sequence from MOPV/LASV reassortant(IGS-1;Clade IV)__AFY05576__GPCmut11 (opt4)
aggagaaagcuuaccaugggccagaucgugaccuucuuccaggaggugccccacgugaucgaggaggugaugaacaucgugcugaucgcccugagcgugcuggccgugcugaagggccuguacaacuucgccaccugcggccuggugggccuggugaccuuccugcugcugugcggcagaagcugcaccaccagccuguacaagggcguguacgagcugcagacccuggagcugaacauggagacccugaacaugaccaugccccugagcugcaccaagaacaacagccaccacuacaucauggugggcaacgagaccggccuggagcugacccugaccaacaccagcaucaucaaccacaaguucugcaaccugagcgacgcccacaagaagaaccuguacgaccacgcccugaugagcaucaucagcaccuuccaccugagcauccccaacuucaaccaguacgaggccaugagcugcgacuucaacggcggcaagaucagcgugcaguacaaccugagccacagcuacgccggcgacgccgccaaccacugcggcaccguggccaacggcgugcugcagaccuucaugagaauggccuggggcggcagcuacaucgcccuggacagcggcagaggcaacugggacugcaucaugaccagcuaccaguaccugaucauccagaacaccaccugggaggaccacugccaguucagcagacccagccccaucggcuaccugggccugcugagccagagaaccagagacaucuacaucagcagaagacugcugggcaccuucaccuggacccugagcgacagcgagggcgaggacacccccggcggcuacugccugaccagauggaugcugaucgaggccgagcugaagugcuucggcaacaccgccguggccaagugcaacgagaagcacgacgaggaguucugcgacaugcugagacuguucgacuucaacaagcaggccauccagagacugaaggccgaggcccagaugagcauccagcugaucaacaaggccgugaacgcccugaucaacgaccagcugaucaugaagaaccaccugagagacaucaugggcauccccuacugcaacuacagcaaguacugcuaccugaaccacaccaccaccggcagaaccagccugcccaagugcugccuggugagcaacggcagcuaccugaacgagacccacuucagcgacgacaucgagcagcaggccgacaacaugaucaccgagaugcugcagaaggaguacauggagagacagggcaagaccccccugggccugguggaccuguucguguucagcaccagcuucuaccugaucagcaucuuccugcaccuggugaagauccccacccacagacacaucgugggcaagagcugccccaagccccacagacugaaccacaugggcaucugcagcugcggccuguacaagcagcccggcgugcccgugaaguggaagagaugaggacuaguuauaagacugacuagcccgaugggccucccaacgggcccuccuccccuccuugcaccgagauuaaucaaaggcucuuuucagagccaccaaaaaaaaaaaaaaaaaaaaaaaaaaaaaaaaaaaaaaaaaaaaaaaaaaaaaaaaaaaaaaaaaaaaaaaaaaaaaaaaaaaaaaaaaaaaaaaaaaaaa

SEQ ID NO: 39745 - RNA, 1689 nt, Artificial Sequence
  mRNA product Design i-3 (hSL-A100) comprising derived and/or modified sequence from LASV(LM765-SLE-2012;Clade IV)__AIT17814__GPCmut11 (opt4)
aggagaaagcuuaccaugggccagaucgugaccuucuuccaggaggugccccacgugaucgaggaggugaugaacaucgugcugaucgcccugagcauccuggccgugcugaagggccuguacaacuucgccaccugcggccuggugggccuggugaccuuccugcugcugugcggcagaagcugcaccaccagccuguacaagggcguguacgagcugcagacccuggagcugaacauggagacccugaacaugaccaugccccugagcugcaccaagaacaacagccaccacuacaucauggugggcaacgagaccggccuggagcugacccugaccaacaccagcaucaucgaccacaaguucugcaaccugagcgacgcccacagaaagaaccuguacgaccacgcccugaugagcaucaucagcaccuuccaccugagcauccccaacuucaaccaguacgaggccaugagcugcgacuucaacggcggcaagaucagcgugcaguacaaccugagccacagcuacgccaaggacgccgccgaccacugcggcaccguggccaacggcgugcugcagaccuucaugagaauggccuggggcggcagcuacaucgcccuggacagcggcagaggcagaugggacugcaucaugaccagcuaccaguaccugaucauccagaacaccaccugggaggaccacugccaguucagcagacccagccccaucggcuaccugggccugcugagccagagaaccagagacaucuacaucagcagaagacugcugggcaccuucaccuggacccugagcgacagcgagggcaaggacacccccggcggcuacugccugaccagauggaugcugaucgaggccgagcugaagugcuucggcaacaccgccguggccaagugcaacgagaagcacgacgaggaguucugcgacaugcugagacuguucgacuucaacaagcaggccauccagagacugaaggccgaggcccagaugagcauccagcugaucaacaaggccgugaacgcccugaucaacgaccagcugaucaugaagaaccaccugagagacaucaugggcauccccuacugcaacuacagcaaguacugcuaccugaaccacaccaccaccggcaagaccagccugcccaagugcugccuggugagcaacggcagcuaccugaacgagacccacuucagcgacgacaucgagcagcaggccgacaacaugaucaccgagaugcugcagaaggaguacauggagagacagggcaagaccccccugggccugguggaccuguucguguucagcaccagcuucuaccugaucagcaucuuccugcaccuggugaagauccccacccacagacacaucgugggcaagcccugccccaagccccacagacugaaccacaugggcaucugcagcugcggccuguacaagcagcccggcgugcccgugaaguggaagagaugaggacuaguuauaagacugacuagcccgaugggccucccaacgggcccuccuccccuccuugcaccgagauuaaucaaaggcucuuuucagagccaccaaaaaaaaaaaaaaaaaaaaaaaaaaaaaaaaaaaaaaaaaaaaaaaaaaaaaaaaaaaaaaaaaaaaaaaaaaaaaaaaaaaaaaaaaaaaaaaaaaaaa

SEQ ID NO: 39746 - RNA, 1689 nt, Artificial Sequence
  mRNA product Design i-3 (hSL-A100) comprising derived and/or modified sequence from LASV(LM776-SLE-2012;Clade IV)__AIT17824__GPCmut11 (opt4)
aggagaaagcuuaccaugggccagaucgugaccuucuuccaggaggugccccacgugaucgaggaggugaugaacaucgugcugaucgcccugagcauccuggccgugcugaagggccuguacaacuucgccaccugcggccuggugggccuggugaccuuccugcugcugugcggcagaagcugcaccaccagcguguacaagggcguguacgagcugcagacccuggagcugaacauggagacccugaacaugaccaugccccugagcugcaccaagaacaacagccaccacuacaucauggugggcaacgagaccggccuggagcugacccugaccaacaccagcaucaucaaccacaaguucugcaaccugagcgacgcccacaagaagaaccuguacgaccacgcccugaugagcaucaucagcaccuuccaccugagcauccccaacuucaaccaguacgaggccaugagcugcgacuucaacggcggcaagaucagcgugcaguacaaccugagccacagcuacgccggcgacgccgccaaccacugcggcaccguggccaacggcgugcugcagaccuucaugagaauggccuggggcggcagcuacaucgcccuggacagcggccacggcaagugggacugcaucaugaccagcuaccaguaccugaucauccagaacaccaccugggaggaccacugccaguucagcagacccagccccaucggcuaccugggccugcugagccagagaaccagagacaucuacaucagcagaagacugcugggcaccuucaccuggacccugagcgacagcgagggcaaggacacccccggcggcuacugccugaccagauggaugcugaucgaggccgagcugaagugcuucggcaacaccgccguggccaagugcaacgagaagcacgacgaggaguucugcgacaugcugagacuguucgacuucaacaagcaggccauccagagacugaaggccgaggcccagaugagcauccagcugaucaacaaggccgugaacgcccugaucaacgaccagcugaucaugaagaaccaccugagagacaucaugggcauccccuacugcaacuacagcaaguacugcuaccugaaccacaccaccaccggcaagaccagccugcccaagugcugccuggugagcaacggcagcuaccugaacgagacccacuucagcgacgacaucgagcagcaggccgacaacaugaucaccgagaugcugcagaaggaguacauggagagacagggcaagaccccccugggccugguggaccuguucguguucagcaccagcuucuaccugaucagcaucuuccugcaccuggugaagauccccacccacagacacaucgugggcaagagcugccccaagccccacagacugaaccacaugggcaucugcagcugcggccuguacaagcagcccggcgugcccgugagauggaagagaugaggacuaguuauaagacugacuagcccgaugggccucccaacgggcccuccuccccuccuugcaccgagauuaaucaaaggcucuuuucagagccaccaaaaaaaaaaaaaaaaaaaaaaaaaaaaaaaaaaaaaaaaaaaaaaaaaaaaaaaaaaaaaaaaaaaaaaaaaaaaaaaaaaaaaaaaaaaaaaaaaaaaa

SEQ ID NO: 39747 - RNA, 1689 nt, Artificial Sequence
  mRNA product Design i-3 (hSL-A100) comprising derived and/or modified sequence from LASV(Mad39;Clade IV)__ANH09722__GPCmut11 (opt4)
aggagaaagcuuaccaugggccagaucgugaccuucuuccaggaggugccccacgugaucgaggaggugaugaacaucgugcugaucgcccugagcauccuggccgugcugaagggccuguacaacguggccaccugcggccugaucggccuggugaccuuccugcugcugugcggcagaagcugcaccaccacccuguacaagggcguguacgagcugcaggcccuggagcugaacauggagacccugaacaugaccaugccccugagcugcaccaagaacaacagccaccacuacaucagagugggcaacgagaccggccuggagcugacccugaccaacaccagccugaucaaccacaaguucugcaaccugagcgacgcccacaagaagaaccuguacgaccacgcccugaugagcaucaucagcaccuuccaccugagcauccccaacuucaaccaguacgaggccaugagcugcgacuucaacgacggcaagaucagcgugcaguacaaccugagccacaccuacgccggcgacaccgccaaccacugcggcaccguggccaacggcgugcugcagaccuucaugagaauggccuggggcggcagcuacaucgcccuggacagcggcagaggcggcugggacugcaucaugaccagcuaccaguaccugaucauccagaacaccaccugggaggaccacugccaguucagcagacccagccccaucggcuaccugggccugcugagccagagaaccagagacaucuacaucagcagaagacugcugggcaccuucaccuggacccugagcgacagcgagggcaaggacacccccggcggcuacugccugaccagauggaugcugaucgaggccgagcugaagugcuucggcaacaccgccguggccaagugcaacgagaagcacgacgaggaguucugcgacaugcugagacuguucgacuucaacaagcaggccauccagagacugaaggccgaggcccagaugagcauccagcugaucaacaaggccgugaacgcccugaucaacgaccagcugaucaugaagaaccaccugagagacaucaugggcauccccuacugcaacuacagcaaguacugcuaccugaaccacaccgugaccggcaagaccagccugcccaagugcugccuggugagcaacggcagcuaccugaacgagacccacuucagcgacgacaucgagcagcaggccgacaacaugaucaccgagaugcugcagaaggaguacauggagagacagggcaagaccccccugggccugguggaccuguucguguucagcaccagcuucuaccugaucagcaucuuccugcaccuggugaagauccccacccacagacacguggugggcaagcccugccccaagccccacagacugaaccacaugggcaucugcagcugcggcuucuacaagcagcccggcgugcccgugagauggaagagaugaggacuaguuauaagacugacuagcccgaugggccucccaacgggcccuccuccccuccuugcaccgagauuaaucaaaggcucuuuucagagccaccaaaaaaaaaaaaaaaaaaaaaaaaaaaaaaaaaaaaaaaaaaaaaaaaaaaaaaaaaaaaaaaaaaaaaaaaaaaaaaaaaaaaaaaaaaaaaaaaaaaaa

SEQ ID NO: 39748 - RNA, 1689 nt, Artificial Sequence
  mRNA product Design i-3 (hSL-A100) comprising derived and/or modified sequence from LASV(Z0947-SLE-2011;Clade IV)__AIT17840__GPCmut11 (opt4)
aggagaaagcuuaccaugggccagaucgugaccuucuuccaggaggugccccacgugaucgaggaggugaugaacaucgugcugaucgcccugagcauccuggccgugcugaagggccuguacaacuucgccaccugcggccuggugggccuggugaccuuccugcugcugugcggcagaagcugcaccaucagccuguacaagggcguguacgagcugcagacccuggagcugaacauggagacccugaacaugaccaugccccugagcugcaccaagaacaacagccaccacuacaucauggugggcaacgagaccggccuggagcugacccugaccaacaccagcaucaucaaccacaaguucugcaaccugagcgacgcccacaagaagaaccuguacgaccacgcccugaugagcaucaucagcaccuuccaccugagcauccccaacuucaaccaguacgaggccaugagcugcgacuucaacggcggcaagaucagcgugcaguacaaccugagccacagcuacgccggcgacgccgccaaccacugcggcaccguggccaacggcgugcugcagaccuucaugagaauggccuggggcggcagcuacaucgcccuggacagcggcagagacagaugggacugcaucaugaccagcuaccaguaccugaucauccagaacaccaccugggaggaccacugccaguucagcagacccagccccaucggcuaccugggccugcugagccagagaaccagagacaucuacaucagcagaagacugcugggcaccuucaccuggacccugagcgacagcgagggcaaggacacccccggcggcuacugccugaccagauggaugcugaucgaggccgagcugaagugcuucggcaacaccgccguggccaagugcaacgagaagcacgacgaggaguucugcgacaugcugagacuguucgacuucaacaagcaggccauccagagacugaaggccgaggcccagaugagcauccagcugaucaacaaggccgugaacgcccugaucaacgaccagcugaucaugaagaaccaccugagagacaucaugggcauccccuacugcaacuacagcaaguacugcuaccugaaccacaccaccaccggcaagaccagccugcccaagugcugccuggugagcaacggcagcuaccugaacgagacccacuucagcgacgacaucgagcagcaggccgacaacaugaucaccgagaugcugcagaaggaguacauggagagacagggcaagaccccccugggccugguggaccuguucguguucagcaccagcuucuaccugaucagcaucuuccugcaccuggugaagauccccacccacagacacaucgugggcaagcccugccccaagccccacagacugaaccacaugggcaucugcagcugcggccuguacaagcagcccggcgugcccgugaaguggaagagaugaggacuaguuauaagacugacuagcccgaugggccucccaacgggcccuccuccccuccuugcaccgagauuaaucaaaggcucuuuucagagccaccaaaaaaaaaaaaaaaaaaaaaaaaaaaaaaaaaaaaaaaaaaaaaaaaaaaaaaaaaaaaaaaaaaaaaaaaaaaaaaaaaaaaaaaaaaaaaaaaaaaaa

SEQ ID NO: 39749 - RNA, 1689 nt, Artificial Sequence
  mRNA product Design i-3 (hSL-A100) comprising derived and/or modified sequence from LASV(Josiah;Clade IV)__NP_694870__GPCmut11 (opt5)
aggagaaagcuuaccaugggccagaucgugaccuucuuucaagaggucccccacguuauugaagaggugaugaacaucgugcugauugcccucagcguccuggcugugcuuaaggggcuguacaauuucgccacaugcggacucguuggccuggugacguuucuucugcucugugggagauccugcaccacaucucuguauaaaggagucuacgaacugcagacccucgagcugaacauggaaacacuuaauaugaccaugccucugagcuguacaaagaacaauucccaucacuauaucauggugggcaacgagaccgggcucgagcugacgcuuaccaauacaucuauuaucaaccauaaauucugcaaucugagcgacgcgcacaagaaaaaccucuacgaucaugcucugauguccaucauuucuaccuuucaccugagcaucccgaauuucaaccaguaugaagccauguccugugacuuuaauggaggcaagauuagcguucaguacaaccucucucacuccuaugccggcgaugcugccaaucauugcgggacaguggcuaacggaguccugcaaaccuucaugcggauggccuggggcgggagcuacaucgcgcuugacucuggacgcggcaacugggauuguauuaugacguccuaccaguaucugaucauucagaauacaaccugggaggaccacugccaguuuagcagacccucuccuaucggguaccucggacugcuuucccaacggacacgcgauaucuauauuagcagacggcugcucggcaccuucaccuggacacuguccgacucugaaggcaaggauacgcccgggggauacugucugacccgcuggaugcucaucgaggccgagcugaaaugcuuuggcaacacagcuguggccaaguguaaugaaaaacaugacgaggaguucugcgauaugcuuagacuguuugacuucaacaagcaggcuauucagcggcucaaagccgaagcgcagaugagcauccaacugauuaauaaggccgugaacgcucuuaucaaugaucagcugaucaugaagaaccaccuccgcgacauuauggggaucccuuauugcaauuacuccaaauauuguuaccugaaccacaccacaaccggaagaacgagccugcccaagugcugucucgucucuaauggcuccuaccugaacgaaacacauuucagcgacgauauugagcagcaagccgacaauaugaucaccgagaugcuucagaaagaauauauggagcggcaggggaagaccccucugggacucguugaucuguuuguguucucuaccagcuuuuaccugauuuccaucuuccuucaccucgugaaaaucccgacacaucgccacauugucggcaagucuugccccaaaccucauagacugaaccacaugggcaucuguagcugcgggcuguauaagcagcccggagugccuguuaaguggaaacggugaggacuaguuauaagacugacuagcccgaugggccucccaacgggcccuccuccccuccuugcaccgagauuaaucaaaggcucuuuucagagccaccaaaaaaaaaaaaaaaaaaaaaaaaaaaaaaaaaaaaaaaaaaaaaaaaaaaaaaaaaaaaaaaaaaaaaaaaaaaaaaaaaaaaaaaaaaaaaaaaaaaaa

SEQ ID NO: 39750 - RNA, 1686 nt, Artificial Sequence
  mRNA product Design i-3 (hSL-A100) comprising derived and/or modified sequence from LASV(LP;Clade I)__AAF86701__GPCmut11 (opt5)
aggagaaagcuuaccaugggccagaucauuaccuucuuucaagaggugccccacgucaucgaagagguuaugaacauugugcugaucgcccucagccugcuugcuauucugaaggggcucuacaauaucgccacaugcggaaucauuggccugguggcguuccuuuuucugugugggaaauccugcucucucacgcugaagggaggcuaugaacugcagacccucgagcugaacauggaaacacuuaauaugaccaugccucugagcuguaccaaaaacuccucucaucacuacaucagagucgggaaugagacaggacucgagcugacacuuaccaacacgagcauuaucaaucauaaguucugcaaccuguccgacgcucacaaaaagaaucucuaugaucaugcccugaugucuauuaucagcaccuuucaccuguccauuccgaacuucaaucaguacgaagccaugagcugugacuuuaacggcggcaagaucucugugcaguauaaucucucccacagcuacgcuggggaugccgcugagcauugcggaacaguugccaacggcgugcugcaaaccuucaugcggauggcguggggagggcgcuauaucgcccuugacucuggcaaagggaauugggauuguauuaugacauccuaccaguaccugaucauucagaacaccacgugggaagaccacugccaguuuagcagacccucuccuaucggauaucucggccugcuuucccaacggacacgcgauauuuacaucagcagacggcugcucggcaccuucacauggacccuguccgacucugaggggaacgagacccccggaggcuauugucugacacgcuggaugcucaucgaagcugagcugaagugcuuugggaauacggccgucgcuaaauguaacgaaaagcaugaugaggaguucugcgacaugcuuagacuguuugauuucaauaaacaggccauucggcgccucaaggcggaagcccagaugagcauccagcugauuaacaaggcugugaaugcccuuaucaacgaccaacugauuaugaaaaaucaccucagagauaucaugggaaucccuuacugcaacuauuccaaguacuguuaucugaaucacaccagcucuggccggacaucccugcccaaaugcugucucauuagcaacgggucuuaccugaaugagacccaguucagcgacgacaucgaacagcaagcugauaacaugauuacagagaugcuucagaaggaauacaucgagcgccagggaaaaaccccucugggccucguugacauuuuuaucuucuccacgucuuuuuaucugauuagcaucuuccugcaucuuaucaagauuccgacacacagacauaucgugggcaaacccugcccuaagccccaccggcucaaucauaugggggucuguuccugcggacuguacaagcacccuggcgugcccaccaaauggaagcgcugaggacuaguuauaagacugacuagcccgaugggccucccaacgggcccuccuccccuccuugcaccgagauuaaucaaaggcucuuuucagagccaccaaaaaaaaaaaaaaaaaaaaaaaaaaaaaaaaaaaaaaaaaaaaaaaaaaaaaaaaaaaaaaaaaaaaaaaaaaaaaaaaaaaaaaaaaaaaaaaaaaaaa

SEQ ID NO: 39751 - RNA, 1686 nt, Artificial Sequence
  mRNA product Design i-3 (hSL-A100) comprising derived and/or modified sequence from LASV(803213;Clade II)__AAF86703__GPCmut11 (opt5)
aggagaaagcuuaccaugggccagaucauuaccuucuuucaagaggugccccacgucaucgaagagguuaugaacauugugcugaucgcccucagccugcuugcuauucugaaggggaucuacaauguggccacaugcggacucuucggccugaucuccuuucuucugcucugugggagaucuugcagcgucacguauaaaggaguguacgaacugcagacccuggagcucaacauggcgaaucugaacaugacaaugccucuuuccuguaccaagaauaacucucaucacuauauuaugguuggcaaugaaacagggcuggagcucacccugacaaacaccagcaucauuaaucauaaauucugcaaccuuuccgacgcucacaagaaaaaucuguacgaucaugcccucaugucuaucauuagcacguuucaccuguccaucccgaacuucaaucaguaugaggccaugagcugugacuuuaacggaggcaagauuucugugcaguacaaucugucccacagcuucgcugucgaugccgcuaaccauugcggcaccaucgccaacggggugcuccaaacauuuaugcggauggcguggggaggcucuuauaucgcccuggacuccgggaagggaaauugggauuguauuaugaccagcuaccaguaccuuaucauucagaacacaaccugggaagaccacugccaguucucucgccccuccccuaucggcuaucuggggcuccugagccaaagaacgcgggauauuuacaucucccgcagacuucugggaacauuuaccuggacacucucugacagcgagggcaaugaagcucccggcggguauugucugacccgguggaugcugaucgaggccgagcucaaaugcuucggaaacaccgcuguugccaaguguaaugaaaaacaugaugaggaauuuugcgacaugcugcgccuuuucgauuucaacaagcaggcgauuaaaagacugaagacagaggcccagauguccauccagcucauuaauaaggcugugaacgcccugaucaaugaccaacuuauuaugaaaaaccaucugcgggauaucaugggcaucccuuacugcaauuauagccgcuacuguuaucucaaccacacggucaccgggaagacaucucugcccagaugcugucugguguccaauggaagcuaccucaacgaaacccacuuuucugacgacauugagcagcaggcugauaauaugaucacagagaugcugcaaaaagaauacauggaccggcagggcaagaccccucuugggcugguggaucucuucgucuuuagcacguccuucuaucugauuucuaucuuucugcaccuuguuaaaauuccgacacaucgccacaucgugggaaagcccugcccuaaaccccauagacucaaccacaugggcauuuguagcugcggccuguacaagcacccuggggugcccgucaaguggaaacggugaggacuaguuauaagacugacuagcccgaugggccucccaacgggcccuccuccccuccuugcaccgagauuaaucaaaggcucuuuucagagccaccaaaaaaaaaaaaaaaaaaaaaaaaaaaaaaaaaaaaaaaaaaaaaaaaaaaaaaaaaaaaaaaaaaaaaaaaaaaaaaaaaaaaaaaaaaaaaaaaaaaaa

SEQ ID NO: 39752 - RNA, 1686 nt, Artificial Sequence
  mRNA product Design i-3 (hSL-A100) comprising derived and/or modified sequence from LASV(GA391;Clade III)__CAA36645__GPCmut11 (opt5)
aggagaaagcuuaccaugggccagaucgugaccuucuuucaagaggucccccacguuauugaagaggugaugaacaucgugcugauugcccucagcauccuggcuauucuuaaggggcuguacaaugucgccacaugcggacucaucggccuggugacguuccuucugcucuccgggagaucuuguagccugaucuauaaaggaaccuacgaacugcagacacucgagcugaacauggaaacccuuaauaugacaaugccucuguccugcaccaagaacaauucucaucacuauauucggguuggcaacgagacagggcucgagcugacccuuacgaauaccagcauccugaaccauaaauuuuguaaucucuccgacgcgcacaagcgcaaccuguacgaucauucucugaugagcauuaucuccacauuccaccucagcauuccgaauuuuaaccaguaugaagcuaugucuugcgacuucaauggaggcaaaaucaccgugcaguacaaccugucccacagcuuugccgucgaugccgcuggccauugugggacacuugccaauggagugcugcaaaccuucaugagaauggcuuggggcgggucuuauauugcccucgacuccggacggggcaacugggauugcaucaugacgagcuaccaguaccugaucauucagaacacaaccugggacgaucacugucaguuuucucgccccuccccuaucggguaucuuggacugcucagccaaagaacacgggacauuuacaucucccgcagacugcugggcaccuucaccuggacacucucugauagcgagggcaaugaaacgcccgggggauauugccugacccgguggaugcuuauugaggcggagcugaaguguuuuggcaacacagccguugcuaagugcaaugaaaaacaugacgaggaguucugugauaugcuccgccuguuugacuucaacaagcaggccaucagacggcuuaaaaccgaagcucagauguccauccagcugauuaauaaggccgugaacgcgcucaucaaugaucaacugauuaugaaaaaccaucugcgcgacaucauggggauuccuuacugcaauuauagcagauacugcuaucucaaccacacaucuaccggaaagacgucccugccccgguguugccuuaucagcaauggcucuuaccugaacgaaacaaaguucagcgacgauaucgagcagcaggccgacaauaugauuaccgagaugcuccaaaaagaauacaucgaucgccaggggaagaccccucugggacuggucgaccuuuuuguguucuccacaucuuuuuaucucauuagcaucuuccugcaccuggugaaaauuccgacccacagacauaucgucggcaagcccuguccuaaaccccaccggcucaaccauaugggcauuugcuccugugggcuguacaagcagccuggaguucccgugagauggaaacgcugaggacuaguuauaagacugacuagcccgaugggccucccaacgggcccuccuccccuccuugcaccgagauuaaucaaaggcucuuuucagagccaccaaaaaaaaaaaaaaaaaaaaaaaaaaaaaaaaaaaaaaaaaaaaaaaaaaaaaaaaaaaaaaaaaaaaaaaaaaaaaaaaaaaaaaaaaaaaaaaaaaaaa

SEQ ID NO: 39753 - RNA, 1689 nt, Artificial Sequence
  mRNA product Design i-3 (hSL-A100) comprising derived and/or modified sequence from LASV(AV;Clade V)__CCA30314__GPCmut11 (opt5)
aggagaaagcuuaccaugggccagaucgugaccuucuuucaagaggucccccacguuauugaagaggugaugaacaucgugcugauugcccucagcauccuggcuguccuuaaggggcuguacaauauugccacaugcggacucaucggccugaucacguuccuucugcucugugggagauccugcucuagcaaccuguauaaaggaguguacgaacugcagucccucgaccugaauauggagacccuuaacaugacaaugccucugucuuguaccaagaauaacagccaucacuauauucggguuggcaaugauacagggcucgaacugacccuuacaaacaccuccauccugaaucauaaauuuugcaaccucucugacgcgcacaagaaagaucuguacgaccaugcucugaugagcauuaucuccacguuccaccucagcauuccgaauuuuaaccaguaugaggccaugucuugugauuucaauggaggcaagaucuccgugcaguacaaccugagccacucuuaugccauugacgcugccaaucauugcggcaccgucgcuaacgggauccuucaaacauuuaugcgcauggccuggggaggcuccuacaucgcgcuggauagcgggagaggaaacugggacuguauuaugaccucuuaccaguaucucaucauucagaauacaaccugggagaaccacugccaguucucccggcccagcccuaucggcuaccuggggcuucugucccaacgcacgagagauauuuauaucucucggcgccuccugggaacauuuaccuggacacugagcgacuccgaaggcaaugccacccccggcggguacugucucaccagauggaugcugaucgaggcugaacuuaagugcuucggaaacacagccguggcuaaauguaaugagaagcaugaugaggaauuuugcgacaugcugcgccucuucgauuuuaacaaacaggccauuagccggcugaagucugaggcgcagauguccauccagcuuauuaauaaagccguuaacgcucugaucaaugaccaacucauuaugaagaaccaccugagagacaucaugggcaucccuuauugcaauuacagcaaguauuguuaccugaaccacacgauuaccgggaaaacaucucuccccaagugcugucuggugagcaauggauccuaccuuaacgaaacccauuucucugaugacaucgagcagcaggccgauaauaugauuacagaaaugcugcaaaaagaguauauggagcggcagggcaagaccccucucgggcuggucgaccuguucguguuuagcacguccuucuaccuuaucagcauuuuucuccgccuggugaaaaucccgacacacagacauauugucggaaagcccugcccuaaaccccaccggcugaaccauaugggcaucuguucuugcggccucuauaagcagccugggguucccgugcgcuggaagagaugaggacuaguuauaagacugacuagcccgaugggccucccaacgggcccuccuccccuccuugcaccgagauuaaucaaaggcucuuuucagagccaccaaaaaaaaaaaaaaaaaaaaaaaaaaaaaaaaaaaaaaaaaaaaaaaaaaaaaaaaaaaaaaaaaaaaaaaaaaaaaaaaaaaaaaaaaaaaaaaaaaaaa

SEQ ID NO: 39754 - RNA, 1686 nt, Artificial Sequence
  mRNA product Design i-3 (hSL-A100) comprising derived and/or modified sequence from LASV(Togo/2016/7082;Clade VI)__AMR44577__GPCmut11 (opt5)
aggagaaagcuuaccaugggccagaucauuaccuucuuucaagaggugccccacgucaucgaagagguuaugaacauugugcugaucgcccucagccugcuugcuauucugaaggggguguacaaugucgccacaugcggaaucaucggccucgugacguuccuguuucuuugugggagauccugcucucugauuuauaaaggaagcuacgaacuccagacccuggagcugaacauggaaacacucaauaugaccaugccucuguccuguacaaagaacucuagccaucacuauauccggguuggcaaugagaccgggcuugagcugacacucaccaacacguccauuaucaaucauaaauucugcaaccugucugacgcgcacaagcgcaaucuuuacgaucaugcucugaugagcauucucuccaccuuucaccugagcaucccgaacuucaaucaguaugaagccaugucuugugacuuuaacggaggcaaaauuuccgugcaguacaaucugagccacgccuaugcugucgaugccgcugagcauugcggcacaguggccaacgggguucuccaaaccuucaugagaauggcguggggaggcucuuacaucgcccuggacuccgggcggggaaauugggauuguaucaugacaagcuaccaguaucuuauuauccagaacaccacgugggaagaccacugccaguuuucucgccccuccccuauuggcuaccuggggcuccugagccaaagaacacgggauaucuauauuucccgcagacuucugggaaccuucacauggacccucucugacagcgagggcaacgagacccccggcggguacugucugacacgguggaugcugaucgaagcugagcucaagugcuuuggaaauacggccguggcuaaguguaacgaaaaacaugaugaggaguucugcgacaugcugcgccuuuuugauuucaauaagcaggccauccagagacugaaauccgaagcgcagaugagcauucaacucaucaacaaggccgucaaugcucugauuaacgaccagcuuaucaugaaaaaucaucugcgggauaugaugggcauuccuuauugcaacuacucuaaguauuguuaccucaaucacaccuccagcgggcgcacaucucugcccaagugcugucuggugagcaacggauccuaccucaaugagacccacuucucugacgacaucgaacagcaagccgauaacaugaucacagagaugcugcagaaagaauauauugacagacagggcaagaccccucuugggcugguggaucucuuugucuucagcacguccuuuuaccugaucagcauuuuccugcaccuuaucaaaauuccgacacaucggcacaucguuggaaagcccugcccuaaaccccaucgccucaaucacaugggcauuuguucuugcggccuguauaagcagccuggggugcccaccagauggaaacggugaggacuaguuauaagacugacuagcccgaugggccucccaacgggcccuccuccccuccuugcaccgagauuaaucaaaggcucuuuucagagccaccaaaaaaaaaaaaaaaaaaaaaaaaaaaaaaaaaaaaaaaaaaaaaaaaaaaaaaaaaaaaaaaaaaaaaaaaaaaaaaaaaaaaaaaaaaaaaaaaaaaaa

SEQ ID NO: 39755 - RNA, 1686 nt, Artificial Sequence
  mRNA product Design i-3 (hSL-A100) comprising derived and/or modified sequence from LASV(KAK-428;Clade n.d. (VII))__ANH09740__GPCmut11 (opt5)
aggagaaagcuuaccaugggccagaucgugaccuucuuucaagaggucccccacguuauugaagaggugaugaacaucgugcugauugcccucagccugcuugcuauccugaaggggcucuacaauuucgccacaugcggagucauuggccugaucacguuucuucugcucugugggagauccugcucugcgaccuauaaaggacaguacgaacugcagacacuggagcucaacauggaaagccugaauaugaccaugccucuuuccuguacaaagaacaauucucaucacuauauccgggcuggcaacaauaccgggcuggagcucacacugaccaacacgagcauuaucucccauaaauucugcaaucuuucugacgcccacaagaaaaaccuguacgaucauacccucaugagcauuaucacaaccuuucaccuguccauuccgaauuucaaccaguaugaggccaugagcugugacuuuaauggaggcaagaucucuauucaauacaaccugucccacagcuaugcuggcgaugccgcucagcauugcgggacaguggccaauggaguucuccagaccuucaugcgcauggcguggggcgggucuuaccuggcccuugacuccggaagacggggcugggauuguaucaucagcucuuaccaguaucugauuauccaaaacacgacaugggacgaucacugccaguuuucccgccccagcccuauuggguaccucggauucgugucccagaagaccagagacaucuauauuucucggcgccugcuuggcacauuuaccuggacccugagcgauuccgaaggccaugacaugcccgggggauacugucucacaagauggaugcugaucgaggcugaucugaaaugcuucggcaacacggccgucgcuaaguguaaugaaaaacacgacgaggaguuuugcgauauguggcgccucuucgacuucaacaagcaggccauccaacggcugaaagcggaagcccagaugaauauucagcuuaucaacaaggcugugaaugcccugauuaacgaccaacucaugaugaagaaucaccugagagauaucauggggauuccuuauugcaacuacagcaaauuuuguuaucuuaauaacaccacaaccggacggacaucucugccccgcugcugucucaucuccaauggcagcuaccugaacgagacccauuucucugacgauaucgaacagcaggcugacaauaugauuacggagaugcugcagaaggaauacauggauagacaagggaaaacaccucucggacugguugaccuuuuuguguucagcaccuccuuuuaucugaucaccauuuuccuccaccuggucaagaucccgacacaucggcacauugugggcaaacccugcccuaagccccaucgccugaaccacaugggcaucuguucuugcgggcuuuacaaacagccuggagugcccgucagauggaagcggugaggacuaguuauaagacugacuagcccgaugggccucccaacgggcccuccuccccuccuugcaccgagauuaaucaaaggcucuuuucagagccaccaaaaaaaaaaaaaaaaaaaaaaaaaaaaaaaaaaaaaaaaaaaaaaaaaaaaaaaaaaaaaaaaaaaaaaaaaaaaaaaaaaaaaaaaaaaaaaaaaaaaa

SEQ ID NO: 39756 - RNA, 1686 nt, Artificial Sequence; identical to SEQ ID NO: 39750
  mRNA product Design i-3 (hSL-A100) comprising derived and/or modified sequence from LASV(Pinneo-NIG-1969;Clade I)__AIT17836__GPCmut11 (opt5)

SEQ ID NO: 39757 - RNA, 1686 nt, Artificial Sequence
  mRNA product Design i-3 (hSL-A100) comprising derived and/or modified sequence from LASV(ISTH0009-NIG-2011;Clade II)__AIT17404__GPCmut11 (opt5)
aggagaaagcuuaccaugggccagaucauuaccuucuuucaagaggugccccacgucaucgaagagguuaugaacauugugcugaucgcccucagccugcuugcuauucugaaggggaucuacaauguggccacaugcggacucuucggccuggucuccuuucuucugcucugugggagaucuugcagcacgaccuauaaaggaguguacgaacugcagacacuggagcucgacauggcgucccugaacaugaccaugccucuuucuuguacaaagaauaacagccaucacuauaucaugguuggcaaugaaaccgggcuggagcucacacugaccaacacguccauuaucaaucauaaauucugcaaccuuucugaugcucacaagaaaaaucuguacgaccaugcccucaugagcauuaucuccaccuuucaccugagcauuccgaacuucaaucaguaugaggccaugucuugugauuuuaacggaggcaagaucuccgugcaguacaaucugagccacgcuuaugccgucgacgcugccaaccauugcggcacaauugcgaauggggugcuccaaaccuucaugcggauggccuggggaggcucuuacaucgcucuggauuccgggaagggaagcugggacuguaucaugacaucuuaccaguaucuuauuauccagaacaccacgugggaagaucacugccaguuuucccgccccagcccuauuggcuaccuggggcuccugucccaaagaacacgggacaucuauauuucucgcagacuucugggaaccuucacauggacccucagcgauuccgagggcaacgaaacccccggcggguacugucugacacgguggaugcugaucgaggccgagcucaaaugcuuuggaaauacggcuguugccaaguguaacgaaaaacaugacgaggaguucugcgauaugcugcgccuuuuugacuucaauaagcaggcgaucagacggcugaaaaccgaagcccagaugagcauucagcucaucaacaaggcugugaaugcccugauuaacgaucaacuuaucaugaagaaucaucugcgcgacauuaugggcaucccuuauugcaacuacucuaaauauuguuaccucaaucacacagucaccgggaagacaucccugcccagaugcugucuggugagcaacggaucuuaccucaaugaaacccacuucagcgacgauaucgagcagcaggcugacaacaugauuacggagcugcuucaaaaagaauauauggaucggcagggcaagacaccucuggggcucguggaccuguuugucuucuccaccucuuuuuaccugaucagcauuuuccuucaccucaucaaaauuccgacccaucgccacaucacaggaaagcccugcccuaaaccccauagacugaaucacaugggcauuuguuccugcggccuguauaagcacccugggguucccgugaaguggaaacggugaggacuaguuauaagacugacuagcccgaugggccucccaacgggcccuccuccccuccuugcaccgagauuaaucaaaggcucuuuucagagccaccaaaaaaaaaaaaaaaaaaaaaaaaaaaaaaaaaaaaaaaaaaaaaaaaaaaaaaaaaaaaaaaaaaaaaaaaaaaaaaaaaaaaaaaaaaaaaaaaaaaaa

SEQ ID NO: 39758 - RNA, 1686 nt, Artificial Sequence
  mRNA product Design i-3 (hSL-A100) comprising derived and/or modified sequence from LASV(ISTH2010-NIG-2012;Clade II)__AIT17482__GPCmut11 (opt5)
aggagaaagcuuaccaugggccagaucauuaccuucuuucaagaggugccccacgucaucgaagagguuaugaacauugugcugaucgcccucagccugcuugcuauucugaaggggaucuacaauguggccacaugcggacucuucggccuggucuccuuucuucugcucugugggagaucuugcagcacgaccuauaaaggaguguacgaacugcagacacuggagcucgacauggcgucccugaacaugaccaugccucuuucuuguacaaagaauaacagccaucacuauaucaugguuggcaaugaaaccgggcuggagcucacacugaccaacacguccauuaucaaucauaaauucugcaaccuuucugaugcucacaagaaaaaucuguacgaccaugcccucaugagcauuaucuccaccuuucaccugagcauuccgaacuucaaucaguaugaggccaugucuugugauuuuaacggaggcaagaucuccgugcaguacaaucugagccacgcuuaugccgucgacgcugccaaccauugcggcacaauugcgaauggggugcuccaaaccuucaugcggauggccuggggaggcucuuacaucgcucuggauuccgggaagggaagcugggacuguaucaugacaucuuaccaguaucuuauuauccagaacauuaccugggaagaucacugccaguuuucccgccccagcccuaucggcuaccuggggcuccugucccaaagaacgcgggacauuuauaucucucgcagacuucugggaacauucaccuggacacucagcgauuccgagggcaacgaaacccccggcggguacugucugacccgguggaugcugaucgaggccgagcucaaaugcuuuggaaauacagcuguugccaaguguaacgaaaaacaugacgaggaguucugcgauaugcugcgccuuuuugacuucaauaagcaggcgauuagacggcugaaaacggaagcccagaugagcauccagcucauuaacaaggcugugaaugcccugaucaacgaucaacuuauuaugaagaaucaucugcgcgacaucaugggcaucccuuauugcaacuacucuaaauauuguuaccucaaucacaccgucacagggaagaccucccugcccagaugcugucuggugagcaacggaucuuaccucaaugaaacacacuucagcgacgauauugagcagcaggcugacaacaugaucaccgagcugcuucaaaaagaauauauugaucggcagggcaagacgccucuggggcucguggaccuguuugucuucuccacaucuuuuuaccugaucagcauuuuccuucaccucguuaaaaucccgacccaucgccacguggugggaaagcccugcccuaaaccccauagacugaaucacaugggcauuuguuccugcggccuguauaagcacccugggguccccgugaaguggaaacggugaggacuaguuauaagacugacuagcccgaugggccucccaacgggcccuccuccccuccuugcaccgagauuaaucaaaggcucuuuucagagccaccaaaaaaaaaaaaaaaaaaaaaaaaaaaaaaaaaaaaaaaaaaaaaaaaaaaaaaaaaaaaaaaaaaaaaaaaaaaaaaaaaaaaaaaaaaaaaaaaaaaaa

SEQ ID NO: 39759 - RNA, 1686 nt, Artificial Sequence
  mRNA product Design i-3 (hSL-A100) comprising derived and/or modified sequence from LASV(Lassa virus/H.sapiens-wt/NGA/2015/ISTH_0543;Clade II)__AVO03639__GPCmut11 (opt5)
aggagaaagcuuaccaugggccagaucauuaccuucuuucaagaggugccccacgucaucgaagagguuaugaacauugugcugaucgcccucagccugcuugcuauucugaaggggaucuacaauguggccacaugcggacucuucggccuggucuccuuucuucugcucugugggagaucuugcagcacgaccuauaaaggaguguacgaacugcagacacuggagcucgacauggcgaaccugaauaugaccaugccucuuuccuguacaaagaacaauucucaucacuauaucaugguuggcaacgaaaccgggcuggagcucacacugaccaauacgagcauuaucaaccauaaauucugcaaucuuuccgaugcucacaagaaaaaccuguacgaccaugcccucaugucuauuaucagcaccuuucaccuguccauuccgaauuucaaccaguaugaggccaugagcugugauuuuaauggaggcaagaucucugugcaguacaaccugucccacacauaugcugucgacgccgcuaaucauugcggcaccauugccaacggggugcuccaaacauucaugcggauggcguggggaggcagcuacaucgcccuggauucugggaagggauccugggacuguaucaugaccagcuaccaguaucuuguuauucagaacacgacaugggaagaucacugccaguuuucucgccccuccccuaucggcuaccuggggcuccugagccaaagaacccgggacauuuauaucucccgcagacuucugggaacauucaccuggacccucucugauagcgagggcaaugaaacacccggcggguacugucugacgcgguggaugcugauugaggcugagcucaaaugcuuuggaaacaccgccguggcuaaguguaaugaaaaacaugacgaggaguucugcgauaugcugcgccuuuuugacuucaacaagcaggccaucagacggcugaaaacagaagcgcagauguccauccagcucauuaauaaggccgucaacgcucugaucaaugaucaacuuauuaugaagaaccaucugcgcgacaucaugggcauuccuuauugcaauuacagcaaauauuguuaccucaaccacaccgugacagggaagaccucucugcccagaugcugucugguguccaauggaagcuaccucaacgaaacgcacuucucugacgauaucgagcagcaggccgacaauaugaucacagagcugcuucaaaaagaauauauugaucggcagggcaagaccccucuggggcucgucgaccuguuuguuuucagcaccuccuuuuaccugaucucuauuuuccuucaccucgugaaaaucccgacacaucgccacauuaccggaaagcccugcccuaaaccccauagacugaaccacaugggcaucuguagcugcggccuguauaagcacccuggggugcccgucaaguggaaacggugaggacuaguuauaagacugacuagcccgaugggccucccaacgggcccuccuccccuccuugcaccgagauuaaucaaaggcucuuuucagagccaccaaaaaaaaaaaaaaaaaaaaaaaaaaaaaaaaaaaaaaaaaaaaaaaaaaaaaaaaaaaaaaaaaaaaaaaaaaaaaaaaaaaaaaaaaaaaaaaaaaaaa

SEQ ID NO: 39760 - RNA, 1686 nt, Artificial Sequence
  mRNA product Design i-3 (hSL-A100) comprising derived and/or modified sequence from LASV(Lassa virus/H.sapiens-wt/NGA/2016/ISTH_0009;Clade II)__AVO03571__GPCmut11 (opt5)
aggagaaagcuuaccaugggccagaucauuaccuucuuucaagaggugccccacgucaucgaagagguuaugaacauugugcugaucgcccucagccugcuugcuauucugaaggggaucuacaauguggccacaugcggacuccugggccuugucuccuuccugcuccugugugggagaucuugcagcacgaccuauaaaggaguguacgaacugcagacacucgagcuggacauggcgucccuuaacaugaccaugccucugucuuguacaaagaauaacagccaucacuauaucaugguuggcaaugaaaccgggcucgagcugacacuuaccaacacguccauuaucaaucauaaauuuugcaaccugucugaugcucacaagaaaaaucucuacgaccaugcccugaugagcauuaucuccaccuuccaccugagcauuccgaacuuuaaucaguaugaggccaugucuugugauuucaacggaggccggaucuccgugcaguacaaucucagccacucuuaugcugucgacgccgcuaaccauugcggcacaauugccaauggggugcugcaaaccuuuaugcgcauggcguggggaggcuccuacaucgcccuugauagcgggaagggaucuugggacuguaucaugacauccuaccaguaucugauuauccagaacaccacgugggaagaucacugccaguucagcagacccuccccuauuggcuaccucgggcugcuuucucaacggacacgcgacaucuauauuagcagacggcugcucggaaccuuuacauggacccuguccgauagcgagggcaacgaaacccccggcggguacugucugacacgcuggaugcucaucgaggcugagcugaagugcuucggaaauacggccguugcuaaauguaacgaaaagcaugacgaggaauuuugcgauaugcuuagacuguucgacuuuaauaaacaggccauccggcgccucaagaccgaggcgcagaugucuauucagcugaucaacaaagccgugaaugcucuuauuaacgaucaacugaucaugaagaaucaccucagagacauuaugggcaucccuuauugcaacuacuccaaguauuguuaccugaaucacacagucaccgggaaaacaagccugccccggugcugucucgugucuaacggaagcuaccugaaugaaacccauuucuccgacgauaucgagcagcaggccgacaacaugauuacggagcuucugcaaaaggaauauaucgaucgccagggcaaaacaccucucgggcugguggaccuguucgucuuuucuaccagcuucuaccuuauuuccaucuuucuccaccugguuaagauuccgacccauagacacaucacaggaaaacccugcccuaagccccaucggcugaaucacaugggcauuuguagcugcggccucuauaaccacccuggggugcccgugaaauggaagcgcugaggacuaguuauaagacugacuagcccgaugggccucccaacgggcccuccuccccuccuugcaccgagauuaaucaaaggcucuuuucagagccaccaaaaaaaaaaaaaaaaaaaaaaaaaaaaaaaaaaaaaaaaaaaaaaaaaaaaaaaaaaaaaaaaaaaaaaaaaaaaaaaaaaaaaaaaaaaaaaaaaaaaa

SEQ ID NO: 39761 - RNA, 1686 nt, Artificial Sequence
  mRNA product Design i-3 (hSL-A100) comprising derived and/or modified sequence from LASV(Lassa virus/H.sapiens-wt/NGA/2016/ISTH_0017;Clade II)__AVO03567__GPCmut11 (opt5)
aggagaaagcuuaccaugggccagaucauuaccuucuuucaagaggugccccacgucaucgaagagguuaugaacauugugcugaucgcccucagccugcuugcuauucugaaggggaucuacaauguggccacaugcggacucuucggccuggucuccuuucuucugcucugugggagaucuugcagcacgaccuauaaaggaguguacgaacugcagacacuggagcucgacauggcgucccugaacaugaccaugccucuuucuuguacaaagaauaacagccaucacuauaucaugguuggcaaugaaaccgggcuggagcucacacugaccaacacguccauuaucaaucauaaauucugcaaccuuucugaugcucacaagaaaaaucuguacgaccaugcccucaugagcauuaucuccaccuuucaccugagcauuccgaacuucaaucaguaugaggccaugucuugugauuuuaacggaggcaagaucuccgugcaguacaaucugagccacacauaugcuauugacgccgcuaaccauugcggcaccaucgccaaugggguccuccaaacauucaugcggauggcguggggaggcucuuacaucgcccuggauuccgggaagggaagcugggacuguauuaugaccucuuaccaguaucuuaucauucagaacacgacaugggaagaucacugccaguuuucccgccccagcccuaucggcuaccuggggcuccugucccaaagaacccgggacauuuauaucucucgcagacuucugggaacauucaccuggacccucagcgauuccgagggcaacgaaacacccggcggguacugucugacgcgguggaugcugaucgaggcugagcucaaaugcuuuggaaauaccgccguggcuaaguguaacgaaaaacaugacgaggaguucugcgauaugcugcgccuuuuugacuucaauaagcaggccauuagacggcugaaaacagaagcgcagaugagcauccagcucauuaacaaggccguuaaugcucugaucaacgaucaacuuauuaugaagaaucaucugcgcgacaucaugggcaucccuuauugcaacuacucuaaauauuguuaccucaaucacaccgugacagggaagaccucccugcccagaugcugucuggucagcaacggaucuuaccucaaugaaacgcacuucagcgacgauauugagcagcaggccgacaacaugaucacagagcugcuucaaaaagaauauauggaucggcagggcaagaccccucuggggcucguggaccuguuuguguucuccaccucuuuuuaccugauuagcaucuuccuucaccucguccgcauuccgacacauagacacguuaucggaaaacccugcccuaagccccaucggcugaaucacaugggcauuuguuccugcggccuguauaaacacccuggggugcccgugaaguggaagcgcugaggacuaguuauaagacugacuagcccgaugggccucccaacgggcccuccuccccuccuugcaccgagauuaaucaaaggcucuuuucagagccaccaaaaaaaaaaaaaaaaaaaaaaaaaaaaaaaaaaaaaaaaaaaaaaaaaaaaaaaaaaaaaaaaaaaaaaaaaaaaaaaaaaaaaaaaaaaaaaaaaaaaa

SEQ ID NO: 39762 - RNA, 1686 nt, Artificial Sequence
  mRNA product Design i-3 (hSL-A100) comprising derived and/or modified sequence from LASV(Lassa virus/H.sapiens-wt/NGA/2018/ISTH_0959;Clade II)__AVV65099__GPCmut11 (opt5)
aggagaaagcuuaccaugggccagaucauuaccuucuuucaagaggugccccacgucaucgaagagguuaugaacauugugcugaucgcccucagccugcuugcuauucugaaggggaucuacaauguggucacaugcggacucuucggccugguguccuuucuucugcucugugggagaucuugcagcacgaccuauaaaggaguuuacgaacugcagacacuggagcucgacauggccucccugaacaugaccaugccucuuucuuguacaaagaauaacagccaucacuauaucauggugggcaaugaaaccgggcuggagcucacacugaccaacacguccauuaucaaucauaaauucugcaaccuuucugaugcgcacaagaaaaaucuguacgaccaugcucucaugagcauuaucuccaccuuucaccugagcauuccgaacuucaaucaguaugaggccaugucuugugauuuuaacggaggcaagaucuccguccaguacaaucugagccacgccuaugcuauugacgccgcuaaccauugcggcacaaucgccaauggggugcuccaaaccuucaugcggauggcguggggaggcucuuacaucgcccuggauuccgggaagggaagcugggacuguauuaugacaucuuaccaguaucuuaucauucagaacaccacgugggaagaucacugccaguuuucccgccccagcccuaucggcuaccuggggcuccugucccaaagaacacgggacauuuauaucucucgcagacuucugggaaccuucacauggacccucagcgauuccgagggcaacgaaacccccggcggguacugucugacacgguggaugcugaucgaggcugagcucaaaugcuuuggaaauacggccguugcuaaguguaacgaaaaacaugacgaggaguucugcgauaugcugcgccuuuuugacuucaauaagcaggccauuagacggcugaaaaccgaagcgcagaugagcauccagcucauuaacaaggccgugaaugcucugaucaacgaucaacuuauuaugaagaaucaucugcgcgacaucaugggcaucccuuauugcaacuacucuaaauauuguuaccucaaucacacagucaccgggaagacaucccugcccagaugcugucuggugagcaacggaucuuaccucaaugaaacccacuucagcgacgauauugagcagcaggccgacaacaugaucacggagcugcuucaaaaagaauauauugaucggcagggcaagacaccucuggggcucguggaccuguuugucuucuccaccucuuuuuaccugaucagcauuuuccuucaccucguuaaaaucccgacccaucgccacgugauuggaaagcccugcccuaaaccccauagacugaaucacaugggcaucuguuccugcggccuguauaagcacccuggggugcccgucaaguggaaacggugaggacuaguuauaagacugacuagcccgaugggccucccaacgggcccuccuccccuccuugcaccgagauuaaucaaaggcucuuuucagagccaccaaaaaaaaaaaaaaaaaaaaaaaaaaaaaaaaaaaaaaaaaaaaaaaaaaaaaaaaaaaaaaaaaaaaaaaaaaaaaaaaaaaaaaaaaaaaaaaaaaaaa

SEQ ID NO: 39763 - RNA, 1686 nt, Artificial Sequence
  mRNA product Design i-3 (hSL-A100) comprising derived and/or modified sequence from LASV(LASV003-NIG-2008;Clade II)__AIT17580__GPCmut11 (opt5)
aggagaaagcuuaccaugggccagaucauuaccuucuuucaagaggugccccacgucaucgaagagguuaugaacauugugcugaucgcccucagccugcuugcuauucugaaggggaucuacaauguggccacaugcggacucuucggccuggucuccuuucuucugcucugugggagaucuugcagcacgaccuauaaaggaguguacgaacugcagacacuggagcucgacauggcgucccugaacaugaccaugccucuuucuuguacaaagaauaacagccaucacuauaucaugguuggcaaugaaaccgggcuggagcucacacugaccaacacguccauuaucaaucauaaauucugcaaccuuucugaugcucacaagaaaaaucuguacgaccaugcccucaugagcauuaucuccaccuuucaccugagcauuccgaacuucaaucaguaugaggccaugucuugugauuuuaacggaggcaagaucuccgugcaguacaaucugagccacacauaugcugucgacgccgcuaaccauugcggcaccauugccaauggggugcuccaaacauucaugcggauggcguggggaggcucuuacaucgcccuggauuccgggaagggaagcugggacuguaucaugaccucuuaccaguaucuuauuauccagaacacgacaugggaagaucacugccaguuuucccgccccagcccuauuggcuaccuggggcuccugucccaaagaacccgggacaucuauauuucucgcagacuucugggaacauucaccuggacccucagcgauuccgagagcaacgaaacacccggcggcuacugucugacgcgguggaugcugaucgaggcugagcucaaaugcuuugggaauaccgccguugcuaaguguaacgaaaaacaugacgaggaguucugcgauaugcugcgccuuuuugacuucaauaagcaggccaucagacggcugaaagcggaagcccagaugucuauucagcucaucaacaaggcugugaaugcccugauuaacgaucaacuuaucaugaagaaucaucugcgcgacauuaugggaaucccuuauugcaacuacuccaaauauuguuaccucaaucacacagucaccggcagaacaagccugccccggugcugucuggugucuaacgggagcuaccucaaugaaacccacuucuccgacgauaucgagcagcaggcugacaacaugauuacggagcugcuucaaaaggaauauauggaucgccagggaaaaacaccucugggccucguggaccuguuugucuucucuaccagcuuuuaccugaucuccauuuuccuucaccucguuaagaucccgacccauagacacgugauugggaaacccugcccuaagccccaucggcugaaucacaugggaaucuguagcugcggccuguauaaacacccuggcgugcccgucaaguggaagcgcugaggacuaguuauaagacugacuagcccgaugggccucccaacgggcccuccuccccuccuugcaccgagauuaaucaaaggcucuuuucagagccaccaaaaaaaaaaaaaaaaaaaaaaaaaaaaaaaaaaaaaaaaaaaaaaaaaaaaaaaaaaaaaaaaaaaaaaaaaaaaaaaaaaaaaaaaaaaaaaaaaaaaa

SEQ ID NO: 39764 - RNA, 1686 nt, Artificial Sequence
  mRNA product Design i-3 (hSL-A100) comprising derived and/or modified sequence from LASV(LASV035-NIG-2009;Clade II)__AIT17588__GPCmut11 (opt5)
aggagaaagcuuaccaugggccagaucauuaccuucuuucaagaggugccccacgucaucgaagagguuaugaacauugugcugaucgcccucagccugcuugcuauucugaaggggaucuacaauguggccacaugcggacucuucggccuggucuccuuucuucugcucugugggagaucuugcagcacgaccuauaaaggaguguacgaacugcagacacuggagcucgacauggcgucccugaacaugaccaugccucuuucuuguacaaagaauaacagccaucacuauaucaugguuggcaaugaaaccgggcuggagcucacacugaccaacacguccauuaucaaucauaaauucugcaaccuuucugaugcucacaagaaaaaucuguacgaccaugcccucaugagcauuaucuccaccuuucaccugagcauuccgaacuucaaucaguaugaggccaugucuugugauuuuaacggaggcaagaucuccgugcaguacaaucugagccacgcuuaugccgucgacgcugccaaccauugcggcacaauugcgaauggggugcuccaaaccuucaugcggauggccuggggaggcucuuacaucgcucuggauuccgggaagggaagcugggacuguaucaugacaucuuaccaguaucuuauuauccagaacaccacgugggaagaucacugccaguuuucccgccccagcccuauuggcuaccuggggcuccugucccaaagaacacgggacaucuauauuucucgcagacuucugggaaccuucacauggacccucagcgauuccgagggcaacgaaacccccggcggguacugucugacacgguggaugcugaucgaggccgagcucaaaugcuuuggaaauacggcuguugccaaguguaacgaaaaacaugacgaggaguucugcgauaugcugcgccuuuuugacuucaauaagcaggcgaucagacggcugaaagccgaagcucagaugagcauucagcucaucaacaaggccgugaaugcucugauuaacgaucaacuuaucaugaagaaucaucugcgcgacauuaugggcaucccuuauugcaacuacucuaaauauuguuaccucaaucacaccgucacagggaagaccucccugcccagaugcugucuggugagcaacggaucuuaccucaaugaaacacacuucagcgacgauaucgagcagcaggccgacaacaugauuaccgagcugcuucaaaaagaauauaucgaucggcagggcaagacgccucuggggcucguggaccuguuugucuucuccacaucuuuuuaccugauuagcaucuuccuucaccucguuaaaauuccgacccaucgccacgugaucggaaagcccugcccuaaaccccauagacugaaucacaugggcauuuguuccugcggccuguauaagcacccuggggugcccgucaaguggaaacggugaggacuaguuauaagacugacuagcccgaugggccucccaacgggcccuccuccccuccuugcaccgagauuaaucaaaggcucuuuucagagccaccaaaaaaaaaaaaaaaaaaaaaaaaaaaaaaaaaaaaaaaaaaaaaaaaaaaaaaaaaaaaaaaaaaaaaaaaaaaaaaaaaaaaaaaaaaaaaaaaaaaaa

SEQ ID NO: 39765 - RNA, 1686 nt, Artificial Sequence
  mRNA product Design i-3 (hSL-A100) comprising derived and/or modified sequence from LASV(LASV1000-NIG-2009;Clade II)__AIT17782__GPCmut11 (opt5)
aggagaaagcuuaccaugggccagaucauuaccuucuuucaagaggugccccacgucaucgaagagguuaugaacauugugcugaucgcccucagccugcuugcuauucugaaggggaucuacaauguggccacaugcggacucuucggccuggucuccuuucuucugcucugugggagaucuugcagcacgaccuauaaaggaguguacgaacugcagacacuggagcucgacauggcgucccugaacaugaccaugccucuuucuuguacaaagaauaacagccaucacuauaucaugguuggcaaugaaaccgggcuggagcucacacugaccaacacguccauuaucaaucauaaauucugcaaccuuucugaugcucacaagaaaaaucuguacgaccaugcccucaugagcauuaucuccaccuuucaccugagcauuccgaacuucaaucaguaugaggccaugucuugugauuuuaacggaggcaagaucuccgugcaguacaaucugagccacacauaugcugucgacgccgcuaaccauugcggcaccauugccaauggggugcuccaaacauucaugcggauggcguggggaggcucuuacaucgcccuggauuccgggaagggaagcugggacuguaucaugaccucuuaccaguaucuuauuauccagaacacgacaugggaagaucacugccaguuuucccgccccagcccuauuggcuaccuggggcuccugucccaaagaacccgggacaucuauauuucucgcagacuucugggaacauucaccuggacccucagcgauuccgagggcaacgaaacacccggcggguacugucugacgcgguggaugcugaucgaggcugagcucaaaugcuuuggaaauaccgccguugcuaaguguaacgaaaaacaugacgaggaguucugcgauaugcugcgccuuuuugacuucaauaagcaggccaucaaaagacugaagacagaagcgcagaugagcauucagcucaucaacaaggccgugaaugcucugauuaacgaucaacuuaucaugaaaaaucaucugcgggacauuaugggcaucccuuauugcaacuacucuaaguauuguuaccucaaucacaccgucacagggaaaaccucccugccccgcugcugucuggugagcaacggaucuuaccucaaugaaacgcacuucagcgacgauaucgagcagcaggccgacaacaugauuacagagcugcuucaaaaggaauauaucgauagacagggcaaaaccccucuggggcucguggaccuguuugucuucuccaccucuuuuuaccugauuagcaucuuccuucaccucguuaagauuccgacacaucggcacguggugggaaaacccugcccuaagccccaucgccugaaucacaugggcaucuguuccugcggccuguauaagcacccugggguccccgugaaauggaagagaugaggacuaguuauaagacugacuagcccgaugggccucccaacgggcccuccuccccuccuugcaccgagauuaaucaaaggcucuuuucagagccaccaaaaaaaaaaaaaaaaaaaaaaaaaaaaaaaaaaaaaaaaaaaaaaaaaaaaaaaaaaaaaaaaaaaaaaaaaaaaaaaaaaaaaaaaaaaaaaaaaaaaa

SEQ ID NO: 39766 - RNA, 1686 nt, Artificial Sequence
  mRNA product Design i-3 (hSL-A100) comprising derived and/or modified sequence from LASV(LASV221-NIG-2010;Clade II)__AIT17624__GPCmut11 (opt5)
aggagaaagcuuaccaugggccagaucauuaccuucuuucaagaggugccccacgucaucgaagagguuaugaacauugugcugaucgcccucagccugcuugcuauucugaaggggaucuacaauguggccacaugcggacucuucggccuggucuccuuucuucugcucugugggagaucuugcagcacgaccuauaaaggaguguacgaacugcagacacuggagcucgacauggcgucccugaacaugaccaugccucuuucuuguacaaagaauaacagccaucacuauaucaugguuggcaaugaaaccgggcuggagcucacacugaccaacacguccauuaucaaucauaaauucugcaaccuuucugaugcucacaagaaaaaucuguacgaccaugcccucaugagcauuaucuccaccuuucaccugagcauuccgaacuucaaucaguaugaggccaugucuugugauuuuaacggaggcaagaucuccgugcaguacaaucugagccacacauaugcuauugacgccgcuaaccauugcggcaccaucgccaaugggguccuccaaacauucaugcggauggcguggggaggcucuuacaucgcccuggauuccgggaagggaagcugggacuguauuaugaccucuuaccaguaucuuaucauucagaacacgacaugggaagaucacugccaguuuucccgccccagcccuaucggcuaccuggggcuccugucccaaagaacccgggacauuuauaucucucgcagacuucugggaacauucaccuggacccucagcgauuccgagggcaacgaaacacccggcggguacugucugacgcgguggaugcugaucgaggcugagcucaaaugcuuuggaaauaccgccguggcuaaguguaacgaaaaacaugacgaggaguucugcgauaugcugcgccuuuuugacuucaauaagcaggccauuagacggcugaaaacagaagcgcagaugagcauccagcucauuaacaaggccguuaaugcucugaucaacgaucaacuuauuaugaagaaucaucugcgcgacaucaugggcaucccuuauugcaacuacucuaaauauuguuaccucaaucacaccgugacagggaagaccucccugcccagaugcugucuggucagcaacggaucuuaccucaaugaaacgcacuucagcgacgauauugagcagcaggccgacaacaugaucacagagaugcugcaaaaagaauauauggaucggcagggcaagaccccucuugggcugguggaccucuuuguguucuccaccucuuuuuaccugauuagcaucuuccugcaccuugucaaaauuccgacacaucgccacguuaucggaaagcccugcccuaaaccccauagacucaaucacaugggcauuuguuccugcggccuguauaagcacccuggggugcccgugaaguggaaacggugaggacuaguuauaagacugacuagcccgaugggccucccaacgggcccuccuccccuccuugcaccgagauuaaucaaaggcucuuuucagagccaccaaaaaaaaaaaaaaaaaaaaaaaaaaaaaaaaaaaaaaaaaaaaaaaaaaaaaaaaaaaaaaaaaaaaaaaaaaaaaaaaaaaaaaaaaaaaaaaaaaaaa

SEQ ID NO: 39767 - RNA, 1686 nt, Artificial Sequence
  mRNA product Design i-3 (hSL-A100) comprising derived and/or modified sequence from LASV(LASV237-NIG-2010;Clade II)__AIT17638__GPCmut11 (opt5)
aggagaaagcuuaccaugggccagaucauuaccuucuuucaagaggugccccacgucaucgaagagguuaugaacauugugcugaucgcccucagccugcuugcuauucugaaggggaucuacaauguggccacaugcggacucuucggccuggucuccuuucuucugcucugugggagaucuugcagcacgaccuauaaaggaguguacgaacugcagacacuggagcucgacauggcgucccugaacaugaccaugccucuuucuuguacaaagaauaacagccaucacuauaucaugguuggcaaugaaaccgggcuggagcucacacugaccaacacguccauuaucaaucauaaauucugcaaccuuucugaugcucacaagaaagaccuguacgaucaugcccucaugagcauuaucuccaccuuucaccugagcauuccgaauuucaaccaguaugaggccaugucuugugacuuuaauggaggcaagaucuccgugcaguacaaccugagccacacauaugcugucgaugccgcuaaucauugcggcaccauugccaacggggugcuccaaacauucaugcggauggcguggggaggcucuuacaucgcccuggacuccgggaagggaagcugggauuguaucaugaccucuuaccaguaucuuauuauccagaauacgacaugggaagaccacugccaguuuucccgccccagcccuauuggcuaccuggggcuccugucccaaagaacccgggauaucuauauuucucgcagacuucugggaacauucaccuggacccucagcgacuccgagggcaacgaaacacccggcggguacugucugacgcgguggaugcugaucgaggcugagcucaaaugcuuuggaaacaccgccguugcuaaguguaaugaaaaacaugaugaggaguucugcgacaugcugcgccuuuuugauuucaacaagcaggccaucagacggcugaaaacagaagcgcagaugagcauucagcucaucaauaaggccgugaacgcucugauuaaugaccaacuuaucaugaagaaccaucugcgcgacauuaugggcaucccuuauugcaauuacucuaaauauuguuaccucaaccacaccgucacagggaagaccucccugcccagaugcugucuggugagcaauggaucuuaccucaacgaaacgcacuucagcgaugacaucgagcagcaggccgauaauaugauuacagagcugcuucaaaaagaauauauggaccggcagggcaagaccccucuggggcucguggaucuguuugucuucuccaccucuuuuuaccugaucagcauuuuccuucaccucaucaaaauuccgacacaucgccacaucaccggaaagcccugcccuaaaccccauagacugaaccacaugggcauuuguuccugcggccuguauaagcacccugggguucccgugaaguggaaacggugaggacuaguuauaagacugacuagcccgaugggccucccaacgggcccuccuccccuccuugcaccgagauuaaucaaaggcucuuuucagagccaccaaaaaaaaaaaaaaaaaaaaaaaaaaaaaaaaaaaaaaaaaaaaaaaaaaaaaaaaaaaaaaaaaaaaaaaaaaaaaaaaaaaaaaaaaaaaaaaaaaaaa

SEQ ID NO: 39768 - RNA, 1686 nt, Artificial Sequence
  mRNA product Design i-3 (hSL-A100) comprising derived and/or modified sequence from LASV(LASV253-NIG-2011;Clade II)__AIT17670__GPCmut11 (opt5)
aggagaaagcuuaccaugggccagaucauuaccuucuuucaagaggugccccacgucaucgaagagguuaugaacauugugcugaucgcccucagccugcuugcuauucugaaggggaucuacaauguggccacaugcggacucuucggccuggucuccuuucuucugcucugugggagaucuugcagcacgaccuauaaaggaguguacgaacugcagacacuggagcucgacauggcgucccugaacaugaccaugccucuuucuuguacaaagaauaacagccaucacuauaucaugguuggcaaugaaaccgggcuggagcucacacugaccaacacguccauuaucaaucauaaauucugcaaccuuucugaugcucacaagaaaaaucuguacgaccaugcccucaugagcauuaucuccaccuuucaccugagcauuccgaacuucaaucaguaugaggccaugucuugugauuuuaacggaggcaagaucuccgugcaguacaaucugagccacacauaugcugucgacgccgcuaaccauugcggcaccauugccaauggggugcuccaaacauucaugcggauggcguggggaggcucuuacaucgcccuggauuccgggaagggaagcugggacuguaucaugaccucuuaccaguaucuuauuauccagaacacgacaugggaagaucacugccaguuuucccgccccagcccuauuggcuaccuggggcuccugucccaaagaacccgggacaucuauauuucucgcagacuucugggaacauucaccuggacccucagcgauuccgagggcaacgaaacacccggcggguacugucugacgcgguggaugcugaucgaggcugagcucaaaugcuuuggaaauaccgccguugcuaaguguaacgaaaaacaugacgaggaguucugcgauaugcugcgccuuuuugacuucaauaagcaggccaucagacggcugaaagcggaagcccagaugagcauucagcucaucaacaaggcugugaaugcccugauuaacgaucaacuuaucaugaagaaucaucugcgcgacauuaugggcaucccuuauugcaacuacucuaaauauuguuaccucaaucacacagucaccgggagaacaucccugccccggugcugucuggugagcaacggaucuuaccucaaugaaacccacuucagcgacgauaucgagcagcaggcugacaacaugauuacggagcugcuucaaaaggaauauaucgaucgccagggcaaaacaccucuggggcucguggaccuguuugucuucuccaccucuuuuuaccugauuagcaucuuccuucaccucguuaagauuccgacccauagacacaucauuggaaaacccugcccuaagccccaucggcugaaucacaugggcaucuguuccugcggccuguauaaacacccuggggugcccgugaaguggaagcgcugaggacuaguuauaagacugacuagcccgaugggccucccaacgggcccuccuccccuccuugcaccgagauuaaucaaaggcucuuuucagagccaccaaaaaaaaaaaaaaaaaaaaaaaaaaaaaaaaaaaaaaaaaaaaaaaaaaaaaaaaaaaaaaaaaaaaaaaaaaaaaaaaaaaaaaaaaaaaaaaaaaaaa

SEQ ID NO: 39769 - RNA, 1686 nt, Artificial Sequence
  mRNA product Design i-3 (hSL-A100) comprising derived and/or modified sequence from LASV(LASV254-NIG-2011;Clade II)__AIT17674__GPCmut11 (opt5)
aggagaaagcuuaccaugggccagaucauuaccuucuuucaagaggugccccacgucaucgaagagguuaugaacauugugcugaucgcccucagccugcuugcuauucugaaggggaucuacaauguggccacaugcggacucuucggccuggucuccuuucuucugcucugugggagaucuugcagcacgaccuauaaaggaguguacgaacugcagacacuggagcucgacaugaccaaccugaauaugacaaugccucuuuccuguaccaagaacaauucucaucacuauaucaugguuggcaacgaaacagggcuggagcucacccugacgaauaccagcauuaucaaccauaaauucugcaaucuuuccgaugcgcacaagaaaaaccuguacaaucaugcucucaugucuauuaucagcacauuucaccuguccauuccgaacuucaaucaguaugaggccaugagcugugacuuuaacggaggcaagaucucugugcaguacaaucugucccacagcuaugccgucgaugcugccaaccauugcggcaccauugcuaacggggugcuccaaacauucaugcggauggccuggggaggcucuuacaucgcgcuggacuccgggaagggaaauugggauuguaucaugaccagcuaccaguaucuuauuauccagaacacgacaugggaagaccacugccaguuuucucgccccuccccuauuggcuaccuggggcuccugagccaaagaacccgggauaucuauauuucccgcagacuucugggaacauucaccuggacccucucugacagcgagggcaaugaaacacccggcggguacugucugacgcgguggaugcugaucgaggccgagcucaaaugcuuuggaaacaccgcuguugccaaguguaaugaaaaacaugaugaggaguucugcgacaugcugcgccuuuuugauuucaacaagcaggcuaucagacggcugaaaacagaagcccaggcgaauauucagcucaucaacaaggccgugaaugcucugauuaacgaccaacuuaucaugaagaaucaucugcgcgauauuaugggcaucccuuauugcaacuacuccaaauauuguuaccucaaucacaccgucacagggaagaccagccugcccagaugcugucuggugucuaacggauccuaccucaaugaaacgcacuucagcgacgacaucgagcagcaggccgauaacaugauuacagagcugcuucaaaaagaauauauggaccggcagggcaagaccccucuggggcucguggaucuguuugucuucucuaccagcuuuuaccugaucuccauuuuccuucaccucguuaaaaucccgacacaucgccacgugauuggaaagcccugcccuaaaccccauagacugaaccacaugggcaucuguucuugcggccuguauaagcacccuggggugcccgucaaguggaaacggugaggacuaguuauaagacugacuagcccgaugggccucccaacgggcccuccuccccuccuugcaccgagauuaaucaaaggcucuuuucagagccaccaaaaaaaaaaaaaaaaaaaaaaaaaaaaaaaaaaaaaaaaaaaaaaaaaaaaaaaaaaaaaaaaaaaaaaaaaaaaaaaaaaaaaaaaaaaaaaaaaaaaa

SEQ ID NO: 39770 - RNA, 1686 nt, Artificial Sequence
  mRNA product Design i-3 (hSL-A100) comprising derived and/or modified sequence from LASV(Nig08-A19;Clade III)__ADU56618__GPCmut11 (opt5)
aggagaaagcuuaccaugggccagaucgugaccuucuuucaagaggucccccacguuauugaagaggugaugaacaucgugcugauugcccucagcauccuggcuauucuuaaggggcuguacaauaucgccacaugcggacucaucggccuggucacguuccuucugcucuccgggagaucuuguagcaugaccuauaaaggaguguacgaacugcagacacuggagcucaacaugaauacccugaacaugacaaugccucuuuccugcaccaagaauaacucucaucacuauauuaugguuggcaaugaaacagggcuggagcucacccugacgaacaccagccuucugcaucacaaauuuuguaaucucuccgacgcgcauaagaaaaaccuguacgaucacacacugaugucuaucauuagcaccuuccaccucuccaucccgaauuuuaaccaguaugaggcuaugagcugcgacuucaauggaggcaagauuacagugcaguacaaccugucucauuccuaugccaucgaugccgcuaaucacuguggcaccgucgccaacggggugcuucaaacguuuaugcggauggcuuggggaggcagcuacauugcccuggacucugggcgcggaaagugggauugcaucaugacauccuaccaguaucucaucauucagaacaccacaugggaagaccauugucaguucagcagacccucuccuaucggcuaccuggggcuucugucccaacggacccgcgauauuuauaucagcagacggcuccugggaaccuuuacauggacgcuguccgacucugagggcaaugaaacccccggcggguacugccucacacgcuggaugcugauugaggcggagcuuaaauguuucggaaacaccgccguugcuaagugcaaugaaaaacacgaugaggaauuuugugacaugcugagacucuucgauuuuaacaagcaggccauccggcgccugaaagcugaggcccagaugagcauccagcuuauuaauaaggcggugaacgcccugaucaaugaccaacucauuaugaagaaccaccugagagauaucaugggcauuccuuauugcaauuacuccaaauauugcuaccugaaccauacaagcaccgggcggacgucucucccccgcuguugccuggucuccaauggaagcuaccuuaacgaaacacacuucucugacgacaucgagcagcaggcugauaauaugaucaccgagaugcugcaaaaggaauaucucgacagacagggcaaaaccccucuggggcugguggaucuuuucguguuuagcacauccuucuaccucauuucuaucuuucugcaucuggucaagauuccgacccaccggcauaucguuggaaaacccuguccuaagccccaccgccucaaccacaugggcauuugcagcuguggccuguauaaacagccuggggugcccgugagauggaagcggugaggacuaguuauaagacugacuagcccgaugggccucccaacgggcccuccuccccuccuugcaccgagauuaaucaaaggcucuuuucagagccaccaaaaaaaaaaaaaaaaaaaaaaaaaaaaaaaaaaaaaaaaaaaaaaaaaaaaaaaaaaaaaaaaaaaaaaaaaaaaaaaaaaaaaaaaaaaaaaaaaaaaa

SEQ ID NO: 39771 - RNA, 1689 nt, Artificial Sequence
  mRNA product Design i-3 (hSL-A100) comprising derived and/or modified sequence from LASV(G1180-SLE-2010;Clade IV)__AIT17168__GPCmut11 (opt5)
aggagaaagcuuaccaugggccagaucgugaccuucuuucaagaggucccccacguuauugaagaggugaugaacaucgugcugauugcccucagcauccuggcuguccuuaaggggcuguacaauuucgccacaugcggacucgugggccugcuuacguuucugcuccugugugggagauccugcaccgcgucucgguauaaaggaguuuacgaacugcagacacucgagcugaacauggaaacccuuaauaugacaaugccucugagcuguaccaagaacaauucccaucacuauauuauggugggcaacgagacagggcucgagcugacccuuacgaauaccucuaucaucaaccauaaauucugcaaucugagcgacgcucacaagaaaaaccucuacgaucaugcccugauguccauuaucucuacauuucaccugagcauuccgaauuucaaccaguaugaagccauguccugugacuuuaauggaggcaagaucagcguccaguacaaccucucucacuccuaugcuggcgaugccgcuaaucauugcgggaccguggccaacggaguucugcaaacauucaugcgcauggcguggggcgggagcuacauugcccuugacucuggacacggcuccugggauuguaucaugaccagcuaccaguaucugauuauccagaacacgacaugggaggaccauugccaguuuucuagacccuccccuaucggguaccucggacugcuuagccaacggacccgcgauauuuauaucuccagacggcugcucggcacauucaccuggacccugucugacagcgaaggcaaggauacacccgggggauacugucugacgcgcuggaugcucauugaggcugagcugaaaugcuuuggcaauaccgccguggcuaaguguaacgaaaaacacgacgaggaguucugcgauaugcuuagacuguuugacuucaauaagcaggccauccagcggcucaaagcggaagcccagauguccauucaacugaucaacaaggcugucaaugcccuuaucaacgaucagcugauuaugaagaaucaccuccgcgacaucauggggauuccuuauugcaacuacagcaaauauuguuaccugaaucauacaaccacaggaaagaccucucugcccaaaugcugucucguguccaacggcagcuaccugaaugaaacgcacuucucugacgauaucgagcagcaagcugacaacaugauuacagagaugcuucagaaggaauauauggagagacaggggaaaaccccucugggacucguggaucuguuugucuucagcaccuccuuuuaccugaucucuaucuuccuucaucucguuaagauuccgacacaccggcauaucgugggcaaaagcugccccaagccucaccgccugaaucacaugggcauuuguuccugcgggcuguauaagcagcccggagugccugucaaauggaagagaugaggacuaguuauaagacugacuagcccgaugggccucccaacgggcccuccuccccuccuugcaccgagauuaaucaaaggcucuuuucagagccaccaaaaaaaaaaaaaaaaaaaaaaaaaaaaaaaaaaaaaaaaaaaaaaaaaaaaaaaaaaaaaaaaaaaaaaaaaaaaaaaaaaaaaaaaaaaaaaaaaaaaa

SEQ ID NO: 39772 - RNA, 1689 nt, Artificial Sequence
  mRNA product Design i-3 (hSL-A100) comprising derived and/or modified sequence from LASV(G1442-SLE-2011;Clade IV)__AIT17180__GPCmut11 (opt5)
aggagaaagcuuaccaugggccagaucgugaccuucuuucaagaggucccccacguuauugaagaggugaugaacaucgugcugauugcccucagcauccuggcuguccuuaaggggcuguacaauguggccacaugcggacucauuggccugguuacguuccuucugcucugugggagauccugcaccacaacccuguauaaaggaguguacgaacugcagacacucgagcugaacauggaaacccuuaauaugacaaugccucugucuuguaccaagaacaauagccaucacuauauccgggucggcaacgagacggggcucgagcugacccuuacaaauaccuccaucauuaaccauaaauuuugcaaucugucugacgcgcacaagaaaaaccucuacgaucaugcucugaugagcaucauuuccacauuccaccugucuaucccgaauuuuaaccaguaugaagccaugagcugugacuucaauggaggcaagauuuccgugcaguacaaccucagccacucuuaugccggcgaugcugccaaucauugcgggaccguugcuaacggagugcugcaaacguuuaugcgcauggccuggggcggguccuacaucgcgcuugacagcggaagaggcaacugggauuguauuaugacaucuuaccaguaucugaucauccagaauaccacaugggacgaucacugccaguucucccggcccagcccuauuggguaccucggacugcuuucucaacgcaccagagacgucuauaucucccggcgccugcucggcaccuuuacauggacgcugagcgauuccgagggcaaggacacccccgggggauacugucugacaagauggaugcucauugaagccgagcugaaaugcuucggcaacaccgcuguggccaaguguaaugagaaacaugaugaagaguuuugcgacaugcuucggcuguucgauuuuaacaagcaggcuauccagcgccucaaagccgaagcgcagaugucuauucaacugaucaauaaggccgugaacgcucuuaucaaugaccagcugauuaugaagaaccaccucagagacaucauggggauuccuuauugcaauuacagcaaauauuguuaccugaacaauacagccaccggaaagacgucccugcccaaaugcugucucaucagcaacggcucuuaccugaaugagacacacuucuccgaugacauugaacaggaggcugauaacaugaucaccgagaugcuucaaaaggaauauauggagcggcaggggaaaaccccucugggacucgucgaccuguucguuuuuagcacaucuuucuaccugaucagcauuuuucuucaucucgugaagaucccgacccaccgccauauugugggcaaauccugccccaagccucacagacugaaucauaugggcaucuguucuugcgggcuguauaagcagcccggagucccugugcgguggaaacgcugaggacuaguuauaagacugacuagcccgaugggccucccaacgggcccuccuccccuccuugcaccgagauuaaucaaaggcucuuuucagagccaccaaaaaaaaaaaaaaaaaaaaaaaaaaaaaaaaaaaaaaaaaaaaaaaaaaaaaaaaaaaaaaaaaaaaaaaaaaaaaaaaaaaaaaaaaaaaaaaaaaaaa

SEQ ID NO: 39773 - RNA, 1689 nt, Artificial Sequence
  mRNA product Design i-3 (hSL-A100) comprising derived and/or modified sequence from LASV(G3010-SLE-2013;Clade IV)__AIT17344__GPCmut11 (opt5)
aggagaaagcuuaccaugggccagaucgugaccuucuuucaagaggucccccacguuauugaagaggugaugaacaucgugcugauugcccucagcauccuggcuguccuuaaggggcuguacaauuucgccacaugcggacucgugggccugguuacguuucuucugcucugugggagauccugcaccacaucucuguauaaaggaguguacgaacugcagacccucgagcugaacauggaaacacuuaauaugaccaugccucugagcuguacaaagaacaauucccaucacuauauuauggucggcaacgagaccgggcucgagcugacgcuuaccaauacaucuaucaucaaccauaaauucugcaaucugagcgacgcgcacaagaaaaaccucuacaaucaugcucugauguccauuaucucuaccuuucaccugagcauuccgaacuucaaucaguaugaagccauguccugugauuuuaacggaggcaagaucagcgugcaguacaaucucucucacuccuaugccggcgacgcugccagccauugcgggacaguugcuaacggagugcugcaaaccuucaugcggauggccuggggcgggucuuacauugcgcuugauuccggauacggcaagugggacuguaucaugacgagcuaucaguaccugauuauccagaacacaaccugggaggaucacugccaguuuucucgccccuccccuaucggguaucucggacugcuuagccaaagaacacgggacauuuacaucucccgcagacugcucggcaccuucaccuggacacugucugauagcgaaggcaaagacacgcccgggggauauugucugacccgguggaugcucauugaggccgagcugaagugcuuuggcaauacagcugucgccaaauguaacgaaaagcaugaugaggaguucugcgacaugcuucgccuguuugauuucaauaaacaggcuauccagagacucaagaccgaagcccagauguccauucaacugaucaacaaggcggugaaugcccuuaucaacgaccagcugauuaugaaaaaucaccuccgggauaucauggggauuccuuacugcaacuauagcaaguacuguuaccugaaucacacaaccacgggaaaaacaucucugcccaagugcugucucguguccaacggcagcuaucugaaugaaacccauuucucugacgacaucgagcagcaagcugauaacaugauuaccgagaugcuucagaaagaauacauggagcgccaggggaagacaccucugggacucgucgaccuguuuguuuucagcaccuccuuuuaucugaucucuaucuuccuucaccucgugaaaauuccgacacauagacacaucgugggcaagagcugccccaagccucaucggcugaaucacaugggcauuuguuccugcgggcuguacaaacagcccggagucccugugcgcuggaagagaugaggacuaguuauaagacugacuagcccgaugggccucccaacgggcccuccuccccuccuugcaccgagauuaaucaaaggcucuuuucagagccaccaaaaaaaaaaaaaaaaaaaaaaaaaaaaaaaaaaaaaaaaaaaaaaaaaaaaaaaaaaaaaaaaaaaaaaaaaaaaaaaaaaaaaaaaaaaaaaaaaaaaa

SEQ ID NO: 39774 - RNA, 1689 nt, Artificial Sequence
  mRNA product Design i-3 (hSL-A100) comprising derived and/or modified sequence from LASV(G502-SLE-2009;Clade IV)__AIT17126__GPCmut11 (opt5)
aggagaaagcuuaccaugggccagaucgugaccuucuuucaagaggucccccacguuauugaagaggugaugaacaucgugcugauugcccucagcauccuggcuguccuuaaggggcuguacaauuucgccacaugcggacucgugggccugcuuacguuucugcuccugugugggagauccugcaccacaggacuguauaaaggcguuuacgaacuccagacccuggagcuuaacauggaaacacugaauaugaccaugccucucucuuguacaaagaacaauagccaucacuauauuaugguggggaacgagaccggacuggagcuuacgcugaccaauacauccaucaucaaccauaaauucugcaaucucucugacgcgcacaagaaaaaccuguacgaucaugcucugaugagcauuaucuccaccuuucaccucucuauuccgaauuucaaccaguaugaagccaugagcugugacuuuaauggcggcaagaucuccguccaguacaaccugagccacucuuaugccggggaugcugccgaccauugcggaacaguggcuaauggcguucuucaaaccuucaugcggauggccuggggaggguccuacauugcgcuggauagcggccgcgggagaugggacuguaucaugacgucuuaccaguaucucauuauccagaacacaaccugggaggaucacugccaguuuucccggcccagcccuaucggauaccugggccuucugucucaacgcacaagagacauuuauaucucccggcgccuccugggcaccuucaccuggacacugagcgauuccgaagggaaggacacgcccggaggcuacugucucaccagauggaugcugauugaggccgagcuuaaaugcuuugggaacacagcuguggccaaguguaaugaaaaacaugaugaggaguucugcgacaugcugcggcucuuugauuucaacaagcaggcuauccagcgccugaaagccgaagcgcagaugucuauucaacuuaucaauaaggccgucaacgcucugaucaaugaccagcucgugaugaagaaccaccugagagacauuaugggaaucccuuauugcaauuacagccgguauuguuaccugaaccacaccacaaccggccgcacgucccuccccaaaugcugucuggugagcaaugggucuuaccuuaacgaaacacauuucuccgaugacauugagcagcaagccgauaauaugaucaccgagaugcugcagaaggaauauauggagagacagggaaaaaccccucucggccuggucgaccuguuuguuuucagcacaucuuuuuaccuuauuagcaucuuccuccaccuggugaagaucccgacccaucggcacauugugggcaaauccugccccaagccucaucgccugaaccacauggggaucuguucuugcggacucuauaaacagcccggcgucccugugaaguggaagagaugaggacuaguuauaagacugacuagcccgaugggccucccaacgggcccuccuccccuccuugcaccgagauuaaucaaaggcucuuuucagagccaccaaaaaaaaaaaaaaaaaaaaaaaaaaaaaaaaaaaaaaaaaaaaaaaaaaaaaaaaaaaaaaaaaaaaaaaaaaaaaaaaaaaaaaaaaaaaaaaaaaaaa

SEQ ID NO: 39775 - RNA, 1689 nt, Artificial Sequence
  mRNA product Design i-3 (hSL-A100) comprising derived and/or modified sequence from LASV(G733-SLE-2010;Clade IV)__AIT17154__GPCmut11 (opt5)
aggagaaagcuuaccaugggccagaucgugaccuucuuucaagaggucccccacguuauugaagaggugaugaacaucgugcugauugcccucagcauccuggcuguccuuaaggggcuguacaauuucgccacaugcggaauugugggccucguuuccuuucugcuucugugugggagaucuugcacgaccagccucuauaaaggaguguacgaacugcagacacuggagcucaacauggaaacccugaauaugacaaugccucuuuccuguaccaagaacaauucucaucacuauaucauggucggcaacgagacagggcuggagcucacccugacgaauaccagcaucauuaaccauaaauucugcaaucuuuccgacgcgcacaagaaaaaccuguacgaucaugcucucaugucuaucauuagcacauuucaccuguccaucccgaauuucaaccaguaugaagccaugagcugugacuuuaauggaggcaagauuucugugcaguacaaccugucccacagcuaugccggcgaugcugccaaucauugcgggaccaucgcuaacggaguucuccaaacauucaugcggauggccuggggcgggucuuacauugcgcuggacuccggacgcgauagaugggacuguaucaugaccagcuaccaguaucuuaucauucagaacacgacaugggaggaucacugccaguuuucucggcccuccccuaucggcuaccuggggcuccugagccaacgcaccagagacauuuauaucucccggcgccuucugggaacauucaccuggacccucucugauagcgaaggcaaggacacacccggcggguacugucugacgagauggaugcugauugaggccgagcucaaaugcuuuggaaauaccgcuguggccaaguguaacgaaaaacaugaugaggaguucugcgacaugcugcggcuuuuugauuucaauaagcaggcuauccagcgccugaaagccgaagcgcagauguccauccaacucauuaacaaggccgucaaugcucugaucaacgaccagcuuauuaugaagaaucaccugagagacaucaugggcauuccuuauugcaacuacagcaaauauuguuaccucaaucacacaaccacagggaagaccucucugcccaaaugcugucugguguccaacggaagcuaccucaaugaaacgcauuucucugaugacaucgagcagcaagccgauaacaugaucacagagaugcugcagaaggaauauauggagcggcagggcaaaaccccucuugggcugguggaccucuuugucuucagcaccuccuuuuaccugauuucuaucuuccugcaccuuguuaagauuccgacacaucgccacguggugggaaaaagcugccccaagccucauagacucaaucacaugggcaucuguuccugcggccuguaugggcagcccggagucccugugaaguggaaacggugaggacuaguuauaagacugacuagcccgaugggccucccaacgggcccuccuccccuccuugcaccgagauuaaucaaaggcucuuuucagagccaccaaaaaaaaaaaaaaaaaaaaaaaaaaaaaaaaaaaaaaaaaaaaaaaaaaaaaaaaaaaaaaaaaaaaaaaaaaaaaaaaaaaaaaaaaaaaaaaaaaaaa

SEQ ID NO: 39776 - RNA, 1689 nt, Artificial Sequence
  mRNA product Design i-3 (hSL-A100) comprising derived and/or modified sequence from MOPV/LASV reassortant(IGS-1;Clade IV)__AFY05576__GPCmut11 (opt5)
aggagaaagcuuaccaugggccagaucgugaccuucuuucaagaggucccccacguuauugaagaggugaugaacaucgugcugauugcccucagcguccuggcugugcuuaaggggcuguacaauuucgccacaugcggacucguuggccuggugacguuucuucugcucugugggagauccugcaccacaucucuguauaaaggagucuacgaacugcagacccucgagcugaacauggaaacacuuaauaugaccaugccucugagcuguacaaagaacaauucccaucacuauaucauggugggcaacgagaccgggcucgagcugacgcuuaccaauacaucuauuaucaaccauaaauucugcaaucugagcgacgcgcacaagaaaaaccucuacgaucaugcucugauguccaucauuucuaccuuucaccugagcaucccgaauuucaaccaguaugaagccauguccugugacuuuaauggaggcaagauuagcguucaguacaaccucucucacuccuaugccggcgaugcugccaaucauugcgggacaguggcuaacggaguccugcaaaccuucaugcggauggccuggggcgggagcuacaucgcgcuugacucuggacgcggcaacugggauuguauuaugacguccuaccaguaucugaucauucagaauacaaccugggaggaccacugccaguuuagcagacccucuccuaucggguaccucggacugcuuucccaacggacacgcgauaucuauauuagcagacggcugcucggcaccuucaccuggacacuguccgacucugaaggcgaggauacgcccgggggauacugucugacccgcuggaugcucaucgaggccgaacugaagugcuuuggcaacacagcuguggccaaauguaaugagaagcaugacgaagaguucugcgauaugcuuagacuguuugacuucaacaaacaggcuauucagcggcucaaggccgaagcgcagaugagcauccaacugauuaauaaagccgugaacgcucuuaucaaugaucagcugaucaugaagaaccaccuccgcgacauuauggggaucccuuauugcaauuacuccaaguauuguuaccugaaccacaccacaaccggaagaacgagccugcccaaaugcugucucgucucuaauggcuccuaccugaacgagacacauuucagcgacgauauugagcagcaagccgacaauaugaucaccgaaaugcuucagaaggaguauauggaacggcaggggaaaaccccucugggacucguugaucuguuuguguucucuaccagcuuuuaccugauuuccaucuuccuucaccucgugaagaucccgacacaucgccacauugucggcaaaucuugccccaagccucauagacugaaccacaugggcaucuguagcugcgggcuguauaaacagcccggagugccuguuaaguggaagcggugaggacuaguuauaagacugacuagcccgaugggccucccaacgggcccuccuccccuccuugcaccgagauuaaucaaaggcucuuuucagagccaccaaaaaaaaaaaaaaaaaaaaaaaaaaaaaaaaaaaaaaaaaaaaaaaaaaaaaaaaaaaaaaaaaaaaaaaaaaaaaaaaaaaaaaaaaaaaaaaaaaaaa

SEQ ID NO: 39777 - RNA, 1689 nt, Artificial Sequence
  mRNA product Design i-3 (hSL-A100) comprising derived and/or modified sequence from LASV(LM765-SLE-2012;Clade IV)__AIT17814__GPCmut11 (opt5)
aggagaaagcuuaccaugggccagaucgugaccuucuuucaagaggucccccacguuauugaagaggugaugaacaucgugcugauugcccucagcauccuggcuguccuuaaggggcuguacaauuucgccacaugcggacucgugggccugguuacguuucuucugcucugugggagauccugcaccacaucucuguauaaaggaguguacgaacugcagacccucgagcugaacauggaaacacuuaauaugaccaugccucugagcuguacaaagaacaauucccaucacuauauuauggucggcaacgagaccgggcucgagcugacgcuuaccaauacaucuaucaucgaccauaaauucugcaaccugagcgaugcgcaccggaagaaucucuacgaccaugcucugauguccauuaucucuaccuuucaccugagcauuccgaacuucaaucaguaugaagccauguccugugauuuuaacggaggcaaaaucagcgugcaguacaaucucucucacuccuaugccaaggacgcugccgaucauugcggcacaguugcuaacggggugcugcaaaccuucaugcgcauggccuggggaggcagcuacauugcgcuugacucugggagaggacggugggauuguaucaugacguccuaccaguaucugauuauccagaauacaaccugggaggaccacugccaguuuagccgccccucuccuaucggcuaccucgggcugcuuucccaaagaacacgggauauuuauaucagccgcagacugcucggaaccuucaccuggacacuguccgacucugaaggcaaggauacgcccggcggguacugucugacccgguggaugcucauugaggccgagcugaaaugcuuuggaaacacagcugucgccaaguguaacgaaaaacaugacgaggaguucugcgauaugcuucgccuguuugacuucaauaagcaggcuauccagagacucaaagccgaagcgcagaugagcauucaacugaucaacaaggccgugaaugcucuuaucaacgaccagcugauuaugaagaaucaccuccgggauaucaugggcauuccuuauugcaacuacuccaaauauuguuaccugaaucacaccacaaccgggaagacgagccugcccaaaugcugucucgugucuaacggauccuaccugaaugaaacacauuucagcgacgauaucgagcagcaagccgacaacaugauuaccgagaugcuucagaaggaauauauggagcgccagggcaaaaccccucuggggcucgucgaucuguuuguuuucucuaccagcuuuuaccugaucuccaucuuccuucaccucgugaagauuccgacacauagacacaucgugggaaaacccugcccuaagccccaucggcugaaucacaugggcauuuguucuugcggccuguauaagcagccugggguccccgugaaauggaagcgcugaggacuaguuauaagacugacuagcccgaugggccucccaacgggcccuccuccccuccuugcaccgagauuaaucaaaggcucuuuucagagccaccaaaaaaaaaaaaaaaaaaaaaaaaaaaaaaaaaaaaaaaaaaaaaaaaaaaaaaaaaaaaaaaaaaaaaaaaaaaaaaaaaaaaaaaaaaaaaaaaaaaaa

SEQ ID NO: 39778 - RNA, 1689 nt, Artificial Sequence
  mRNA product Design i-3 (hSL-A100) comprising derived and/or modified sequence from LASV(LM776-SLE-2012;Clade IV)__AIT17824__GPCmut11 (opt5)
aggagaaagcuuaccaugggccagaucgugaccuucuuucaagaggucccccacguuauugaagaggugaugaacaucgugcugauugcccucagcauccuggcuguccuuaaggggcuguacaauuucgccacaugcggacucgugggccugguuacguuucuucugcucugugggagauccugcaccacaucuguguauaaaggagucuacgaacugcagacccuggagcucaacauggaaacacugaauaugaccaugccucuuagcuguacaaagaacaauucccaucacuauauuauggugggcaacgagaccgggcuggagcucacgcugaccaauacaucuaucaucaaccauaaauucugcaaucuuagcgacgcgcacaagaaaaaccuguacgaucaugcucucauguccauuaucucuaccuuucaccugagcauuccgaauuucaaccaguaugaagccauguccugugacuuuaauggaggcaagaucagcguucaguacaaccugucucacuccuaugccggcgaugcugccaaucauugcgggacaguggcuaacggaguccuccaaaccuucaugcggauggccuggggcgggagcuacauugcgcuggacucuggacacggcaagugggauuguaucaugacguccuaccaguaucuuauuauccagaacacaaccugggaggaccauugccaguuuagccgccccucuccuaucggguaccugggacuccugucccaaagaacacgggauauuuauaucagccgcagacuucugggcaccuucaccuggacacucuccgacucugaaggcaaagauacgcccgggggauacugucugacccgguggaugcugauugaggccgagcucaagugcuuuggcaauacagcuguggccaaauguaacgaaaagcacgacgaggaguucugcgauaugcugcgccuuuuugacuucaauaaacaggcuauccagagacugaaggccgaagcgcagaugagcauucaacucaucaacaaggccgugaaugcucugaucaacgaucagcuuauuaugaaaaaucaucugcgggacaucauggggauuccuuauugcaacuacuccaaguauuguuaccucaaucacaccacaaccggaaaaacgagccugcccaagugcugucuggucucuaacggcuccuaccucaaugaaacacacuucagcgacgauaucgagcagcaagccgacaacaugauuaccgagaugcugcagaaagaauauauggagcgccaggggaagaccccucuuggacugguugaucucuuuguguucucuaccagcuuuuaccugaucuccaucuuccugcaucuugugaaaauuccgacacacagacauaucgucggcaagucuugccccaagccucaccggcucaaucacaugggcauuuguagcugcgggcuguauaaacagcccggagugccuguucgcuggaagagaugaggacuaguuauaagacugacuagcccgaugggccucccaacgggcccuccuccccuccuugcaccgagauuaaucaaaggcucuuuucagagccaccaaaaaaaaaaaaaaaaaaaaaaaaaaaaaaaaaaaaaaaaaaaaaaaaaaaaaaaaaaaaaaaaaaaaaaaaaaaaaaaaaaaaaaaaaaaaaaaaaaaaa

SEQ ID NO: 39779 - RNA, 1689 nt, Artificial Sequence
  mRNA product Design i-3 (hSL-A100) comprising derived and/or modified sequence from LASV(Mad39;Clade IV)__ANH09722__GPCmut11 (opt5)
aggagaaagcuuaccaugggccagaucgugaccuucuuucaagaggucccccacguuauugaagaggugaugaacaucgugcugauugcccucagcauccuggcuguccuuaaggggcuguacaauguggccacaugcggacucauuggccugguuacguuccuucugcucugugggagauccugcaccacaacccuguauaaaggaguguacgaacugcaggcgcucgagcugaacauggaaacacuuaauaugaccaugccucugucuuguacaaagaacaauagccaucacuauauccgggucggcaacgagaccgggcucgagcugacgcuuaccaauacaucccugaucaaccauaaauuuugcaaucucucugacgcucacaagaaaaaccuguacgaucaugcccugaugagcauuaucuccaccuuccaccucucuauuccgaauuuuaaccaguaugaagccaugagcugugacuucaaugauggaaagaucuccgugcaguacaaccugagccacacauaugcuggcgacaccgccaaucauugcggcacgguugcuaacggggugcuucaaacauuuaugcgcauggccuggggaggcucuuacauugcgcuggauuccgggagaggaggcugggacuguaucaugaccagcuaccaguaucucauuauccagaacacaaccugggaggaucacugccaguucucucggcccuccccuaucggguaccugggacuucugagccaacgcaccagagacauuuauaucucucggcgccuccugggcacauuuacguggacccuguccgauagcgaaggcaaggacacacccgggggauacugucucaccagauggaugcugauugaggccgagcuuaaaugcuucggcaauacagcugucgccaaguguaacgaaaaacaugaugaggaauuuugcgacaugcugcgccucuucgauuuuaauaagcaggcuauccagcggcugaaagccgaggcgcagauguccauucaacuuaucaacaaggccgugaaugcucugaucaacgaccagcucauuaugaagaaucaccugagagacaucauggggauuccuuauugcaacuacucuaaauauuguuaccugaaucacaccgugacgggaaagacaagccuccccaaaugcugucuggucuccaacggcagcuaccuuaaugaaacccauuucucugaugacaucgagcagcaagccgauaacaugauuaccgagaugcugcagaaggaauauauggagcggcaggggaaaacaccucucggacugguugaccuguucguguuuuccaccagcuucuaccuuaucucuaucuuucuccaccuggugaagauuccgacacaucgccacgucgugggcaaacccugcccuaagccccauagacugaaucacaugggcaucuguagcugcggguucuauaagcagccuggaguucccgugcgguggaaacgcugaggacuaguuauaagacugacuagcccgaugggccucccaacgggcccuccuccccuccuugcaccgagauuaaucaaaggcucuuuucagagccaccaaaaaaaaaaaaaaaaaaaaaaaaaaaaaaaaaaaaaaaaaaaaaaaaaaaaaaaaaaaaaaaaaaaaaaaaaaaaaaaaaaaaaaaaaaaaaaaaaaaaa

SEQ ID NO: 39780 - RNA, 1689 nt, Artificial Sequence
  mRNA product Design i-3 (hSL-A100) comprising derived and/or modified sequence from LASV(Z0947-SLE-2011;Clade IV)__AIT17840__GPCmut11 (opt5)
aggagaaagcuuaccaugggccagaucgugaccuucuuucaagaggucccccacguuauugaagaggugaugaacaucgugcugauugcccucagcauccuggcuguccuuaaggggcuguacaauuucgccacaugcggacucgugggccugguuacguuucuucugcucugugggagauccugcaccauuucucuguauaaaggaguguacgaacugcagacacucgagcugaacauggaaacccuuaauaugacaaugccucugagcuguaccaagaacaauucccaucacuauaucauggucggcaacgagacagggcucgagcugacccuuacgaauaccucuaucauuaaccauaaauucugcaaucugagcgacgcgcacaagaaaaaccucuacgaucaugcucugauguccaucauuucuacauuucaccugagcaucccgaauuucaaccaguaugaagccauguccugugacuuuaauggaggcaagauuagcgugcaguacaaccucucucacuccuaugccggcgaugcugccaaucauugcgggaccguugcuaacggagugcugcaaacauucaugcggauggccuggggcgggagcuacaucgcgcuugacucuggacgcgauagaugggacuguauuaugaccuccuaccaguaucugaucauccagaacacgacaugggaggaucacugccaguuuagccggcccucuccuauuggcuaccucgggcugcuuucccaacgcaccagagacaucuauauuagccggcgccugcucggaacauucaccuggacccuguccgauucugaaggcaaggacacacccggcggguacugucugacgagauggaugcucaucgaggccgagcugaaaugcuuuggaaauaccgcugucgccaaguguaacgaaaaacaugaugaggaguucugcgacaugcuucggcuguuugauuucaauaagcaggcuauucagcgccucaaagccgaagcgcagaugagcauccaacugaucaacaaggccgugaaugcucuuauuaacgaccagcugaucaugaagaaucaccucagagacauuaugggcaucccuuauugcaacuacuccaaauauuguuaccugaaucacacaaccacagggaagaccagccugcccaaaugcugucucgugucuaacggauccuaccugaaugaaacgcauuucagcgaugacauugagcagcaagccgauaacaugaucacagagaugcuucagaaggaauauauggagcggcagggcaaaaccccucuggggcucgucgaccuguuuguuuucucuaccagcuuuuaccugaucuccauuuuccuucaccucgugaagaucccgacacaucgccacauugugggaaaacccugcccuaagccccauagacugaaucacaugggcaucuguucuugcggccuguauaagcagccugggguccccgugaaauggaagcggugaggacuaguuauaagacugacuagcccgaugggccucccaacgggcccuccuccccuccuugcaccgagauuaaucaaaggcucuuuucagagccaccaaaaaaaaaaaaaaaaaaaaaaaaaaaaaaaaaaaaaaaaaaaaaaaaaaaaaaaaaaaaaaaaaaaaaaaaaaaaaaaaaaaaaaaaaaaaaaaaaaaaa

SEQ ID NO: 39781 - RNA, 1665 nt, Artificial Sequence
  mRNA product Design i-3 (A100) comprising derived and/or modified sequence from LASV(Josiah;Clade IV)__NP_694870__GPCmut11 (opt1)
aggagaaagcuuaccaugggccagaucgugaccuucuuccaggaggucccccacgugaucgaggaggugaugaacaucguccugaucgcccucagcgugcuggccgugcugaaggggcucuacaacuucgcgaccugcggccuggucgggcuggugacguuccuccugcugugcggccgcuccugcaccaccagccucuacaaggggguguacgagcugcagacccuggagcucaacauggagacgcugaacaugaccaugccgcuguccugcaccaagaacaacagccaccacuacaucauggucggcaacgagaccggccucgagcugacgcugaccaacaccuccaucaucaaccacaaguucugcaaccucagcgacgcccacaagaagaaccuguacgaccacgcccugauguccaucaucagcaccuuccaccucuccauccccaacuucaaccaguacgaggccaugagcugcgacuucaacgggggcaagaucuccgugcaguacaaccugagccacuccuacgccggggacgcggccaaccacugcggcacgguggccaacgggguccugcagaccuucaugcggauggccuggggcggcagcuacaucgcgcucgacuccgggcgcggcaacugggacugcaucaugaccagcuaccaguaccugaucauccagaacaccacgugggaggaccacugccaguucucccggcccagccccaucggguaccugggccuccugucccagcgcacccgggacaucuacaucagccgccggcugcucggcaccuucaccuggacgcugagcgacuccgaggggaaggacaccccgggcggguacugccugacccgcuggaugcucaucgaggccgagcugaagugcuucggcaacaccgccguggccaagugcaacgagaagcacgacgaggaguucugcgacaugcugcggcuguucgacuucaacaagcaggccauccagcgccugaaggcggaggcccagaugagcauccagcugaucaacaaggccgugaacgcccucaucaacgaccagcugaucaugaagaaccaccuccgggacaucauggggauccccuacugcaacuacuccaaguacugcuaccucaaccacacgaccaccggccgcaccagccugcccaagugcugccuggucuccaacggcagcuaccucaacgagacgcacuucuccgacgacaucgagcagcaggccgacaacaugaucaccgagaugcugcagaaggaguacauggagcggcaggggaagacgccccugggccucguggaccuguucguguucagcaccuccuucuaccugaucagcaucuuccugcaccucgucaagaucccgacccaccgccacaucguggggaaguccugccccaagccccaccggcugaaccacaugggcaucugcagcugcgggcuguacaagcagcccggcgugccggucaaguggaagcgcugaggacuaguuauaagacugacuagcccgaugggccucccaacgggcccuccuccccuccuugcaccgagauuaauaaaaaaaaaaaaaaaaaaaaaaaaaaaaaaaaaaaaaaaaaaaaaaaaaaaaaaaaaaaaaaaaaaaaaaaaaaaaaaaaaaaaaaaaaaaaaaaaaaaa

SEQ ID NO: 39782 - RNA, 1662 nt, Artificial Sequence
  mRNA product Design i-3 (A100) comprising derived and/or modified sequence from LASV(LP;Clade I)__AAF86701__GPCmut11 (opt1)
aggagaaagcuuaccaugggccagaucaucaccuucuuccaggaggugccccacgucaucgaggaggugaugaacaucgugcugaucgcccucagccugcuggccauccucaaggggcuguacaacaucgcgaccugcggcaucaucgggcuggucgccuuccucuuccugugcggcaaguccugcagccugacgcucaagggcggguacgagcugcagacccuggagcucaacauggagacccugaacaugaccaugccgcuguccugcacgaagaacagcucccaccacuacauccgcgugggcaacgagaccgggcucgagcugacccugaccaacacgagcaucaucaaccacaaguucugcaaccucuccgacgcccacaagaagaaccuguacgaccacgcccugaugagcaucaucuccaccuuccaccucagcauccccaacuucaaccaguacgaggccauguccugcgacuucaacggcgggaagaucagcgugcaguacaaccugucccacagcuacgcgggcgacgccgccgagcacugcgggaccgucgccaacggcgugcugcagaccuucaugcggauggcguggggcgggcgcuacaucgcccucgacuccggcaaggggaacugggacugcaucaugacgagcuaccaguaccugaucauccagaacaccaccugggaggaccacugccaguucucccggcccagccccaucggcuaccugggccuccugucccagcgcacccgggacaucuacaucagccgccggcugcucgggacguucaccuggacccugagcgacuccgagggcaacgagacccccgggggcuacugccugacgcgcuggaugcucaucgaggccgagcugaagugcuucgggaacaccgccguggccaagugcaacgagaagcacgacgaggaguucugcgacaugcugcggcuguucgacuucaacaagcaggcgauccgccggcugaaggccgaggcccagaugagcauccagcugaucaacaaggccgucaacgcccucaucaacgaccagcugaucaugaagaaccaccuccgcgacaucaugggcauccccuacugcaacuacuccaaguacugcuaccucaaccacaccagcuccggccggaccagccugcccaagugcugccugaucuccaacgggagcuaccucaacgagacgcaguucuccgacgacaucgagcagcaggcggacaacaugaucaccgagaugcugcagaaggaguacaucgagcgccagggcaagaccccgcuggggcucguggacaucuucaucuucagcaccuccuucuaccugaucagcaucuuccugcaccugaucaagaucccgacgcaccggcacaucgugggcaagcccugccccaagccccaccgccucaaccacaugggggucugcuccugcggccuguacaagcacccgggcgugcccaccaaguggaagcggugaggacuaguuauaagacugacuagcccgaugggccucccaacgggcccuccuccccuccuugcaccgagauuaauaaaaaaaaaaaaaaaaaaaaaaaaaaaaaaaaaaaaaaaaaaaaaaaaaaaaaaaaaaaaaaaaaaaaaaaaaaaaaaaaaaaaaaaaaaaaaaaaaaaa

SEQ ID NO: 39783 - RNA, 1662 nt, Artificial Sequence
  mRNA product Design i-3 (A100) comprising derived and/or modified sequence from LASV(803213;Clade II)__AAF86703__GPCmut11 (opt1)
aggagaaagcuuaccaugggccagaucaucaccuucuuccaggaggugccccacgucaucgaggaggugaugaacaucgugcugaucgcccucagccugcuggccauccucaaggggaucuacaacgucgcgaccugcggccuguucgggcugaucuccuuccuccugcugugcggccgcagcugcuccgugacguacaaggggguguacgagcuccagacccuggagcugaacauggccaaccucaacaugaccaugccgcugagcugcaccaagaacaacucccaccacuacaucauggucggcaacgagacgggccuggagcucacccugaccaacaccagcaucaucaaccacaaguucugcaaccuguccgacgcccacaagaagaaccucuacgaccacgcccugaugagcaucaucuccacguuccaccugagcauccccaacuucaaccaguacgaggccauguccugcgacuucaacgggggcaagaucagcgugcaguacaaccucucccacagcuucgcgguggacgccgccaaccacugcgggaccaucgccaacggcguccugcagaccuucaugcggauggcguggggcggguccuacaucgcccuggacagcggcaaggggaacugggacugcaucaugaccuccuaccaguaccucaucauccagaacacgaccugggaggaccacugccaguucagccgccccucccccaucggcuaccuggggcugcucagccagcggacccgcgacaucuacaucagccggcgccugcugggcaccuucacguggacccucuccgacagcgagggcaacgaggcccccgggggcuacugccugacccgguggaugcugaucgaggccgagcucaagugcuucgggaacaccgccguggcgaagugcaacgagaagcacgacgaggaguucugcgacaugcugcgccuguucgacuucaacaagcaggccaucaagcggcucaagacggaggcccagauguccauccagcugaucaacaaggccgugaacgcccugaucaacgaccagcucaucaugaagaaccaccuccgcgacaucaugggcauccccuacugcaacuacagccgguacugcuaccugaaccacaccgucaccgggaagaccucccugccccgcugcugccuggugagcaacggcuccuaccugaacgagacgcacuucagcgacgacaucgagcagcaggcggacaacaugaucaccgagaugcuccagaaggaguacauggaccggcagggcaagaccccgcuggggcugguggaccucuucgucuucuccaccagcuucuaccugaucuccaucuuccugcaccuggugaagaucccgacgcaccgccacaucgugggcaagcccugccccaagccccaccggcucaaccacauggggaucugcagcugcggccuguacaagcacccggggguccccgugaaguggaagcgcugaggacuaguuauaagacugacuagcccgaugggccucccaacgggcccuccuccccuccuugcaccgagauuaauaaaaaaaaaaaaaaaaaaaaaaaaaaaaaaaaaaaaaaaaaaaaaaaaaaaaaaaaaaaaaaaaaaaaaaaaaaaaaaaaaaaaaaaaaaaaaaaaaaaa

SEQ ID NO: 39784 - RNA, 1662 nt, Artificial Sequence
  mRNA product Design i-3 (A100) comprising derived and/or modified sequence from LASV(GA391;Clade III)__CAA36645__GPCmut11 (opt1)
aggagaaagcuuaccaugggccagaucgugaccuucuuccaggaggucccccacgugaucgaggaggugaugaacaucguccugaucgcccucagcauccuggccauccugaaggggcucuacaacguggcgaccugcggccugaucgggcuggugacguuccuccugcuguccggccgcagcugcucccucaucuacaaggggaccuacgagcugcagacccuggagcucaacauggagacccugaacaugacgaugccgcugagcugcaccaagaacaacucccaccacuacauccgggucggcaacgagaccggccucgagcugacccugacgaacaccagcauccucaaccacaaguucugcaaccuguccgacgcccacaagcgcaaccuguacgaccacagccucauguccaucaucagcaccuuccaccuguccauccccaacuucaaccaguacgaggccaugagcugcgacuucaacgggggcaagaucaccgugcaguacaaccugucccacagcuucgccguggacgccgcggggcacugcggcacgcucgccaacgggguccugcagaccuucaugcggauggccuggggcggcuccuacaucgcccuggacagcgggcgcggcaacugggacugcaucaugaccuccuaccaguaccucaucauccagaacaccacgugggacgaccacugccaguucagccggcccucccccaucggguaccugggccugcucagccagcgcacccgggacaucuacaucagccgccggcugcugggcaccuucaccuggacgcucuccgacagcgaggggaacgagaccccgggcggguacugccugacccgcuggaugcugaucgaggcggagcucaagugcuucggcaacaccgccguggccaagugcaacgagaagcacgacgaggaguucugcgacaugcugcggcuguucgacuucaacaagcaggccauccgccggcucaagacggaggcccagauguccauccagcugaucaacaaggcggugaacgcccugaucaacgaccagcucaucaugaagaaccaccuccgcgacaucauggggauccccuacugcaacuacagccgguacugcuaccugaaccacaccuccaccggcaagaccagccugccccgcugcugccugaucuccaacggcagcuaccugaacgagacgaaguucuccgacgacaucgagcagcaggccgacaacaugaucaccgagaugcuccagaaggaguacaucgaccggcaggggaagacgccccugggccuggucgaccuguucguguucagcaccuccuucuaccucaucagcaucuuccugcaccuggugaagaucccgacccaccgccacaucgucgggaagcccugccccaagccccaccggcucaaccacaugggcaucugcuccugcgggcuguacaagcagccgggcgugcccgugcgcuggaagcggugaggacuaguuauaagacugacuagcccgaugggccucccaacgggcccuccuccccuccuugcaccgagauuaauaaaaaaaaaaaaaaaaaaaaaaaaaaaaaaaaaaaaaaaaaaaaaaaaaaaaaaaaaaaaaaaaaaaaaaaaaaaaaaaaaaaaaaaaaaaaaaaaaaaa

SEQ ID NO: 39785 - RNA, 1665 nt, Artificial Sequence
  mRNA product Design i-3 (A100) comprising derived and/or modified sequence from LASV(AV;Clade V)__CCA30314__GPCmut11 (opt1)
aggagaaagcuuaccaugggccagaucgugaccuucuuccaggaggucccccacgugaucgaggaggugaugaacaucguccugaucgcccucagcauccuggccgugcugaaggggcucuacaacaucgcgaccugcggccugaucgggcugaucacguuccuccugcugugcggccgcuccugcagcuccaaccucuacaaggggguguacgagcugcagagccuggaccucaacauggagacccugaacaugaccaugccgcuguccugcaccaagaacaacagccaccacuacauccgggucggcaacgacacgggccucgagcugacccugaccaacaccuccauccucaaccacaaguucugcaaccugagcgacgcccacaagaaggaccuguacgaccacgcccucauguccaucaucagcacguuccaccuguccauccccaacuucaaccaguacgaggccaugagcugcgacuucaacgggggcaagaucuccgugcaguacaaccugagccacuccuacgccaucgacgcggccaaccacugcgggaccguggccaacggcauccuccagaccuucaugcgcauggccuggggcgggagcuacaucgcgcuggacuccggccgggggaacugggacugcaucaugaccagcuaccaguaccugaucauccagaacacgaccugggagaaccacugccaguucucccgccccagccccaucggcuaccucgggcugcugagccagcggacccgcgacaucuacaucucccggcgccuccugggcaccuucacguggacccugagcgacuccgagggcaacgccacccccgggggcuacugccucacccgguggaugcugaucgaggccgagcugaagugcuucgggaacacggccgucgccaagugcaacgagaagcacgacgaggaguucugcgacaugcuccgccuguucgacuucaacaagcaggcgaucagccggcugaaguccgaggcccagaugagcauccagcucaucaacaaggccgugaacgcccugaucaacgaccagcugaucaugaagaaccaccuccgcgacaucaugggcauccccuacugcaacuacuccaaguacugcuaccugaaccacaccaucaccgggaagaccagccugcccaagugcugccucguguccaacggcagcuaccugaacgagacgcacuucuccgacgacaucgagcagcaggccgacaacaugaucaccgagaugcugcagaaggaguacauggagcggcagggcaagaccccgcucgggcuggucgaccuguucguguucagcaccuccuucuaccugaucagcaucuuccuccgccuggugaagaucccgacgcaccggcacaucgucggcaagcccugccccaagccccaccgccugaaccacauggggaucugcuccugcggccucuacaagcagccgggggugcccgugcgguggaagcgcugaggacuaguuauaagacugacuagcccgaugggccucccaacgggcccuccuccccuccuugcaccgagauuaauaaaaaaaaaaaaaaaaaaaaaaaaaaaaaaaaaaaaaaaaaaaaaaaaaaaaaaaaaaaaaaaaaaaaaaaaaaaaaaaaaaaaaaaaaaaaaaaaaaaa

SEQ ID NO: 39786 - RNA, 1662 nt, Artificial Sequence
  mRNA product Design i-3 (A100) comprising derived and/or modified sequence from LASV(Togo/2016/7082;Clade VI)__AMR44577__GPCmut11 (opt1)
aggagaaagcuuaccaugggccagaucaucaccuucuuccaggaggugccccacgucaucgaggaggugaugaacaucgugcugaucgcccucagccugcuggccauccucaagggggucuacaacguggcgaccugcggcaucaucgggcuggugacguuccuguuccucugcggccgcuccugcagccugaucuacaagggguccuacgagcugcagacccucgagcugaacauggagacccugaacaugaccaugccgcucagcugcacgaagaacuccagccaccacuacauccgggucggcaacgagaccggccuggagcugacccucaccaacacguccaucaucaaccacaaguucugcaaccugagcgacgcccacaagcgcaaccuguacgaccacgcccucauguccauccugagcaccuuccaccuguccauccccaacuucaaccaguacgaggccaugagcugcgacuucaacgggggcaagaucuccgugcaguacaaccucagccacgccuacgcgguggacgccgccgagcacugcgggaccgucgccaacggcgugcugcagaccuucaugcggauggcguggggcggguccuacaucgcccuggacagcggccgcgggaacugggacugcaucaugacguccuaccaguaccucaucauccagaacaccaccugggaggaccacugccaguucagccggcccucccccaucggcuaccuggggcugcucagccagcgcacccgggacaucuacaucagccgccggcugcugggcacguucaccuggacccucuccgacagcgagggcaacgagacccccgggggcuacugccugacgcgcuggaugcugaucgaggccgagcucaagugcuucgggaacaccgccguggccaagugcaacgagaagcacgacgaggaguucugcgacaugcugcggcuguucgacuucaacaagcaggcgauccagcgccucaaguccgaggcccagaugagcauccagcugaucaacaaggccgucaacgcccugaucaacgaccagcucaucaugaagaaccaccuccgggacaugaugggcauccccuacugcaacuacuccaaguacugcuaccugaaccacaccagcuccgggcgcaccagccugcccaagugcugccugguguccaacggcagcuaccugaacgagacgcacuucuccgacgacaucgagcagcaggccgacaacaugaucaccgagaugcuccagaaggaguacaucgaccggcagggcaagaccccgcuggggcugguggaccucuucgucuucagcaccuccuucuaccugaucagcaucuuccugcaccugaucaagaucccgacgcaccgccacaucgugggcaagcccugccccaagccccaccggcucaaccacauggggaucugcuccugcggccuguacaagcagccgggggugcccacccgcuggaagcggugaggacuaguuauaagacugacuagcccgaugggccucccaacgggcccuccuccccuccuugcaccgagauuaauaaaaaaaaaaaaaaaaaaaaaaaaaaaaaaaaaaaaaaaaaaaaaaaaaaaaaaaaaaaaaaaaaaaaaaaaaaaaaaaaaaaaaaaaaaaaaaaaaaaa

SEQ ID NO: 39787 - RNA, 1662 nt, Artificial Sequence
  mRNA product Design i-3 (A100) comprising derived and/or modified sequence from LASV(KAK-428;Clade n.d. (VII))__ANH09740__GPCmut11 (opt1)
aggagaaagcuuaccaugggccagaucgugaccuucuuccaggaggucccccacgugaucgaggaggugaugaacaucguccugaucgcccucagccugcuggccauccucaaggggcuguacaacuucgcgaccugcggcgugaucgggcugaucacguuccuccugcugugcggccgcuccugcagcgccaccuacaaggggcaguacgagcuccagacccuggagcugaacauggagucccucaacaugaccaugccgcugagcugcacgaagaacaacucccaccacuacauccgggccggcaacaacaccggccuggagcucacccugaccaacacgagcaucaucucccacaaguucugcaaccugagcgacgcccacaagaagaaccucuacgaccacacccugauguccaucaucaccaccuuccaccugagcauccccaacuucaaccaguacgaggccauguccugcgacuucaacgggggcaagaucagcauccaguacaaccucucccacagcuacgcgggggacgccgcccagcacugcggcacgguggccaacgggguccugcagaccuucaugcgcauggcguggggcggcuccuaccuggcccucgacagcgggcggcgcggcugggacugcaucaucuccagcuaccaguaccugaucauccagaacaccaccugggacgaccacugccaguucucccggcccagccccaucggguaccugggcuucgugagccagaagacgcgcgacaucuacaucucccggcgccuccugggcaccuucaccuggacccugagcgacuccgaggggcacgacaugccgggcggguacugccucacgcgguggaugcugaucgaggccgaccugaagugcuucggcaacaccgccguggccaagugcaacgagaagcacgacgaggaguucugcgacauguggcgccucuucgacuucaacaagcaggcgauccagcggcugaaggccgaggcccagaugaacauccagcugaucaacaaggccgucaacgcccucaucaacgaccagcugaugaugaagaaccaccuccgcgacaucauggggauccccuacugcaacuacagcaaguucugcuaccugaacaacaccaccacgggccggaccucccugccccgcugcugccugaucagcaacggcuccuaccucaacgagacccacuucagcgacgacaucgagcagcaggcggacaacaugaucaccgagaugcugcagaaggaguacauggaccggcaggggaagacgccccugggccucguggaccuguucguguucuccaccagcuucuaccugaucaccaucuuccuccaccuggucaagaucccgacccaccgccacaucguggggaagcccugccccaagccccaccggcugaaccacaugggcaucugcuccugcgggcuguacaagcagccgggcgugcccguccgcuggaagcggugaggacuaguuauaagacugacuagcccgaugggccucccaacgggcccuccuccccuccuugcaccgagauuaauaaaaaaaaaaaaaaaaaaaaaaaaaaaaaaaaaaaaaaaaaaaaaaaaaaaaaaaaaaaaaaaaaaaaaaaaaaaaaaaaaaaaaaaaaaaaaaaaaaaa

SEQ ID NO: 39788 - RNA, 1662 nt, Artificial Sequence; identical to SEQ ID NO: 39782
  mRNA product Design i-3 (A100) comprising derived and/or modified sequence from LASV(Pinneo-NIG-1969;Clade I)__AIT17836__GPCmut11 (opt1)

SEQ ID NO: 39789 - RNA, 1662 nt, Artificial Sequence
  mRNA product Design i-3 (A100) comprising derived and/or modified sequence from LASV(ISTH0009-NIG-2011;Clade II)__AIT17404__GPCmut11 (opt1)
aggagaaagcuuaccaugggccagaucaucaccuucuuccaggaggugccccacgucaucgaggaggugaugaacaucgugcugaucgcccucagccugcuggccauccucaaggggaucuacaacgucgcgaccugcggccuguucgggcugguguccuuccuccugcugugcggccgcagcugcuccacgaccuacaaggggguguacgagcuccagacccuggagcuggacauggccagccucaacaugaccaugccgcuguccugcacgaagaacaacagccaccacuacaucauggucggcaacgagaccggccuggagcucacccugaccaacacguccaucaucaaccacaaguucugcaaccugagcgacgcccacaagaagaaccucuacgaccacgcccugauguccaucaucagcaccuuccaccuguccauccccaacuucaaccaguacgaggccaugagcugcgacuucaacgggggcaagaucuccgugcaguacaaccucagccacgcguacgccguggacgccgccaaccacugcgggaccaucgcgaacggcguccugcagaccuucaugcggauggccuggggcggguccuacaucgcccuggacagcggcaagggguccugggacugcaucaugacgagcuaccaguaccucaucauccagaacaccaccugggaggaccacugccaguucucccgccccagccccaucggcuaccuggggcugcucagccagcggacccgcgacaucuacaucucccggcgccugcugggcacguucaccuggacccucagcgacuccgagggcaacgagacccccgggggcuacugccugacgcgguggaugcugaucgaggccgagcucaagugcuucgggaacaccgccguggcgaagugcaacgagaagcacgacgaggaguucugcgacaugcugcgccuguucgacuucaacaagcaggccauccggcgccucaagaccgaggcccagaugagcauccagcugaucaacaaggccgugaacgcccugaucaacgaccagcucaucaugaagaaccaccuccgggacaucaugggcaucccguacugcaacuacuccaaguacugcuaccugaaccacaccgucacggggaagaccagccugccccgcugcugccugguguccaacggcagcuaccugaacgagacccacuucuccgacgacaucgagcagcaggcggacaacaugaucaccgagcuccugcagaaggaguacauggaccggcagggcaagacgccccuggggcucguggaccuguucgucuucagcaccuccuucuaccugaucagcaucuuccugcaccucaucaagaucccgacccaccgccacaucaccggcaagcccugccccaagccccaccggcugaaccacauggggaucugcuccugcggccuguacaagcacccgggggugcccgugaaguggaagcgcugaggacuaguuauaagacugacuagcccgaugggccucccaacgggcccuccuccccuccuugcaccgagauuaauaaaaaaaaaaaaaaaaaaaaaaaaaaaaaaaaaaaaaaaaaaaaaaaaaaaaaaaaaaaaaaaaaaaaaaaaaaaaaaaaaaaaaaaaaaaaaaaaaaaa

SEQ ID NO: 39790 - RNA, 1662 nt, Artificial Sequence
  mRNA product Design i-3 (A100) comprising derived and/or modified sequence from LASV(ISTH2010-NIG-2012;Clade II)__AIT17482__GPCmut11 (opt1)
aggagaaagcuuaccaugggccagaucaucaccuucuuccaggaggugccccacgucaucgaggaggugaugaacaucgugcugaucgcccucagccugcuggccauccucaaggggaucuacaacgucgcgaccugcggccuguucgggcugguguccuuccuccugcugugcggccgcagcugcuccacgaccuacaaggggguguacgagcuccagacccuggagcuggacauggccagccucaacaugaccaugccgcuguccugcacgaagaacaacagccaccacuacaucauggucggcaacgagaccggccuggagcucacccugaccaacacguccaucaucaaccacaaguucugcaaccugagcgacgcccacaagaagaaccucuacgaccacgcccugauguccaucaucagcaccuuccaccuguccauccccaacuucaaccaguacgaggccaugagcugcgacuucaacgggggcaagaucuccgugcaguacaaccucagccacgcguacgccguggacgccgccaaccacugcgggaccaucgcgaacggcguccugcagaccuucaugcggauggccuggggcggguccuacaucgcccuggacagcggcaagggguccugggacugcaucaugacgagcuaccaguaccucaucauccagaacaucaccugggaggaccacugccaguucucccgccccagccccaucggcuaccuggggcugcucagccagcggacccgcgacaucuacaucucccggcgccugcugggcaccuucacguggacccucagcgacuccgagggcaacgagacccccgggggcuacugccugacccgguggaugcugaucgaggccgagcucaagugcuucgggaacacggccguggcgaagugcaacgagaagcacgacgaggaguucugcgacaugcugcgccuguucgacuucaacaagcaggccauccggcgccucaagaccgaggcccagaugagcauccagcugaucaacaaggccgugaacgcccugaucaacgaccagcucaucaugaagaaccaccuccgggacaucaugggcauccccuacugcaacuacuccaaguacugcuaccugaaccacaccgucaccgggaagacgagccugccccgcugcugccugguguccaacggcagcuaccugaacgagacccacuucuccgacgacaucgagcagcaggcggacaacaugaucaccgagcuccugcagaaggaguacaucgaccggcagggcaagaccccgcuggggcucguggaccuguucgucuucagcacguccuucuaccugaucagcaucuuccugcaccucgugaagaucccgacccaccgccacguggucggcaagcccugccccaagccccaccggcugaaccacauggggaucugcuccugcggccuguacaagcacccgggggugcccgugaaguggaagcgcugaggacuaguuauaagacugacuagcccgaugggccucccaacgggcccuccuccccuccuugcaccgagauuaauaaaaaaaaaaaaaaaaaaaaaaaaaaaaaaaaaaaaaaaaaaaaaaaaaaaaaaaaaaaaaaaaaaaaaaaaaaaaaaaaaaaaaaaaaaaaaaaaaaaa

SEQ ID NO: 39791 - RNA, 1662 nt, Artificial Sequence
  mRNA product Design i-3 (A100) comprising derived and/or modified sequence from LASV(Lassa virus/H.sapiens-wt/NGA/2015/ISTH_0543;Clade II)__AVO03639__GPCmut11 (opt1)
aggagaaagcuuaccaugggccagaucaucaccuucuuccaggaggugccccacgucaucgaggaggugaugaacaucgugcugaucgcccucagccugcuggccauccucaaggggaucuacaacgucgcgaccugcggccuguucgggcugguguccuuccuccugcugugcggccgcagcugcuccacgaccuacaaggggguguacgagcuccagacccuggagcuggacauggccaaccucaacaugaccaugccgcugagcugcacgaagaacaacucccaccacuacaucauggucggcaacgagaccggccuggagcucacccugaccaacacgagcaucaucaaccacaaguucugcaaccuguccgacgcccacaagaagaaccucuacgaccacgcccugaugagcaucaucuccaccuuccaccugagcauccccaacuucaaccaguacgaggccauguccugcgacuucaacgggggcaagaucagcgugcaguacaaccucucccacaccuacgcgguggacgccgccaaccacugcgggaccaucgccaacggcguccugcagacguucaugcggauggcguggggcgggagcuacaucgcccuggacuccggcaaggggagcugggacugcaucaugaccuccuaccaguaccucgugauccagaacaccaccugggaggaccacugccaguucagccgccccucccccaucggcuaccuggggcugcucagccagcggacgcgcgacaucuacaucagccggcgccugcugggcaccuucaccuggacccucuccgacagcgagggcaacgagacgcccgggggcuacugccugacccgguggaugcugaucgaggccgagcucaagugcuucgggaacaccgccguggccaagugcaacgagaagcacgacgaggaguucugcgacaugcugcgccuguucgacuucaacaagcaggcgauccggcgccucaagaccgaggcccagauguccauccagcugaucaacaaggccgucaacgcccugaucaacgaccagcucaucaugaagaaccaccuccgggacaucaugggcauccccuacugcaacuacagcaaguacugcuaccugaaccacacggugaccgggaagaccucccugccccgcugcugccuggugagcaacggcuccuaccugaacgagacccacuucagcgacgacaucgagcagcaggccgacaacaugaucacggagcuccugcagaaggaguacaucgaccggcagggcaagaccccgcuggggcucgucgaccuguucguguucuccaccagcuucuaccugaucuccaucuuccugcaccucgugaagaucccgacccaccgccacaucacgggcaagcccugccccaagccccaccggcugaaccacauggggaucugcagcugcggccuguacaagcacccggggguccccgugaaguggaagcgcugaggacuaguuauaagacugacuagcccgaugggccucccaacgggcccuccuccccuccuugcaccgagauuaauaaaaaaaaaaaaaaaaaaaaaaaaaaaaaaaaaaaaaaaaaaaaaaaaaaaaaaaaaaaaaaaaaaaaaaaaaaaaaaaaaaaaaaaaaaaaaaaaaaaa

SEQ ID NO: 39792 - RNA, 1662 nt, Artificial Sequence
  mRNA product Design i-3 (A100) comprising derived and/or modified sequence from LASV(Lassa virus/H.sapiens-wt/NGA/2016/ISTH_0009;Clade II)__AVO03571__GPCmut11 (opt1)
aggagaaagcuuaccaugggccagaucaucaccuucuuccaggaggugccccacgucaucgaggaggugaugaacaucgugcugaucgcccucagccugcuggccauccucaaggggaucuacaacgucgcgaccugcggccugcuggggcucguguccuuccugcugcucugcggccgcagcugcuccacgaccuacaaggggguguacgagcugcagacccuggagcucgacauggccagccugaacaugaccaugccgcuguccugcacgaagaacaacagccaccacuacaucauggucggcaacgagaccggccucgagcugacccugaccaacacguccaucaucaaccacaaguucugcaaccucagcgacgcccacaagaagaaccuguacgaccacgcccugauguccaucaucagcaccuuccaccucuccauccccaacuucaaccaguacgaggccaugagcugcgacuucaacgggggccggaucuccgugcaguacaaccugagccacuccuacgcgguggacgccgccaaccacugcgggaccaucgccaacggcguccugcagaccuucaugcgcauggcguggggcgggagcuacaucgcccucgacuccggcaaggggagcugggacugcaucaugacguccuaccaguaccugaucauccagaacaccaccugggaggaccacugccaguucagccggcccagccccaucggcuaccuggggcuccugucccagcgcacccgggacaucuacaucagccgccggcugcucggcacguucaccuggacccuguccgacagcgagggcaacgagacccccgggggcuacugccugacgcgcuggaugcucaucgaggccgagcugaagugcuucgggaacaccgccguggccaagugcaacgagaagcacgacgaggaguucugcgacaugcugcggcuguucgacuucaacaagcaggcgauccgccggcugaagaccgaggcccagauguccauccagcugaucaacaaggccgugaacgcccucaucaacgaccagcugaucaugaagaaccaccuccgcgacaucaugggcaucccguacugcaacuacagcaaguacugcuaccucaaccacaccgucacggggaagaccucccugccccggugcugccuggugagcaacggcuccuaccucaacgagacccacuucagcgacgacaucgagcagcaggccgacaacaugaucaccgagcugcugcagaaggaguacaucgaccgccagggcaagacgccccucgggcugguggaccuguucgucuucuccaccagcuucuaccugaucuccaucuuccuccaccuggugaagaucccgacccaccggcacaucaccggcaagcccugccccaagccccaccgccugaaccacauggggaucugcagcugcggccucuacaaccacccgggggugcccgucaaguggaagcggugaggacuaguuauaagacugacuagcccgaugggccucccaacgggcccuccuccccuccuugcaccgagauuaauaaaaaaaaaaaaaaaaaaaaaaaaaaaaaaaaaaaaaaaaaaaaaaaaaaaaaaaaaaaaaaaaaaaaaaaaaaaaaaaaaaaaaaaaaaaaaaaaaaaa

SEQ ID NO: 39793 - RNA, 1662 nt, Artificial Sequence
  mRNA product Design i-3 (A100) comprising derived and/or modified sequence from LASV(Lassa virus/H.sapiens-wt/NGA/2016/ISTH_0017;Clade II)__AVO03567__GPCmut11 (opt1)
aggagaaagcuuaccaugggccagaucaucaccuucuuccaggaggugccccacgucaucgaggaggugaugaacaucgugcugaucgcccucagccugcuggccauccucaaggggaucuacaacgucgcgaccugcggccuguucgggcugguguccuuccuccugcugugcggccgcagcugcuccacgaccuacaaggggguguacgagcuccagacccuggagcuggacauggccagccucaacaugaccaugccgcuguccugcacgaagaacaacagccaccacuacaucauggucggcaacgagaccggccuggagcucacccugaccaacacguccaucaucaaccacaaguucugcaaccugagcgacgcccacaagaagaaccucuacgaccacgcccugauguccaucaucagcaccuuccaccuguccauccccaacuucaaccaguacgaggccaugagcugcgacuucaacgggggcaagaucuccgugcaguacaaccucagccacaccuacgcgaucgacgccgccaaccacugcgggaccaucgccaacggcgugcugcagacguucaugcggauggcguggggcggguccuacaucgcccuggacagcggcaagggguccugggacugcaucaugaccagcuaccaguaccucaucauccagaacaccaccugggaggaccacugccaguucucccgccccagccccaucggcuaccuggggcugcucagccagcggacgcgcgacaucuacaucucccggcgccugcugggcaccuucaccuggacccucagcgacuccgagggcaacgagacgcccgggggcuacugccugacccgguggaugcugaucgaggccgagcucaagugcuucgggaacaccgccgucgccaagugcaacgagaagcacgacgaggaguucugcgacaugcugcgccuguucgacuucaacaagcaggcgauccggcgccucaagaccgaggcccagaugagcauccagcugaucaacaaggccgugaacgcccugaucaacgaccagcucaucaugaagaaccaccuccgggacaucaugggcauccccuacugcaacuacuccaaguacugcuaccugaaccacacggugaccgggaagaccagccugccccgcugcugccuggucuccaacggcagcuaccugaacgagacccacuucuccgacgacaucgagcagcaggccgacaacaugaucacggagcuccugcagaaggaguacauggaccggcagggcaagaccccgcuggggcucguggaccuguucguguucagcaccuccuucuaccugaucagcaucuuccugcaccucguccgcaucccgacccaccggcacgugaucggcaagcccugccccaagccccaccgccugaaccacauggggaucugcuccugcggccuguacaagcacccgggggugcccgucaaguggaagcggugaggacuaguuauaagacugacuagcccgaugggccucccaacgggcccuccuccccuccuugcaccgagauuaauaaaaaaaaaaaaaaaaaaaaaaaaaaaaaaaaaaaaaaaaaaaaaaaaaaaaaaaaaaaaaaaaaaaaaaaaaaaaaaaaaaaaaaaaaaaaaaaaaaaa

SEQ ID NO: 39794 - RNA, 1662 nt, Artificial Sequence
  mRNA product Design i-3 (A100) comprising derived and/or modified sequence from LASV(Lassa virus/H.sapiens-wt/NGA/2018/ISTH_0959;Clade II)__AVV65099__GPCmut11 (opt1)
aggagaaagcuuaccaugggccagaucaucaccuucuuccaggaggugccccacgucaucgaggaggugaugaacaucgugcugaucgcccucagccugcuggccauccucaaggggaucuacaacgucgugaccugcggccuguucgggcugguguccuuccuccugcugugcggccgcagcugcuccacgaccuacaagggggucuacgagcuccagacccuggagcuggacauggcgagccucaacaugaccaugccgcuguccugcacgaagaacaacagccaccacuacaucauggugggcaacgagaccggccuggagcucacccugaccaacacguccaucaucaaccacaaguucugcaaccugagcgacgcccacaagaagaaccucuacgaccacgcccugauguccaucaucagcaccuuccaccuguccauccccaacuucaaccaguacgaggccaugagcugcgacuucaacgggggcaagaucuccgugcaguacaaccucagccacgccuacgcgaucgacgccgccaaccacugcgggaccaucgccaacggcguccugcagaccuucaugcggauggcguggggcggguccuacaucgcccuggacagcggcaagggguccugggacugcaucaugacgagcuaccaguaccucaucauccagaacaccaccugggaggaccacugccaguucucccgccccagccccaucggcuaccuggggcugcucagccagcggacccgcgacaucuacaucucccggcgccugcugggcacguucaccuggacccucagcgacuccgagggcaacgagacccccgggggcuacugccugacgcgguggaugcugaucgaggccgagcucaagugcuucgggaacaccgccguggccaagugcaacgagaagcacgacgaggaguucugcgacaugcugcgccuguucgacuucaacaagcaggcgauccggcgccucaagaccgaggcccagaugagcauccagcugaucaacaaggccgugaacgcccugaucaacgaccagcucaucaugaagaaccaccuccgggacaucaugggcaucccguacugcaacuacuccaaguacugcuaccugaaccacaccgucacggggaagaccagccugccccgcugcugccugguguccaacggcagcuaccugaacgagacccacuucuccgacgacaucgagcagcaggccgacaacaugaucaccgagcuccugcagaaggaguacaucgaccggcagggcaagacgccccuggggcucguggaccuguucgucuucagcaccuccuucuaccugaucagcaucuuccugcaccucgugaagaucccgacccaccgccacgugaucggcaagcccugccccaagccccaccggcugaaccacauggggaucugcuccugcggccuguacaagcacccggggguccccgugaaguggaagcgcugaggacuaguuauaagacugacuagcccgaugggccucccaacgggcccuccuccccuccuugcaccgagauuaauaaaaaaaaaaaaaaaaaaaaaaaaaaaaaaaaaaaaaaaaaaaaaaaaaaaaaaaaaaaaaaaaaaaaaaaaaaaaaaaaaaaaaaaaaaaaaaaaaaaa

SEQ ID NO: 39795 - RNA, 1662 nt, Artificial Sequence
  mRNA product Design i-3 (A100) comprising derived and/or modified sequence from LASV(LASV003-NIG-2008;Clade II)__AIT17580__GPCmut11 (opt1)
aggagaaagcuuaccaugggccagaucaucaccuucuuccaggaggugccccacgucaucgaggaggugaugaacaucgugcugaucgcccucagccugcuggccauccucaaggggaucuacaacgucgcgaccugcggccuguucgggcugguguccuuccuccugcugugcggccgcagcugcuccacgaccuacaaggggguguacgagcuccagacccuggagcuggacauggccagccucaacaugaccaugccgcuguccugcacgaagaacaacagccaccacuacaucauggucggcaacgagaccggccuggagcucacccugaccaacacguccaucaucaaccacaaguucugcaaccugagcgacgcccacaagaagaaccucuacgaccacgcccugauguccaucaucagcaccuuccaccuguccauccccaacuucaaccaguacgaggccaugagcugcgacuucaacgggggcaagaucuccgugcaguacaaccucagccacaccuacgcgguggacgccgccaaccacugcgggaccaucgccaacggcguccugcagacguucaugcggauggcguggggcggguccuacaucgcccuggacagcggcaagggguccugggacugcaucaugaccagcuaccaguaccucaucauccagaacaccaccugggaggaccacugccaguucucccgccccagccccaucggcuaccuggggcugcucagccagcggacgcgcgacaucuacaucucccggcgccugcugggcaccuucaccuggacccucagcgacuccgagagcaacgagacgccgggcggguacugccugacccgguggaugcugaucgaggccgagcucaagugcuucggcaacaccgccguggccaagugcaacgagaagcacgacgaggaguucugcgacaugcugcgccuguucgacuucaacaagcaggcgauccggcgccucaaggccgaggcccagauguccauccagcugaucaacaaggccgugaacgcccugaucaacgaccagcucaucaugaagaaccaccuccgggacaucauggggauccccuacugcaacuacagcaaguacugcuaccugaaccacaccgucacgggccgcaccucccugccccggugcugccuggugagcaacggguccuaccugaacgagacccacuucagcgacgacaucgagcagcaggcggacaacaugaucaccgagcuccugcagaaggaguacauggaccgccagggcaagacgccccugggccucguggaccuguucgucuucuccaccagcuucuaccugaucuccaucuuccugcaccucgugaagaucccgacccaccggcacgugaucgggaagcccugccccaagccccaccgccugaaccacaugggcaucugcagcugcgggcuguacaagcacccgggcguccccgugaaguggaagcggugaggacuaguuauaagacugacuagcccgaugggccucccaacgggcccuccuccccuccuugcaccgagauuaauaaaaaaaaaaaaaaaaaaaaaaaaaaaaaaaaaaaaaaaaaaaaaaaaaaaaaaaaaaaaaaaaaaaaaaaaaaaaaaaaaaaaaaaaaaaaaaaaaaaa

SEQ ID NO: 39796 - RNA, 1662 nt, Artificial Sequence
  mRNA product Design i-3 (A100) comprising derived and/or modified sequence from LASV(LASV035-NIG-2009;Clade II)__AIT17588__GPCmut11 (opt1)
aggagaaagcuuaccaugggccagaucaucaccuucuuccaggaggugccccacgucaucgaggaggugaugaacaucgugcugaucgcccucagccugcuggccauccucaaggggaucuacaacgucgcgaccugcggccuguucgggcugguguccuuccuccugcugugcggccgcagcugcuccacgaccuacaaggggguguacgagcuccagacccuggagcuggacauggccagccucaacaugaccaugccgcuguccugcacgaagaacaacagccaccacuacaucauggucggcaacgagaccggccuggagcucacccugaccaacacguccaucaucaaccacaaguucugcaaccugagcgacgcccacaagaagaaccucuacgaccacgcccugauguccaucaucagcaccuuccaccuguccauccccaacuucaaccaguacgaggccaugagcugcgacuucaacgggggcaagaucuccgugcaguacaaccucagccacgcguacgccguggacgccgccaaccacugcgggaccaucgcgaacggcguccugcagaccuucaugcggauggccuggggcggguccuacaucgcccuggacagcggcaagggguccugggacugcaucaugacgagcuaccaguaccucaucauccagaacaccaccugggaggaccacugccaguucucccgccccagccccaucggcuaccuggggcugcucagccagcggacccgcgacaucuacaucucccggcgccugcugggcacguucaccuggacccucagcgacuccgagggcaacgagacccccgggggcuacugccugacgcgguggaugcugaucgaggccgagcucaagugcuucgggaacaccgccguggcgaagugcaacgagaagcacgacgaggaguucugcgacaugcugcgccuguucgacuucaacaagcaggccauccggcgccucaaggccgaggcccagaugagcauccagcugaucaacaaggccgugaacgcgcugaucaacgaccagcucaucaugaagaaccaccuccgggacaucaugggcauccccuacugcaacuacuccaaguacugcuaccugaaccacaccgucaccgggaagacgagccugccccgcugcugccugguguccaacggcagcuaccugaacgagacccacuucuccgacgacaucgagcagcaggccgacaacaugaucaccgagcuccugcagaaggaguacaucgaccggcagggcaagaccccgcuggggcucguggaccuguucgucuucagcacguccuucuaccugaucagcaucuuccugcaccucgugaagaucccgacccaccgccacgugaucggcaagcccugccccaagccccaccggcugaaccacauggggaucugcuccugcggccuguacaagcacccggggguccccgugaaguggaagcgcugaggacuaguuauaagacugacuagcccgaugggccucccaacgggcccuccuccccuccuugcaccgagauuaauaaaaaaaaaaaaaaaaaaaaaaaaaaaaaaaaaaaaaaaaaaaaaaaaaaaaaaaaaaaaaaaaaaaaaaaaaaaaaaaaaaaaaaaaaaaaaaaaaaaa

SEQ ID NO: 39797 - RNA, 1662 nt, Artificial Sequence
  mRNA product Design i-3 (A100) comprising derived and/or modified sequence from LASV(LASV1000-NIG-2009;Clade II)__AIT17782__GPCmut11 (opt1)
aggagaaagcuuaccaugggccagaucaucaccuucuuccaggaggugccccacgucaucgaggaggugaugaacaucgugcugaucgcccucagccugcuggccauccucaaggggaucuacaacgucgcgaccugcggccuguucgggcugguguccuuccuccugcugugcggccgcagcugcuccacgaccuacaaggggguguacgagcuccagacccuggagcuggacauggccagccucaacaugaccaugccgcuguccugcacgaagaacaacagccaccacuacaucauggucggcaacgagaccggccuggagcucacccugaccaacacguccaucaucaaccacaaguucugcaaccugagcgacgcccacaagaagaaccucuacgaccacgcccugauguccaucaucagcaccuuccaccuguccauccccaacuucaaccaguacgaggccaugagcugcgacuucaacgggggcaagaucuccgugcaguacaaccucagccacaccuacgcgguggacgccgccaaccacugcgggaccaucgccaacggcguccugcagacguucaugcggauggcguggggcggguccuacaucgcccuggacagcggcaagggguccugggacugcaucaugaccagcuaccaguaccucaucauccagaacaccaccugggaggaccacugccaguucucccgccccagccccaucggcuaccuggggcugcucagccagcggacgcgcgacaucuacaucucccggcgccugcugggcaccuucaccuggacccucagcgacuccgagggcaacgagacgcccgggggcuacugccugacccgguggaugcugaucgaggccgagcucaagugcuucgggaacaccgccguggccaagugcaacgagaagcacgacgaggaguucugcgacaugcugcgccuguucgacuucaacaagcaggcgaucaagcggcucaagaccgaggcccagaugagcauccagcugaucaacaaggccgugaacgcccugaucaacgaccagcucaucaugaagaaccaccuccgcgacaucaugggcauccccuacugcaacuacuccaaguacugcuaccugaaccacacggucaccgggaagaccagccugccccggugcugccugguguccaacggcagcuaccugaacgagacccacuucuccgacgacaucgagcagcaggccgacaacaugaucacggagcuccugcagaaggaguacaucgaccgccagggcaagaccccgcuggggcucguggaccuguucgucuucagcaccuccuucuaccugaucagcaucuuccugcaccucgugaagaucccgacccaccggcacguggucggcaagcccugccccaagccccaccgccugaaccacauggggaucugcuccugcggccuguacaagcacccgggggugcccgugaaguggaagcggugaggacuaguuauaagacugacuagcccgaugggccucccaacgggcccuccuccccuccuugcaccgagauuaauaaaaaaaaaaaaaaaaaaaaaaaaaaaaaaaaaaaaaaaaaaaaaaaaaaaaaaaaaaaaaaaaaaaaaaaaaaaaaaaaaaaaaaaaaaaaaaaaaaaa

SEQ ID NO: 39798 - RNA, 1662 nt, Artificial Sequence
  mRNA product Design i-3 (A100) comprising derived and/or modified sequence from LASV(LASV221-NIG-2010;Clade II)__AIT17624__GPCmut11 (opt1)
aggagaaagcuuaccaugggccagaucaucaccuucuuccaggaggugccccacgucaucgaggaggugaugaacaucgugcugaucgcccucagccugcuggccauccucaaggggaucuacaacgucgcgaccugcggccuguucgggcugguguccuuccuccugcugugcggccgcagcugcuccacgaccuacaaggggguguacgagcuccagacccuggagcuggacauggccagccucaacaugaccaugccgcuguccugcacgaagaacaacagccaccacuacaucauggucggcaacgagaccggccuggagcucacccugaccaacacguccaucaucaaccacaaguucugcaaccugagcgacgcccacaagaagaaccucuacgaccacgcccugauguccaucaucagcaccuuccaccuguccauccccaacuucaaccaguacgaggccaugagcugcgacuucaacgggggcaagaucuccgugcaguacaaccucagccacaccuacgcgaucgacgccgccaaccacugcgggaccaucgccaacggcgugcugcagacguucaugcggauggcguggggcggguccuacaucgcccuggacagcggcaagggguccugggacugcaucaugaccagcuaccaguaccucaucauccagaacaccaccugggaggaccacugccaguucucccgccccagccccaucggcuaccuggggcugcucagccagcggacgcgcgacaucuacaucucccggcgccugcugggcaccuucaccuggacccucagcgacuccgagggcaacgagacgcccgggggcuacugccugacccgguggaugcugaucgaggccgagcucaagugcuucgggaacaccgccgucgccaagugcaacgagaagcacgacgaggaguucugcgacaugcugcgccuguucgacuucaacaagcaggcgauccggcgccucaagaccgaggcccagaugagcauccagcugaucaacaaggccgugaacgcccugaucaacgaccagcucaucaugaagaaccaccuccgggacaucaugggcauccccuacugcaacuacuccaaguacugcuaccugaaccacacggugaccgggaagaccagccugccccgcugcugccuggucuccaacggcagcuaccugaacgagacccacuucuccgacgacaucgagcagcaggccgacaacaugaucacggagaugcuccagaaggaguacauggaccggcagggcaagaccccgcuggggcugguggaccucuucguguucagcaccuccuucuaccugaucagcaucuuccugcaccuggucaagaucccgacccaccgccacgugaucggcaagcccugccccaagccccaccggcucaaccacauggggaucugcuccugcggccuguacaagcacccgggggugcccgucaaguggaagcgcugaggacuaguuauaagacugacuagcccgaugggccucccaacgggcccuccuccccuccuugcaccgagauuaauaaaaaaaaaaaaaaaaaaaaaaaaaaaaaaaaaaaaaaaaaaaaaaaaaaaaaaaaaaaaaaaaaaaaaaaaaaaaaaaaaaaaaaaaaaaaaaaaaaaa

SEQ ID NO: 39799 - RNA, 1662 nt, Artificial Sequence
  mRNA product Design i-3 (A100) comprising derived and/or modified sequence from LASV(LASV237-NIG-2010;Clade II)__AIT17638__GPCmut11 (opt1)
aggagaaagcuuaccaugggccagaucaucaccuucuuccaggaggugccccacgucaucgaggaggugaugaacaucgugcugaucgcccucagccugcuggccauccucaaggggaucuacaacgucgcgaccugcggccuguucgggcugguguccuuccuccugcugugcggccgcagcugcuccacgaccuacaaggggguguacgagcuccagacccuggagcuggacauggccagccucaacaugaccaugccgcuguccugcacgaagaacaacagccaccacuacaucauggucggcaacgagaccggccuggagcucacccugaccaacacguccaucaucaaccacaaguucugcaaccugagcgacgcccacaagaaggaccucuacgaccacgcccugauguccaucaucagcaccuuccaccuguccauccccaacuucaaccaguacgaggccaugagcugcgacuucaacgggggcaagaucuccgugcaguacaaccucagccacaccuacgcgguggacgccgccaaccacugcgggaccaucgccaacggcguccugcagacguucaugcggauggcguggggcggguccuacaucgcccuggacagcggcaagggguccugggacugcaucaugaccagcuaccaguaccucaucauccagaacaccaccugggaggaccacugccaguucucccgccccagccccaucggcuaccuggggcugcucagccagcggacgcgcgacaucuacaucucccggcgccugcugggcaccuucaccuggacccucagcgacuccgagggcaacgagacgcccgggggcuacugccugacccgguggaugcugaucgaggccgagcucaagugcuucgggaacaccgccguggccaagugcaacgagaagcacgacgaggaguucugcgacaugcugcgccuguucgacuucaacaagcaggcgauccggcgccucaagaccgaggcccagaugagcauccagcugaucaacaaggccgugaacgcccugaucaacgaccagcucaucaugaagaaccaccuccgggacaucaugggcauccccuacugcaacuacuccaaguacugcuaccugaaccacacggucaccgggaagaccagccugccccgcugcugccugguguccaacggcagcuaccugaacgagacccacuucuccgacgacaucgagcagcaggccgacaacaugaucacggagcuccugcagaaggaguacauggaccggcagggcaagaccccgcuggggcucguggaccuguucgucuucagcaccuccuucuaccugaucagcaucuuccugcaccucaucaagaucccgacccaccgccacaucacgggcaagcccugccccaagccccaccggcugaaccacauggggaucugcuccugcggccuguacaagcacccgggggugcccgugaaguggaagcgcugaggacuaguuauaagacugacuagcccgaugggccucccaacgggcccuccuccccuccuugcaccgagauuaauaaaaaaaaaaaaaaaaaaaaaaaaaaaaaaaaaaaaaaaaaaaaaaaaaaaaaaaaaaaaaaaaaaaaaaaaaaaaaaaaaaaaaaaaaaaaaaaaaaaa

SEQ ID NO: 39800 - RNA, 1662 nt, Artificial Sequence
  mRNA product Design i-3 (A100) comprising derived and/or modified sequence from LASV(LASV253-NIG-2011;Clade II)__AIT17670__GPCmut11 (opt1)
aggagaaagcuuaccaugggccagaucaucaccuucuuccaggaggugccccacgucaucgaggaggugaugaacaucgugcugaucgcccucagccugcuggccauccucaaggggaucuacaacgucgcgaccugcggccuguucgggcugguguccuuccuccugcugugcggccgcagcugcuccacgaccuacaaggggguguacgagcuccagacccuggagcuggacauggccagccucaacaugaccaugccgcuguccugcacgaagaacaacagccaccacuacaucauggucggcaacgagaccggccuggagcucacccugaccaacacguccaucaucaaccacaaguucugcaaccugagcgacgcccacaagaagaaccucuacgaccacgcccugauguccaucaucagcaccuuccaccuguccauccccaacuucaaccaguacgaggccaugagcugcgacuucaacgggggcaagaucuccgugcaguacaaccucagccacaccuacgcgguggacgccgccaaccacugcgggaccaucgccaacggcguccugcagacguucaugcggauggcguggggcggguccuacaucgcccuggacagcggcaagggguccugggacugcaucaugaccagcuaccaguaccucaucauccagaacaccaccugggaggaccacugccaguucucccgccccagccccaucggcuaccuggggcugcucagccagcggacgcgcgacaucuacaucucccggcgccugcugggcaccuucaccuggacccucagcgacuccgagggcaacgagacgcccgggggcuacugccugacccgguggaugcugaucgaggccgagcucaagugcuucgggaacaccgccguggccaagugcaacgagaagcacgacgaggaguucugcgacaugcugcgccuguucgacuucaacaagcaggcgauccggcgccucaaggccgaggcccagaugagcauccagcugaucaacaaggccgugaacgcccugaucaacgaccagcucaucaugaagaaccaccuccgggacaucaugggcaucccguacugcaacuacuccaaguacugcuaccugaaccacaccgucacggggcgcaccagccugccccggugcugccugguguccaacggcagcuaccugaacgagacccacuucuccgacgacaucgagcagcaggcggacaacaugaucaccgagcuccugcagaaggaguacaucgaccgccagggcaagacgccccuggggcucguggaccuguucgucuucagcaccuccuucuaccugaucagcaucuuccugcaccucgugaagaucccgacccaccggcacaucaucggcaagcccugccccaagccccaccgccugaaccacauggggaucugcuccugcggccuguacaagcacccgggggugcccgucaaguggaagcggugaggacuaguuauaagacugacuagcccgaugggccucccaacgggcccuccuccccuccuugcaccgagauuaauaaaaaaaaaaaaaaaaaaaaaaaaaaaaaaaaaaaaaaaaaaaaaaaaaaaaaaaaaaaaaaaaaaaaaaaaaaaaaaaaaaaaaaaaaaaaaaaaaaaa

SEQ ID NO: 39801 - RNA, 1662 nt, Artificial Sequence
  mRNA product Design i-3 (A100) comprising derived and/or modified sequence from LASV(LASV254-NIG-2011;Clade II)__AIT17674__GPCmut11 (opt1)
aggagaaagcuuaccaugggccagaucaucaccuucuuccaggaggugccccacgucaucgaggaggugaugaacaucgugcugaucgcccucagccugcuggccauccucaaggggaucuacaacgucgcgaccugcggccuguucgggcugguguccuuccuccugcugugcggccgcagcugcuccacgaccuacaaggggguguacgagcuccagacccuggagcuggacaugaccaaccucaacaugacgaugccgcugagcugcaccaagaacaacucccaccacuacaucauggucggcaacgagaccggccuggagcucacccugacgaacaccagcaucaucaaccacaaguucugcaaccuguccgacgcccacaagaagaaccucuacaaccacgcccugaugagcaucaucuccaccuuccaccugagcauccccaacuucaaccaguacgaggccauguccugcgacuucaacgggggcaagaucagcgugcaguacaaccucucccacagcuacgccguggacgcggccaaccacugcgggaccaucgccaacggcguccugcagacguucaugcggauggccuggggcggguccuacaucgcgcuggacagcggcaaggggaacugggacugcaucaugaccuccuaccaguaccucaucauccagaacaccaccugggaggaccacugccaguucagccgccccucccccaucggcuaccuggggcugcucagccagcggacgcgcgacaucuacaucagccggcgccugcugggcaccuucaccuggacccucuccgacagcgagggcaacgagacgcccgggggcuacugccugacccgguggaugcugaucgaggccgagcucaagugcuucgggaacaccgccguggccaagugcaacgagaagcacgacgaggaguucugcgacaugcugcgccuguucgacuucaacaagcaggccauccggcgccucaagaccgaggcgcaggccaacauccagcugaucaacaaggccgugaacgcccugaucaacgaccagcucaucaugaagaaccaccuccgggacaucaugggcauccccuacugcaacuacuccaaguacugcuaccugaaccacacggucaccgggaagaccagccugccccgcugcugccugguguccaacggcagcuaccugaacgagacccacuucuccgacgacaucgagcagcaggccgacaacaugaucacggagcuccugcagaaggaguacauggaccggcagggcaagaccccgcuggggcucguggaccuguucgucuucagcaccuccuucuaccugaucagcaucuuccugcaccucgugaagaucccgacccaccgccacgugaucggcaagcccugccccaagccccaccggcugaaccacauggggaucugcuccugcggccuguacaagcacccggggguccccgugaaguggaagcgcugaggacuaguuauaagacugacuagcccgaugggccucccaacgggcccuccuccccuccuugcaccgagauuaauaaaaaaaaaaaaaaaaaaaaaaaaaaaaaaaaaaaaaaaaaaaaaaaaaaaaaaaaaaaaaaaaaaaaaaaaaaaaaaaaaaaaaaaaaaaaaaaaaaaa

SEQ ID NO: 39802 - RNA, 1662 nt, Artificial Sequence
  mRNA product Design i-3 (A100) comprising derived and/or modified sequence from LASV(Nig08-A19;Clade III)__ADU56618__GPCmut11 (opt1)
aggagaaagcuuaccaugggccagaucgugaccuucuuccaggaggucccccacgugaucgaggaggugaugaacaucguccugaucgcccucagcauccuggccauccugaaggggcucuacaacaucgcgaccugcggccugaucgggcuggugacguuccuccugcuguccggccgcagcugcuccaugaccuacaaggggguguacgagcuccagacccuggagcugaacaugaacacccucaacaugacgaugccgcugagcugcaccaagaacaacucccaccacuacaucauggucggcaacgagaccggccuggagcucacccugacgaacaccagccugcuccaccacaaguucugcaaccuguccgacgcccacaagaagaaccuguacgaccacacccucaugagcaucaucuccaccuuccaccugagcauccccaacuucaaccaguacgaggccauguccugcgacuucaacgggggcaagaucacggugcaguacaaccugagccacuccuacgccaucgacgccgcgaaccacugcgggaccguggccaacggcguccuccagaccuucaugcggauggccuggggcgggagcuacaucgcccuggacuccggccgcgggaagugggacugcaucaugaccagcuaccaguaccugaucauccagaacacgaccugggaggaccacugccaguucucccggcccagccccaucggcuaccucgggcugcugucccagcgcacccgggacaucuacaucagccgccggcuccugggcaccuucacguggacccugagcgacuccgagggcaacgagacccccgggggcuacugccucacccgcuggaugcugaucgaggcggagcugaagugcuucgggaacacggccguggccaagugcaacgagaagcacgacgaggaguucugcgacaugcuccggcuguucgacuucaacaagcaggccauccgccggcugaaggccgaggcgcagaugagcauccagcucaucaacaaggccgugaacgcccugaucaacgaccagcugaucaugaagaaccaccuccgcgacaucaugggcauccccuacugcaacuacuccaaguacugcuaccugaaccacaccagcaccgggcggaccucccugccccgcugcugccucgucagcaacggcuccuaccugaacgagacgcacuucagcgacgacaucgagcagcaggccgacaacaugaucaccgagaugcugcagaaggaguaccucgaccggcagggcaagaccccgcuggggcugguggaccuguucguguucuccaccagcuucuaccucaucuccaucuuccugcaccuggucaagaucccgacgcaccgccacaucgugggcaagcccugccccaagccccaccggcucaaccacauggggaucugcagcugcggccuguacaagcagccgggggugcccguccgcuggaagcggugaggacuaguuauaagacugacuagcccgaugggccucccaacgggcccuccuccccuccuugcaccgagauuaauaaaaaaaaaaaaaaaaaaaaaaaaaaaaaaaaaaaaaaaaaaaaaaaaaaaaaaaaaaaaaaaaaaaaaaaaaaaaaaaaaaaaaaaaaaaaaaaaaaaa

SEQ ID NO: 39803 - RNA, 1665 nt, Artificial Sequence
  mRNA product Design i-3 (A100) comprising derived and/or modified sequence from LASV(G1180-SLE-2010;Clade IV)__AIT17168__GPCmut11 (opt1)
aggagaaagcuuaccaugggccagaucgugaccuucuuccaggaggucccccacgugaucgaggaggugaugaacaucguccugaucgcccucagcauccuggccgugcugaaggggcucuacaacuucgcgaccugcggccugguggggcugcucaccuuccugcugcucugcggccgcuccugcaccgccagccgguacaagggggucuacgagcugcagacccuggagcucaacauggagacccugaacaugacgaugccgcuguccugcaccaagaacaacagccaccacuacaucauggugggcaacgagaccggccucgagcugacccugacgaacaccuccaucaucaaccacaaguucugcaaccucagcgacgcccacaagaagaaccuguacgaccacgcccugauguccaucaucagcaccuuccaccucuccauccccaacuucaaccaguacgaggccaugagcugcgacuucaacgggggcaagaucuccgugcaguacaaccugagccacuccuacgcgggggacgccgccaaccacugcggcaccgucgccaacggggugcugcagacguucaugcgcauggcguggggcggcagcuacaucgcccucgacuccgggcacggcagcugggacugcaucaugaccuccuaccaguaccugaucauccagaacaccaccugggaggaccacugccaguucagccggcccucccccaucggguaccugggccuccugagccagcgcacgcgggacaucuacaucagccgccggcugcucggcaccuucaccuggacccuguccgacagcgaggggaaggacacgccgggcggguacugccugacccgcuggaugcucaucgaggccgagcugaagugcuucggcaacaccgccguggccaagugcaacgagaagcacgacgaggaguucugcgacaugcugcggcuguucgacuucaacaagcaggcgauccagcgccugaaggccgaggcccagauguccauccagcugaucaacaaggccgucaacgcccucaucaacgaccagcugaucaugaagaaccaccuccgggacaucauggggauccccuacugcaacuacagcaaguacugcuaccucaaccacaccacgaccggcaagaccucccugcccaagugcugccuggugagcaacggcuccuaccucaacgagacccacuucagcgacgacaucgagcagcaggcggacaacaugaucacggagaugcugcagaaggaguacauggagcgccaggggaagacgccccugggccucguggaccuguucgucuucuccaccagcuucuaccugaucuccaucuuccugcaccucgugaagaucccgacccaccggcacaucgugggcaagagcugccccaagccccaccgccugaaccacauggggaucugcuccugcgggcuguacaagcagcccggcgucccggugaaguggaagcggugaggacuaguuauaagacugacuagcccgaugggccucccaacgggcccuccuccccuccuugcaccgagauuaauaaaaaaaaaaaaaaaaaaaaaaaaaaaaaaaaaaaaaaaaaaaaaaaaaaaaaaaaaaaaaaaaaaaaaaaaaaaaaaaaaaaaaaaaaaaaaaaaaaaa

SEQ ID NO: 39804 - RNA, 1665 nt, Artificial Sequence
  mRNA product Design i-3 (A100) comprising derived and/or modified sequence from LASV(G1442-SLE-2011;Clade IV)__AIT17180__GPCmut11 (opt1)
aggagaaagcuuaccaugggccagaucgugaccuucuuccaggaggucccccacgugaucgaggaggugaugaacaucguccugaucgcccucagcauccuggccgugcugaaggggcucuacaacguggcgaccugcggccugaucgggcuggucacguuccuccugcugugcggccgcuccugcaccaccacccucuacaaggggguguacgagcugcagacgcuggagcucaacauggagacccugaacaugaccaugccgcugagcugcaccaagaacaacucccaccacuacauccgggugggcaacgagacgggccucgagcugacccugaccaacaccagcaucaucaaccacaaguucugcaaccucuccgacgcccacaagaagaaccuguacgaccacgcccugaugagcaucaucuccacguuccaccucagcauccccaacuucaaccaguacgaggccauguccugcgacuucaacgggggcaagaucagcguccaguacaaccugucccacagcuacgccggggacgcggccaaccacugcggcaccguggccaacggggugcugcagaccuucaugcgcauggccuggggcggcuccuacaucgcgcucgacagcgggcggggcaacugggacugcaucaugaccuccuaccaguaccugaucauccagaacacgaccugggacgaccacugccaguucagccgccccucccccaucggguaccugggccuccugagccagcggacccgcgacgucuacaucucccggcgccugcucggcaccuucacguggacccugagcgacagcgaggggaaggacaccccgggcggguacugccugacccgguggaugcucaucgaggccgagcugaagugcuucggcaacacggccguggccaagugcaacgagaagcacgacgaggaguucugcgacaugcugcgccucuucgacuucaacaagcaggccauccagcggcugaaggcggaggcccagauguccauccagcugaucaacaaggccgugaacgcccucaucaacgaccagcugaucaugaagaaccaccuccgcgacaucauggggauccccuacugcaacuacagcaaguacugcuaccugaacaacaccgccaccggcaagaccucccugcccaagugcugccugaucagcaacggcuccuaccucaacgagacgcacuucagcgacgacaucgagcaggaggcggacaacaugaucaccgagaugcugcagaaggaguacauggagcggcaggggaagacgccccugggccucgucgaccuguucguguucuccaccagcuucuaccugaucuccaucuuccugcaccucgugaagaucccgacccaccgccacaucgucggcaagagcugccccaagccccaccggcugaaccacauggggaucugcuccugcgggcuguacaagcagcccggcgugccggugcgcuggaagcggugaggacuaguuauaagacugacuagcccgaugggccucccaacgggcccuccuccccuccuugcaccgagauuaauaaaaaaaaaaaaaaaaaaaaaaaaaaaaaaaaaaaaaaaaaaaaaaaaaaaaaaaaaaaaaaaaaaaaaaaaaaaaaaaaaaaaaaaaaaaaaaaaaaaa

SEQ ID NO: 39805 - RNA, 1665 nt, Artificial Sequence
  mRNA product Design i-3 (A100) comprising derived and/or modified sequence from LASV(G3010-SLE-2013;Clade IV)__AIT17344__GPCmut11 (opt1)
aggagaaagcuuaccaugggccagaucgugaccuucuuccaggaggucccccacgugaucgaggaggugaugaacaucguccugaucgcccucagcauccuggccgugcugaaggggcucuacaacuucgcgaccugcggccugguggggcuggucacguuccuccugcugugcggccgcuccugcaccaccagccucuacaaggggguguacgagcugcagacccuggagcucaacauggagacgcugaacaugaccaugccgcuguccugcaccaagaacaacagccaccacuacaucauggugggcaacgagaccggccucgagcugacgcugaccaacaccuccaucaucaaccacaaguucugcaaccucagcgacgcccacaagaagaaccuguacaaccacgcccugauguccaucaucagcaccuuccaccucuccauccccaacuucaaccaguacgaggccaugagcugcgacuucaacgggggcaagaucuccguccaguacaaccugagccacuccuacgccggggacgcggccagccacugcggcacgguggccaacggggugcugcagaccuucaugcggauggccuggggcggcuccuacaucgcgcucgacagcggguacggcaagugggacugcaucaugaccuccuaccaguaccugaucauccagaacaccacgugggaggaccacugccaguucagccgccccucccccaucggguaccugggccuccugagccagcggacccgcgacaucuacaucagccggcgccugcucggcaccuucaccuggacgcuguccgacagcgaggggaaggacaccccgggcggguacugccugacccgguggaugcucaucgaggccgagcugaagugcuucggcaacaccgccgucgccaagugcaacgagaagcacgacgaggaguucugcgacaugcugcgccucuucgacuucaacaagcaggccauccagcggcugaagacggaggcgcagauguccauccagcugaucaacaaggccgugaacgcccucaucaacgaccagcugaucaugaagaaccaccuccgcgacaucauggggauccccuacugcaacuacagcaaguacugcuaccugaaccacaccaccaccggcaagacgucccugcccaagugcugccuggugagcaacggcuccuaccucaacgagacccacuucagcgacgacaucgagcagcaggccgacaacaugaucaccgagaugcugcagaaggaguacauggagcggcaggggaagacgccccugggccucgucgaccuguucguguucuccaccagcuucuaccugaucuccaucuuccugcaccucgugaagaucccgacccaccgccacaucgucggcaagagcugccccaagccccaccggcugaaccacauggggaucugcuccugcgggcuguacaagcagcccggcgugccggugcgcuggaagcggugaggacuaguuauaagacugacuagcccgaugggccucccaacgggcccuccuccccuccuugcaccgagauuaauaaaaaaaaaaaaaaaaaaaaaaaaaaaaaaaaaaaaaaaaaaaaaaaaaaaaaaaaaaaaaaaaaaaaaaaaaaaaaaaaaaaaaaaaaaaaaaaaaaaa

SEQ ID NO: 39806 - RNA, 1665 nt, Artificial Sequence
  mRNA product Design i-3 (A100) comprising derived and/or modified sequence from LASV(G502-SLE-2009;Clade IV)__AIT17126__GPCmut11 (opt1)
aggagaaagcuuaccaugggccagaucgugaccuucuuccaggaggucccccacgugaucgaggaggugaugaacaucguccugaucgcccucagcauccuggccgugcugaaggggcucuacaacuucgcgaccugcggccugguggggcugcucacguuccugcugcucugcggccgcuccugcaccaccgggcuguacaagggcgucuacgagcugcagacccucgagcugaacauggagacgcugaacaugaccaugccgcucagcugcaccaagaacaacucccaccacuacaucauggugggcaacgagaccgggcuggagcugacgcucaccaacaccagcaucaucaaccacaaguucugcaaccuguccgacgcccacaagaagaaccuguacgaccacgcccucaugagcaucaucuccaccuuccaccugagcauccccaacuucaaccaguacgaggccauguccugcgacuucaacggcgggaagaucagcgugcaguacaaccugucccacagcuacgccggcgacgcggccgaccacugcgggacggucgccaacggcgugcuccagaccuucaugcggauggccuggggcggguccuacaucgcgcuggacagcggccgcgggcggugggacugcaucaugaccuccuaccaguaccugaucauccagaacaccacgugggaggaccacugccaguucagccgccccucccccaucggcuaccucggccugcugagccagcggacccgcgacaucuacaucucccggcgccuccuggggaccuucaccuggacgcugagcgacagcgagggcaaggacacccccgggggcuacugccucacccgguggaugcugaucgaggccgagcugaagugcuucgggaacaccgccguggccaagugcaacgagaagcacgacgaggaguucugcgacaugcuccgccuguucgacuucaacaagcaggccauccagcggcugaaggcggaggcccagauguccauccagcucaucaacaaggccgucaacgcccugaucaacgaccagcuggugaugaagaaccaccuccgcgacaucaugggcauccccuacugcaacuacagccgguacugcuaccugaaccacacgaccaccggccgcaccucccugcccaagugcugccucgugagcaacggguccuaccugaacgagacgcacuucagcgacgacaucgagcagcaggccgacaacaugaucaccgagaugcugcagaaggaguacauggagcggcagggcaagaccccgcucgggcuggucgaccuguucguguucuccaccagcuucuaccugaucuccaucuuccuccaccuggugaagaucccgacgcaccgccacaucgucggcaagagcugccccaagccccaccggcugaaccacauggggaucugcuccugcggccucuacaagcagcccggcgugccggugaaguggaagcgcugaggacuaguuauaagacugacuagcccgaugggccucccaacgggcccuccuccccuccuugcaccgagauuaauaaaaaaaaaaaaaaaaaaaaaaaaaaaaaaaaaaaaaaaaaaaaaaaaaaaaaaaaaaaaaaaaaaaaaaaaaaaaaaaaaaaaaaaaaaaaaaaaaaaa

SEQ ID NO: 39807 - RNA, 1665 nt, Artificial Sequence
  mRNA product Design i-3 (A100) comprising derived and/or modified sequence from LASV(G733-SLE-2010;Clade IV)__AIT17154__GPCmut11 (opt1)
aggagaaagcuuaccaugggccagaucgugaccuucuuccaggaggucccccacgugaucgaggaggugaugaacaucguccugaucgcccucagcauccuggccgugcugaaggggcucuacaacuucgcgaccugcggcaucguggggcuggucuccuuccugcuccugugcggccgcagcugcacgaccucccuguacaaggggguguacgagcuccagacccuggagcugaacauggagacccucaacaugacgaugccgcugagcugcaccaagaacaacucccaccacuacaucauggugggcaacgagaccggccuggagcucacccugacgaacaccagcaucaucaaccacaaguucugcaaccuguccgacgcccacaagaagaaccucuacgaccacgcccugaugagcaucaucuccaccuuccaccugagcauccccaacuucaaccaguacgaggccauguccugcgacuucaacgggggcaagaucagcguccaguacaaccucucccacagcuacgccggggacgcggccaaccacugcggcaccaucgccaacggggugcugcagacguucaugcggauggccuggggcggcuccuacaucgcgcuggacagcgggcgcgaccggugggacugcaucaugaccuccuaccaguaccucaucauccagaacaccaccugggaggaccacugccaguucagccgccccucccccaucggcuaccuggggcugcucagccagcggacgcgcgacaucuacaucagccggcgccugcugggcaccuucaccuggacccucuccgacagcgagggcaaggacacgcccgggggcuacugccugacccgguggaugcugaucgaggccgagcucaagugcuucgggaacaccgccguggccaagugcaacgagaagcacgacgaggaguucugcgacaugcugcgccuguucgacuucaacaagcaggccauccagcggcucaaggcggaggcccagauguccauccagcugaucaacaaggccgucaacgcccugaucaacgaccagcucaucaugaagaaccaccuccgcgacaucaugggcauccccuacugcaacuacagcaaguacugcuaccugaaccacaccacgaccgggaagaccucccugcccaagugcugccuggugagcaacggcuccuaccugaacgagacccacuucagcgacgacaucgagcagcaggccgacaacaugaucacggagaugcuccagaaggaguacauggagcggcagggcaagaccccgcuggggcugguggaccucuucgucuucuccaccagcuucuaccugaucuccaucuuccugcaccuggugaagaucccgacccaccgccacguggucggcaagagcugccccaagccccaccggcucaaccacauggggaucugcuccugcggccuguacgggcagcccggcgugccggugaaguggaagcgcugaggacuaguuauaagacugacuagcccgaugggccucccaacgggcccuccuccccuccuugcaccgagauuaauaaaaaaaaaaaaaaaaaaaaaaaaaaaaaaaaaaaaaaaaaaaaaaaaaaaaaaaaaaaaaaaaaaaaaaaaaaaaaaaaaaaaaaaaaaaaaaaaaaaa

SEQ ID NO: 39808 - RNA, 1665 nt, Artificial Sequence
  mRNA product Design i-3 (A100) comprising derived and/or modified sequence from MOPV/LASV reassortant(IGS-1;Clade IV)__AFY05576__GPCmut11 (opt1)
aggagaaagcuuaccaugggccagaucgugaccuucuuccaggaggucccccacgugaucgaggaggugaugaacaucguccugaucgcccucagcgugcuggccgugcugaaggggcucuacaacuucgcgaccugcggccuggucgggcuggugacguuccuccugcugugcggccgcuccugcaccaccagccucuacaaggggguguacgagcugcagacccuggagcucaacauggagacgcugaacaugaccaugccgcuguccugcaccaagaacaacagccaccacuacaucauggucggcaacgagaccggccucgagcugacgcugaccaacaccuccaucaucaaccacaaguucugcaaccucagcgacgcccacaagaagaaccuguacgaccacgcccugauguccaucaucagcaccuuccaccucuccauccccaacuucaaccaguacgaggccaugagcugcgacuucaacgggggcaagaucuccgugcaguacaaccugagccacuccuacgccggggacgcggccaaccacugcggcacgguggccaacgggguccugcagaccuucaugcggauggccuggggcggcagcuacaucgcgcucgacuccgggcgcggcaacugggacugcaucaugaccagcuaccaguaccugaucauccagaacaccacgugggaggaccacugccaguucucccggcccagccccaucggguaccugggccuccugucccagcgcacccgggacaucuacaucagccgccggcugcucggcaccuucaccuggacgcugagcgacuccgagggggaggacaccccgggcggguacugccugacccgcuggaugcucaucgaggccgagcugaagugcuucggcaacaccgccguggccaagugcaacgagaagcacgacgaggaguucugcgacaugcugcggcuguucgacuucaacaagcaggccauccagcgccugaaggcggaggcccagaugagcauccagcugaucaacaaggccgugaacgcccucaucaacgaccagcugaucaugaagaaccaccuccgggacaucauggggauccccuacugcaacuacuccaaguacugcuaccucaaccacacgaccaccggccgcaccagccugcccaagugcugccuggucuccaacggcagcuaccucaacgagacgcacuucuccgacgacaucgagcagcaggccgacaacaugaucaccgagaugcugcagaaggaguacauggagcggcaggggaagacgccccugggccucguggaccuguucguguucagcaccuccuucuaccugaucagcaucuuccugcaccucgucaagaucccgacccaccgccacaucguggggaaguccugccccaagccccaccggcugaaccacaugggcaucugcagcugcgggcuguacaagcagcccggcgugccggucaaguggaagcgcugaggacuaguuauaagacugacuagcccgaugggccucccaacgggcccuccuccccuccuugcaccgagauuaauaaaaaaaaaaaaaaaaaaaaaaaaaaaaaaaaaaaaaaaaaaaaaaaaaaaaaaaaaaaaaaaaaaaaaaaaaaaaaaaaaaaaaaaaaaaaaaaaaaaa

SEQ ID NO: 39809 - RNA, 1665 nt, Artificial Sequence
  mRNA product Design i-3 (A100) comprising derived and/or modified sequence from LASV(LM765-SLE-2012;Clade IV)__AIT17814__GPCmut11 (opt1)
aggagaaagcuuaccaugggccagaucgugaccuucuuccaggaggucccccacgugaucgaggaggugaugaacaucguccugaucgcccucagcauccuggccgugcugaaggggcucuacaacuucgcgaccugcggccugguggggcuggucacguuccuccugcugugcggccgcuccugcaccaccagccucuacaaggggguguacgagcugcagacccuggagcucaacauggagacgcugaacaugaccaugccgcuguccugcaccaagaacaacagccaccacuacaucauggugggcaacgagaccggccucgagcugacgcugaccaacaccuccaucaucgaccacaaguucugcaaccucagcgacgcccaccggaagaaccuguacgaccacgcccugauguccaucaucagcaccuuccaccucuccauccccaacuucaaccaguacgaggccaugagcugcgacuucaacgggggcaagaucuccguccaguacaaccugagccacuccuacgccaaggacgcggccgaccacugcgggacgguggccaacggcgugcugcagaccuucaugcgcauggccuggggcgggagcuacaucgcgcucgacuccggccgggggcgcugggacugcaucaugaccagcuaccaguaccugaucauccagaacaccacgugggaggaccacugccaguucucccggcccagccccaucggcuaccuggggcuccugucccagcgcacccgggacaucuacaucagccgccggcugcucggcaccuucaccuggacgcugagcgacuccgagggcaaggacacccccgggggcuacugccugacccgcuggaugcucaucgaggccgagcugaagugcuucgggaacaccgccgucgccaagugcaacgagaagcacgacgaggaguucugcgacaugcugcggcuguucgacuucaacaagcaggccauccagcgccugaaggcggaggcccagaugagcauccagcugaucaacaaggccgugaacgcccucaucaacgaccagcugaucaugaagaaccaccuccgggacaucaugggcauccccuacugcaacuacuccaaguacugcuaccucaaccacacgaccaccgggaagaccagccugcccaagugcugccugguguccaacggcagcuaccucaacgagacgcacuucuccgacgacaucgagcagcaggccgacaacaugaucaccgagaugcugcagaaggaguacauggagcgccagggcaagaccccgcuggggcucgucgaccuguucguguucagcaccuccuucuaccugaucagcaucuuccugcaccucgugaagaucccgacgcaccggcacaucgucggcaagcccugccccaagccccaccgccugaaccacauggggaucugcuccugcggccuguacaagcagccgggggugcccgugaaguggaagcggugaggacuaguuauaagacugacuagcccgaugggccucccaacgggcccuccuccccuccuugcaccgagauuaauaaaaaaaaaaaaaaaaaaaaaaaaaaaaaaaaaaaaaaaaaaaaaaaaaaaaaaaaaaaaaaaaaaaaaaaaaaaaaaaaaaaaaaaaaaaaaaaaaaaa

SEQ ID NO: 39810 - RNA, 1665 nt, Artificial Sequence
  mRNA product Design i-3 (A100) comprising derived and/or modified sequence from LASV(LM776-SLE-2012;Clade IV)__AIT17824__GPCmut11 (opt1)
aggagaaagcuuaccaugggccagaucgugaccuucuuccaggaggucccccacgugaucgaggaggugaugaacaucguccugaucgcccucagcauccuggccgugcugaaggggcucuacaacuucgcgaccugcggccugguggggcuggucacguuccuccugcugugcggccgcuccugcaccaccagcguguacaaggggguguacgagcuccagacccuggagcugaacauggagacgcucaacaugaccaugccgcuguccugcaccaagaacaacagccaccacuacaucauggucggcaacgagaccggccuggagcucacgcugaccaacaccuccaucaucaaccacaaguucugcaaccugagcgacgcccacaagaagaaccucuacgaccacgcccugauguccaucaucagcaccuuccaccuguccauccccaacuucaaccaguacgaggccaugagcugcgacuucaacgggggcaagaucuccgugcaguacaaccucagccacuccuacgccggggacgcggccaaccacugcggcacgguggccaacgggguccugcagaccuucaugcggauggccuggggcggcagcuacaucgcgcuggacuccgggcacggcaagugggacugcaucaugaccagcuaccaguaccucaucauccagaacaccacgugggaggaccacugccaguucucccgccccagccccaucggguaccugggccugcucucccagcggacccgcgacaucuacaucagccggcgccugcugggcaccuucaccuggacgcucagcgacuccgaggggaaggacaccccgggcggguacugccugacccgguggaugcugaucgaggccgagcucaagugcuucggcaacaccgccguggccaagugcaacgagaagcacgacgaggaguucugcgacaugcugcgccuguucgacuucaacaagcaggccauccagcggcucaaggcggaggcccagaugagcauccagcugaucaacaaggccgugaacgcccugaucaacgaccagcucaucaugaagaaccaccuccgcgacaucauggggauccccuacugcaacuacuccaaguacugcuaccugaaccacacgaccaccggcaagaccagccugcccaagugcugccuggucuccaacggcagcuaccugaacgagacgcacuucuccgacgacaucgagcagcaggccgacaacaugaucaccgagaugcuccagaaggaguacauggagcggcaggggaagacgccccugggccugguggaccucuucguguucagcaccuccuucuaccugaucagcaucuuccugcaccuggucaagaucccgacccaccgccacaucguggggaaguccugccccaagccccaccggcucaaccacaugggcaucugcagcugcgggcuguacaagcagcccggcgugccgguccgcuggaagcggugaggacuaguuauaagacugacuagcccgaugggccucccaacgggcccuccuccccuccuugcaccgagauuaauaaaaaaaaaaaaaaaaaaaaaaaaaaaaaaaaaaaaaaaaaaaaaaaaaaaaaaaaaaaaaaaaaaaaaaaaaaaaaaaaaaaaaaaaaaaaaaaaaaaa

SEQ ID NO: 39811 - RNA, 1665 nt, Artificial Sequence
  mRNA product Design i-3 (A100) comprising derived and/or modified sequence from LASV(Mad39;Clade IV)__ANH09722__GPCmut11 (opt1)
aggagaaagcuuaccaugggccagaucgugaccuucuuccaggaggucccccacgugaucgaggaggugaugaacaucguccugaucgcccucagcauccuggccgugcugaaggggcucuacaacguggcgaccugcggccugaucgggcuggucacguuccuccugcugugcggccgcuccugcaccaccacccucuacaaggggguguacgagcugcaggcccuggagcucaacauggagacgcugaacaugaccaugccgcugagcugcaccaagaacaacucccaccacuacauccgggugggcaacgagaccggccucgagcugacgcugaccaacaccagccucaucaaccacaaguucugcaaccuguccgacgcccacaagaagaaccuguacgaccacgcccucaugagcaucaucuccaccuuccaccugagcauccccaacuucaaccaguacgaggccauguccugcgacuucaacgacgggaagaucagcguccaguacaaccugucccacacguacgcgggcgacaccgccaaccacugcgggaccguggccaacggcgugcuccagaccuucaugcgcauggccuggggcgggagcuacaucgcgcuggacuccggccgcgggggcugggacugcaucaugacgagcuaccaguaccugaucauccagaacaccaccugggaggaccacugccaguucucccggcccagccccaucggguaccucggccugcugucccagcggacccgcgacaucuacaucagccggcgccuccugggcacguucaccuggacccuguccgacagcgaggggaaggacaccccgggcggguacugccucacgcgguggaugcugaucgaggccgagcugaagugcuucggcaacaccgccgucgccaagugcaacgagaagcacgacgaggaguucugcgacaugcuccgccuguucgacuucaacaagcaggccauccagcggcugaaggcggaggcccagaugagcauccagcucaucaacaaggccgugaacgcccugaucaacgaccagcugaucaugaagaaccaccuccgcgacaucauggggauccccuacugcaacuacuccaaguacugcuaccugaaccacaccgugaccggcaagacgagccugcccaagugcugccucgucuccaacggcagcuaccugaacgagacccacuucuccgacgacaucgagcagcaggccgacaacaugaucaccgagaugcugcagaaggaguacauggagcggcaggggaagacgccccucggccugguggaccuguucguguucagcaccuccuucuaccugaucagcaucuuccuccaccuggucaagaucccgacccaccgccacgugguggggaagcccugccccaagccccaccggcugaaccacaugggcaucugcuccugcggguucuacaagcagccgggcguccccgugcgcuggaagcggugaggacuaguuauaagacugacuagcccgaugggccucccaacgggcccuccuccccuccuugcaccgagauuaauaaaaaaaaaaaaaaaaaaaaaaaaaaaaaaaaaaaaaaaaaaaaaaaaaaaaaaaaaaaaaaaaaaaaaaaaaaaaaaaaaaaaaaaaaaaaaaaaaaaa

SEQ ID NO: 39812 - RNA, 1665 nt, Artificial Sequence
  mRNA product Design i-3 (A100) comprising derived and/or modified sequence from LASV(Z0947-SLE-2011;Clade IV)__AIT17840__GPCmut11 (opt1)
aggagaaagcuuaccaugggccagaucgugaccuucuuccaggaggucccccacgugaucgaggaggugaugaacaucguccugaucgcccucagcauccuggccgugcugaaggggcucuacaacuucgcgaccugcggccugguggggcuggucacguuccuccugcugugcggccgcuccugcaccaucagccucuacaaggggguguacgagcugcagacccuggagcucaacauggagacccugaacaugacgaugccgcuguccugcaccaagaacaacagccaccacuacaucauggugggcaacgagaccggccucgagcugacccugacgaacaccuccaucaucaaccacaaguucugcaaccucagcgacgcccacaagaagaaccuguacgaccacgcccugauguccaucaucagcaccuuccaccucuccauccccaacuucaaccaguacgaggccaugagcugcgacuucaacgggggcaagaucuccguccaguacaaccugagccacuccuacgccggggacgcggccaaccacugcggcaccguggccaacggggugcugcagacguucaugcggauggccuggggcggcagcuacaucgcgcucgacuccgggcgcgaccggugggacugcaucaugaccagcuaccaguaccugaucauccagaacaccaccugggaggaccacugccaguucucccgccccagccccaucggcuaccuggggcuccugucccagcggacgcgcgacaucuacaucagccggcgccugcucggcaccuucaccuggacccugagcgacuccgagggcaaggacacgcccgggggcuacugccugacccgguggaugcucaucgaggccgagcugaagugcuucgggaacaccgccgucgccaagugcaacgagaagcacgacgaggaguucugcgacaugcugcgccucuucgacuucaacaagcaggccauccagcggcugaaggcggaggcccagaugagcauccagcugaucaacaaggccgugaacgcccucaucaacgaccagcugaucaugaagaaccaccuccgcgacaucaugggcauccccuacugcaacuacuccaaguacugcuaccugaaccacaccacgaccgggaagaccagccugcccaagugcugccugguguccaacggcagcuaccucaacgagacccacuucuccgacgacaucgagcagcaggccgacaacaugaucacggagaugcugcagaaggaguacauggagcggcagggcaagaccccgcuggggcucgucgaccuguucguguucagcaccuccuucuaccugaucagcaucuuccugcaccucgugaagaucccgacccaccgccacaucgucggcaagcccugccccaagccccaccggcugaaccacauggggaucugcuccugcggccuguacaagcagccgggggugcccgugaaguggaagcgcugaggacuaguuauaagacugacuagcccgaugggccucccaacgggcccuccuccccuccuugcaccgagauuaauaaaaaaaaaaaaaaaaaaaaaaaaaaaaaaaaaaaaaaaaaaaaaaaaaaaaaaaaaaaaaaaaaaaaaaaaaaaaaaaaaaaaaaaaaaaaaaaaaaaa

SEQ ID NO: 39813 - RNA, 1665 nt, Artificial Sequence
  mRNA product Design i-3 (A100) comprising derived and/or modified sequence from LASV(Josiah;Clade IV)__NP_694870__GPCmut11 (opt1)
aggagaaagcuuaccaugggccagaucgugaccuucuuccaggaggucccccacgugaucgaggaggugaugaacaucguccugaucgcccucagcgugcuggccgugcugaaggggcucuacaacuucgcgaccugcggccuggucgggcuggugacguuccuccugcugugcggccgcuccugcaccaccagccucuacaaggggguguacgagcugcagacccuggagcucaacauggagacgcugaacaugaccaugccgcuguccugcaccaagaacaacagccaccacuacaucauggucggcaacgagaccggccucgagcugacgcugaccaacaccuccaucaucaaccacaaguucugcaaccucagcgacgcccacaagaagaaccuguacgaccacgcccugauguccaucaucagcaccuuccaccucuccauccccaacuucaaccaguacgaggccaugagcugcgacuucaacgggggcaagaucuccgugcaguacaaccugagccacuccuacgccggggacgcggccaaccacugcggcacgguggccaacgggguccugcagaccuucaugcggauggccuggggcggcagcuacaucgcgcucgacuccgggcgcggcaacugggacugcaucaugaccagcuaccaguaccugaucauccagaacaccacgugggaggaccacugccaguucucccggcccagccccaucggguaccugggccuccugucccagcgcacccgggacaucuacaucagccgccggcugcucggcaccuucaccuggacgcugagcgacuccgaggggaaggacaccccgggcggguacugccugacccgcuggaugcucaucgaggccgagcugaagugcuucggcaacaccgccguggccaagugcaacgagaagcacgacgaggaguucugcgacaugcugcggcuguucgacuucaacaagcaggccauccagcgccugaaggcggaggcccagaugagcauccagcugaucaacaaggccgugaacgcccucaucaacgaccagcugaucaugaagaaccaccuccgggacaucauggggauccccuacugcaacuacuccaaguacugcuaccucaaccacacgaccaccggccgcaccagccugcccaagugcugccuggucuccaacggcagcuaccucaacgagacgcacuucuccgacgacaucgagcagcaggccgacaacaugaucaccgagaugcugcagaaggaguacauggagcggcaggggaagacgccccugggccugguggaccucuucguguucagcaccuccuucuaccugaucagcaucuuccugcaccucgucaagaucccgacccaccgccacaucguggggaaguccugccccaagccccaccggcugaaccacaugggcaucugcagcugcgggcuguacaagcagcccggcgugccggucaaguggaagcgcugaggacuaguuauaagacugacuagcccgaugggccucccaacgggcccuccuccccuccuugcaccgagauuaauaaaaaaaaaaaaaaaaaaaaaaaaaaaaaaaaaaaaaaaaaaaaaaaaaaaaaaaaaaaaaaaaaaaaaaaaaaaaaaaaaaaaaaaaaaaaaaaaaaaa

SEQ ID NO: 39814 - RNA, 1662 nt, Artificial Sequence
  mRNA product Design i-3 (A100) comprising derived and/or modified sequence from LASV(LP;Clade I)__AAF86701__GPCmut11 (opt1)
aggagaaagcuuaccaugggccagaucaucaccuucuuccaggaggugccccacgucaucgaggaggugaugaacaucgugcugaucgcccucagccugcuggccauccucaaggggcuguacaacaucgcgaccugcggcaucaucgggcuggucgccuuccucuuccugugcggcaaguccugcagccugacgcucaagggcggguacgagcugcagacccuggagcucaacauggagacccugaacaugaccaugccgcuguccugcacgaagaacagcucccaccacuacauccgcgugggcaacgagaccgggcucgagcugacccugaccaacacgagcaucaucaaccacaaguucugcaaccucuccgacgcccacaagaagaaccuguacgaccacgcccugaugagcaucaucuccaccuuccaccucagcauccccaacuucaaccaguacgaggccauguccugcgacuucaacggcgggaagaucagcgugcaguacaaccugucccacagcuacgcgggcgacgccgccgagcacugcgggaccgucgccaacggcgugcugcagaccuucaugcggauggcguggggcgggcgcuacaucgcccucgacuccggcaaggggaacugggacugcaucaugacgagcuaccaguaccugaucauccagaacaccaccugggaggaccacugccaguucucccggcccagccccaucggcuaccugggccuccugucccagcgcacccgggacaucuacaucagccgccggcugcucgggacguucaccuggacccugagcgacuccgagggcaacgagacccccgggggcuacugccugacgcgcuggaugcucaucgaggccgagcugaagugcuucgggaacaccgccguggccaagugcaacgagaagcacgacgaggaguucugcgacaugcugcggcuguucgacuucaacaagcaggcgauccgccggcugaaggccgaggcccagaugagcauccagcugaucaacaaggccgucaacgcccucaucaacgaccagcugaucaugaagaaccaccuccgcgacaucaugggcauccccuacugcaacuacuccaaguacugcuaccucaaccacaccagcuccggccggaccagccugcccaagugcugccugaucuccaacgggagcuaccucaacgagacgcaguucuccgacgacaucgagcagcaggcggacaacaugaucaccgagaugcugcagaaggaguacaucgagcgccagggcaagaccccgcuggggcugguggacaucuucaucuucagcaccuccuucuaccucaucagcaucuuccugcaccugaucaagaucccgacgcaccggcacaucgugggcaagcccugccccaagccccaccgccucaaccacaugggggucugcuccugcggccuguacaagcacccgggcgugcccaccaaguggaagcggugaggacuaguuauaagacugacuagcccgaugggccucccaacgggcccuccuccccuccuugcaccgagauuaauaaaaaaaaaaaaaaaaaaaaaaaaaaaaaaaaaaaaaaaaaaaaaaaaaaaaaaaaaaaaaaaaaaaaaaaaaaaaaaaaaaaaaaaaaaaaaaaaaaaa

SEQ ID NO: 39815 - RNA, 1662 nt, Artificial Sequence
  mRNA product Design i-3 (A100) comprising derived and/or modified sequence from LASV(803213;Clade II)__AAF86703__GPCmut11 (opt1)
aggagaaagcuuaccaugggccagaucaucaccuucuuccaggaggugccccacgucaucgaggaggugaugaacaucgugcugaucgcccucagccugcuggccauccucaaggggaucuacaacgucgcgaccugcggccuguucgggcugaucuccuuccuccugcugugcggccgcagcugcuccgugacguacaaggggguguacgagcuccagacccuggagcugaacauggccaaccucaacaugaccaugccgcugagcugcaccaagaacaacucccaccacuacaucauggucggcaacgagacgggccuggagcucacccugaccaacaccagcaucaucaaccacaaguucugcaaccuguccgacgcccacaagaagaaccucuacgaccacgcccugaugagcaucaucuccacguuccaccugagcauccccaacuucaaccaguacgaggccauguccugcgacuucaacgggggcaagaucagcgugcaguacaaccucucccacagcuucgcgguggacgccgccaaccacugcgggaccaucgccaacggcguccugcagaccuucaugcggauggcguggggcggguccuacaucgcccuggacagcggcaaggggaacugggacugcaucaugaccuccuaccaguaccucaucauccagaacacgaccugggaggaccacugccaguucagccgccccucccccaucggcuaccuggggcugcucagccagcggacccgcgacaucuacaucagccggcgccugcugggcaccuucacguggacccucuccgacagcgagggcaacgaggcccccgggggcuacugccugacccgguggaugcugaucgaggccgagcucaagugcuucgggaacaccgccguggcgaagugcaacgagaagcacgacgaggaguucugcgacaugcugcgccuguucgacuucaacaagcaggccaucaagcggcucaagacggaggcccagauguccauccagcugaucaacaaggccgugaacgcccugaucaacgaccagcucaucaugaagaaccaccuccgcgacaucaugggcauccccuacugcaacuacagccgguacugcuaccugaaccacaccgucaccgggaagaccucccugccccgcugcugccuggugagcaacggcuccuaccugaacgagacgcacuucagcgacgacaucgagcagcaggcggacaacaugaucaccgagaugcuccagaaggaguacauggaccggcagggcaagaccccgcuggggcugguggaccuguucgucuucuccaccagcuucuaccucaucuccaucuuccugcaccuggugaagaucccgacgcaccgccacaucgugggcaagcccugccccaagccccaccggcucaaccacauggggaucugcagcugcggccuguacaagcacccggggguccccgugaaguggaagcgcugaggacuaguuauaagacugacuagcccgaugggccucccaacgggcccuccuccccuccuugcaccgagauuaauaaaaaaaaaaaaaaaaaaaaaaaaaaaaaaaaaaaaaaaaaaaaaaaaaaaaaaaaaaaaaaaaaaaaaaaaaaaaaaaaaaaaaaaaaaaaaaaaaaaa

SEQ ID NO: 39816 - RNA, 1662 nt, Artificial Sequence
  mRNA product Design i-3 (A100) comprising derived and/or modified sequence from LASV(GA391;Clade III)__CAA36645__GPCmut11 (opt1)
aggagaaagcuuaccaugggccagaucgugaccuucuuccaggaggucccccacgugaucgaggaggugaugaacaucguccugaucgcccucagcauccuggccauccugaaggggcucuacaacguggcgaccugcggccugaucgggcuggugacguuccuccugcuguccggccgcagcugcucccucaucuacaaggggaccuacgagcugcagacccuggagcucaacauggagacccugaacaugacgaugccgcugagcugcaccaagaacaacucccaccacuacauccgggucggcaacgagaccggccucgagcugacccugacgaacaccagcauccucaaccacaaguucugcaaccuguccgacgcccacaagcgcaaccuguacgaccacagccucauguccaucaucagcaccuuccaccuguccauccccaacuucaaccaguacgaggccaugagcugcgacuucaacgggggcaagaucaccgugcaguacaaccugucccacagcuucgccguggacgccgcggggcacugcggcacgcucgccaacgggguccugcagaccuucaugcggauggccuggggcggcuccuacaucgcccuggacagcgggcgcggcaacugggacugcaucaugaccuccuaccaguaccucaucauccagaacaccacgugggacgaccacugccaguucagccggcccucccccaucggguaccugggccugcucagccagcgcacccgggacaucuacaucagccgccggcugcugggcaccuucaccuggacgcucuccgacagcgaggggaacgagaccccgggcggguacugccugacccgcuggaugcugaucgaggcggagcucaagugcuucggcaacaccgccguggccaagugcaacgagaagcacgacgaggaguucugcgacaugcugcggcuguucgacuucaacaagcaggccauccgccggcucaagacggaggcccagauguccauccagcugaucaacaaggcggugaacgcccugaucaacgaccagcucaucaugaagaaccaccuccgcgacaucauggggauccccuacugcaacuacagccgguacugcuaccugaaccacaccuccaccggcaagaccagccugccccgcugcugccugaucuccaacggcagcuaccugaacgagacgaaguucuccgacgacaucgagcagcaggccgacaacaugaucaccgagaugcugcagaaggaguacaucgaccggcaggggaagacgccccucggccuggucgaccuguucguguucagcaccuccuucuaccucaucagcaucuuccugcaccuggugaagaucccgacccaccgccacaucgucgggaagcccugccccaagccccaccggcucaaccacaugggcaucugcuccugcgggcuguacaagcagccgggcgugcccgugcgcuggaagcggugaggacuaguuauaagacugacuagcccgaugggccucccaacgggcccuccuccccuccuugcaccgagauuaauaaaaaaaaaaaaaaaaaaaaaaaaaaaaaaaaaaaaaaaaaaaaaaaaaaaaaaaaaaaaaaaaaaaaaaaaaaaaaaaaaaaaaaaaaaaaaaaaaaaa

SEQ ID NO: 39817 - RNA, 1665 nt, Artificial Sequence
  mRNA product Design i-3 (A100) comprising derived and/or modified sequence from LASV(AV;Clade V)__CCA30314__GPCmut11 (opt1)
aggagaaagcuuaccaugggccagaucgugaccuucuuccaggaggucccccacgugaucgaggaggugaugaacaucguccugaucgcccucagcauccuggccgugcugaaggggcucuacaacaucgcgaccugcggccugaucgggcugaucacguuccuccugcugugcggccgcuccugcagcuccaaccucuacaaggggguguacgagcugcagagccuggaccucaacauggagacccugaacaugaccaugccgcuguccugcaccaagaacaacagccaccacuacauccgggucggcaacgacacgggccucgagcugacccugaccaacaccuccauccucaaccacaaguucugcaaccugagcgacgcccacaagaaggaccuguacgaccacgcccucauguccaucaucagcacguuccaccuguccauccccaacuucaaccaguacgaggccaugagcugcgacuucaacgggggcaagaucuccgugcaguacaaccugagccacuccuacgccaucgacgcggccaaccacugcgggaccguggccaacggcauccuccagaccuucaugcgcauggccuggggcgggagcuacaucgcgcuggacuccggccgggggaacugggacugcaucaugaccagcuaccaguaccugaucauccagaacacgaccugggagaaccacugccaguucucccgccccagccccaucggcuaccucgggcugcugagccagcggacccgcgacaucuacaucucccggcgccuccugggcaccuucacguggacccugagcgacuccgagggcaacgccacccccgggggcuacugccucacccgguggaugcugaucgaggccgagcugaagugcuucgggaacacggccgucgccaagugcaacgagaagcacgacgaggaguucugcgacaugcuccgccuguucgacuucaacaagcaggcgaucagccggcugaaguccgaggcccagaugagcauccagcucaucaacaaggccgugaacgcccugaucaacgaccagcugaucaugaagaaccaccuccgcgacaucaugggcauccccuacugcaacuacuccaaguacugcuaccugaaccacaccaucaccgggaagaccagccugcccaagugcugccucguguccaacggcagcuaccugaacgagacgcacuucuccgacgacaucgagcagcaggccgacaacaugaucaccgagaugcugcagaaggaguacauggagcggcagggcaagaccccgcuggggcucgucgaccuguucguguucagcaccuccuucuaccugaucagcaucuuccuccgccuggugaagaucccgacgcaccggcacaucgucggcaagcccugccccaagccccaccgccugaaccacauggggaucugcuccugcggccucuacaagcagccgggggugcccgugcgguggaagcgcugaggacuaguuauaagacugacuagcccgaugggccucccaacgggcccuccuccccuccuugcaccgagauuaauaaaaaaaaaaaaaaaaaaaaaaaaaaaaaaaaaaaaaaaaaaaaaaaaaaaaaaaaaaaaaaaaaaaaaaaaaaaaaaaaaaaaaaaaaaaaaaaaaaaa

SEQ ID NO: 39818 - RNA, 1662 nt, Artificial Sequence
  mRNA product Design i-3 (A100) comprising derived and/or modified sequence from LASV(Togo/2016/7082;Clade VI)__AMR44577__GPCmut11 (opt1)
aggagaaagcuuaccaugggccagaucaucaccuucuuccaggaggugccccacgucaucgaggaggugaugaacaucgugcugaucgcccucagccugcuggccauccucaagggggucuacaacguggcgaccugcggcaucaucgggcuggugacguuccuguuccucugcggccgcuccugcagccugaucuacaagggguccuacgagcugcagacccucgagcugaacauggagacccugaacaugaccaugccgcucagcugcacgaagaacuccagccaccacuacauccgggucggcaacgagaccggccuggagcugacccucaccaacacguccaucaucaaccacaaguucugcaaccugagcgacgcccacaagcgcaaccuguacgaccacgcccucauguccauccugagcaccuuccaccuguccauccccaacuucaaccaguacgaggccaugagcugcgacuucaacgggggcaagaucuccgugcaguacaaccucagccacgccuacgcgguggacgccgccgagcacugcgggaccgucgccaacggcgugcugcagaccuucaugcggauggcguggggcggguccuacaucgcccuggacagcggccgcgggaacugggacugcaucaugacguccuaccaguaccucaucauccagaacaccaccugggaggaccacugccaguucagccggcccucccccaucggcuaccuggggcugcucagccagcgcacccgggacaucuacaucagccgccggcugcugggcacguucaccuggacccucuccgacagcgagggcaacgagacccccgggggcuacugccugacgcgcuggaugcugaucgaggccgagcucaagugcuucgggaacaccgccguggccaagugcaacgagaagcacgacgaggaguucugcgacaugcugcggcuguucgacuucaacaagcaggcgauccagcgccucaaguccgaggcccagaugagcauccagcugaucaacaaggccgucaacgcccugaucaacgaccagcucaucaugaagaaccaccuccgggacaugaugggcauccccuacugcaacuacuccaaguacugcuaccugaaccacaccagcuccgggcgcaccagccugcccaagugcugccugguguccaacggcagcuaccugaacgagacgcacuucuccgacgacaucgagcagcaggccgacaacaugaucaccgagaugcuccagaaggaguacaucgaccggcagggcaagaccccgcuggggcugguggaccuguucgucuucagcaccuccuucuaccucaucagcaucuuccugcaccugaucaagaucccgacgcaccgccacaucgugggcaagcccugccccaagccccaccggcucaaccacauggggaucugcuccugcggccuguacaagcagccgggggugcccacccgcuggaagcggugaggacuaguuauaagacugacuagcccgaugggccucccaacgggcccuccuccccuccuugcaccgagauuaauaaaaaaaaaaaaaaaaaaaaaaaaaaaaaaaaaaaaaaaaaaaaaaaaaaaaaaaaaaaaaaaaaaaaaaaaaaaaaaaaaaaaaaaaaaaaaaaaaaaa

SEQ ID NO: 39819 - RNA, 1662 nt, Artificial Sequence
  mRNA product Design i-3 (A100) comprising derived and/or modified sequence from LASV(KAK-428;Clade n.d. (VII))__ANH09740__GPCmut11 (opt1)
aggagaaagcuuaccaugggccagaucgugaccuucuuccaggaggucccccacgugaucgaggaggugaugaacaucguccugaucgcccucagccugcuggccauccucaaggggcuguacaacuucgcgaccugcggcgugaucgggcugaucacguuccuccugcugugcggccgcuccugcagcgccaccuacaaggggcaguacgagcuccagacccuggagcugaacauggagucccucaacaugaccaugccgcugagcugcacgaagaacaacucccaccacuacauccgggccggcaacaacaccggccuggagcucacccugaccaacacgagcaucaucucccacaaguucugcaaccugagcgacgcccacaagaagaaccucuacgaccacacccugauguccaucaucaccaccuuccaccugagcauccccaacuucaaccaguacgaggccauguccugcgacuucaacgggggcaagaucagcauccaguacaaccucucccacagcuacgcgggggacgccgcccagcacugcggcacgguggccaacgggguccugcagaccuucaugcgcauggcguggggcggcuccuaccuggcccucgacagcgggcggcgcggcugggacugcaucaucuccagcuaccaguaccugaucauccagaacaccaccugggacgaccacugccaguucucccggcccagccccaucggguaccugggcuucgugagccagaagacgcgcgacaucuacaucucccggcgccuccugggcaccuucaccuggacccugagcgacuccgaggggcacgacaugccgggcggguacugccucacgcgguggaugcugaucgaggccgaccugaagugcuucggcaacaccgccguggccaagugcaacgagaagcacgacgaggaguucugcgacauguggcgccucuucgacuucaacaagcaggcgauccagcggcugaaggccgaggcccagaugaacauccagcugaucaacaaggccgucaacgcccucaucaacgaccagcugaugaugaagaaccaccuccgcgacaucauggggauccccuacugcaacuacagcaaguucugcuaccugaacaacaccaccacgggccggaccucccugccccgcugcugccugaucagcaacggcuccuaccucaacgagacccacuucagcgacgacaucgagcagcaggcggacaacaugaucaccgagaugcugcagaaggaguacauggaccggcaggggaagacgccccugggccucguggaccuguucguguucuccaccagcuucuaccugaucaccaucuuccugcaccucgucaagaucccgacccaccgccacaucguggggaagcccugccccaagccccaccggcugaaccacaugggcaucugcuccugcgggcuguacaagcagccgggcgugcccguccgcuggaagcggugaggacuaguuauaagacugacuagcccgaugggccucccaacgggcccuccuccccuccuugcaccgagauuaauaaaaaaaaaaaaaaaaaaaaaaaaaaaaaaaaaaaaaaaaaaaaaaaaaaaaaaaaaaaaaaaaaaaaaaaaaaaaaaaaaaaaaaaaaaaaaaaaaaaa

SEQ ID NO: 39820 - RNA, 1662 nt, Artificial Sequence; identical to SEQ ID NO: 39814
  mRNA product Design i-3 (A100) comprising derived and/or modified sequence from LASV(Pinneo-NIG-1969;Clade I)__AIT17836__GPCmut11 (opt1)

SEQ ID NO: 39821 - RNA, 1662 nt, Artificial Sequence
  mRNA product Design i-3 (A100) comprising derived and/or modified sequence from LASV(ISTH0009-NIG-2011;Clade II)__AIT17404__GPCmut11 (opt1)
aggagaaagcuuaccaugggccagaucaucaccuucuuccaggaggugccccacgucaucgaggaggugaugaacaucgugcugaucgcccucagccugcuggccauccucaaggggaucuacaacgucgcgaccugcggccuguucgggcugguguccuuccuccugcugugcggccgcagcugcuccacgaccuacaaggggguguacgagcuccagacccuggagcuggacauggccagccucaacaugaccaugccgcuguccugcacgaagaacaacagccaccacuacaucauggucggcaacgagaccggccuggagcucacccugaccaacacguccaucaucaaccacaaguucugcaaccugagcgacgcccacaagaagaaccucuacgaccacgcccugauguccaucaucagcaccuuccaccuguccauccccaacuucaaccaguacgaggccaugagcugcgacuucaacgggggcaagaucuccgugcaguacaaccucagccacgcguacgccguggacgccgccaaccacugcgggaccaucgcgaacggcguccugcagaccuucaugcggauggccuggggcggguccuacaucgcccuggacagcggcaagggguccugggacugcaucaugacgagcuaccaguaccucaucauccagaacaccaccugggaggaccacugccaguucucccgccccagccccaucggcuaccuggggcugcucagccagcggacccgcgacaucuacaucucccggcgccugcugggcacguucaccuggacccucagcgacuccgagggcaacgagacccccgggggcuacugccugacgcgguggaugcugaucgaggccgagcucaagugcuucgggaacaccgccguggcgaagugcaacgagaagcacgacgaggaguucugcgacaugcugcgccuguucgacuucaacaagcaggccauccggcgccucaagaccgaggcccagaugagcauccagcugaucaacaaggccgugaacgcccugaucaacgaccagcucaucaugaagaaccaccuccgggacaucaugggcaucccguacugcaacuacuccaaguacugcuaccugaaccacaccgucacggggaagaccagccugccccgcugcugccugguguccaacggcagcuaccugaacgagacccacuucuccgacgacaucgagcagcaggcggacaacaugaucaccgagcuccugcagaaggaguacauggaccggcagggcaagacgccccuggggcugguggaccucuucgucuucagcaccuccuucuaccugaucagcaucuuccugcaccucaucaagaucccgacccaccgccacaucaccggcaagcccugccccaagccccaccggcugaaccacauggggaucugcuccugcggccuguacaagcacccgggggugcccgugaaguggaagcgcugaggacuaguuauaagacugacuagcccgaugggccucccaacgggcccuccuccccuccuugcaccgagauuaauaaaaaaaaaaaaaaaaaaaaaaaaaaaaaaaaaaaaaaaaaaaaaaaaaaaaaaaaaaaaaaaaaaaaaaaaaaaaaaaaaaaaaaaaaaaaaaaaaaaa

SEQ ID NO: 39822 - RNA, 1662 nt, Artificial Sequence
  mRNA product Design i-3 (A100) comprising derived and/or modified sequence from LASV(ISTH2010-NIG-2012;Clade II)__AIT17482__GPCmut11 (opt1)
aggagaaagcuuaccaugggccagaucaucaccuucuuccaggaggugccccacgucaucgaggaggugaugaacaucgugcugaucgcccucagccugcuggccauccucaaggggaucuacaacgucgcgaccugcggccuguucgggcugguguccuuccuccugcugugcggccgcagcugcuccacgaccuacaaggggguguacgagcuccagacccuggagcuggacauggccagccucaacaugaccaugccgcuguccugcacgaagaacaacagccaccacuacaucauggucggcaacgagaccggccuggagcucacccugaccaacacguccaucaucaaccacaaguucugcaaccugagcgacgcccacaagaagaaccucuacgaccacgcccugauguccaucaucagcaccuuccaccuguccauccccaacuucaaccaguacgaggccaugagcugcgacuucaacgggggcaagaucuccgugcaguacaaccucagccacgcguacgccguggacgccgccaaccacugcgggaccaucgcgaacggcguccugcagaccuucaugcggauggccuggggcggguccuacaucgcccuggacagcggcaagggguccugggacugcaucaugacgagcuaccaguaccucaucauccagaacaucaccugggaggaccacugccaguucucccgccccagccccaucggcuaccuggggcugcucagccagcggacccgcgacaucuacaucucccggcgccugcugggcaccuucacguggacccucagcgacuccgagggcaacgagacccccgggggcuacugccugacccgguggaugcugaucgaggccgagcucaagugcuucgggaacacggccguggcgaagugcaacgagaagcacgacgaggaguucugcgacaugcugcgccuguucgacuucaacaagcaggccauccggcgccucaagaccgaggcccagaugagcauccagcugaucaacaaggccgugaacgcccugaucaacgaccagcucaucaugaagaaccaccuccgggacaucaugggcauccccuacugcaacuacuccaaguacugcuaccugaaccacaccgucaccgggaagacgagccugccccgcugcugccugguguccaacggcagcuaccugaacgagacccacuucuccgacgacaucgagcagcaggcggacaacaugaucaccgagcuccugcagaaggaguacaucgaccggcagggcaagaccccgcuggggcugguggaccucuucgucuucagcacguccuucuaccugaucagcaucuuccugcaccucgugaagaucccgacccaccgccacguggucggcaagcccugccccaagccccaccggcugaaccacauggggaucugcuccugcggccuguacaagcacccgggggugcccgugaaguggaagcgcugaggacuaguuauaagacugacuagcccgaugggccucccaacgggcccuccuccccuccuugcaccgagauuaauaaaaaaaaaaaaaaaaaaaaaaaaaaaaaaaaaaaaaaaaaaaaaaaaaaaaaaaaaaaaaaaaaaaaaaaaaaaaaaaaaaaaaaaaaaaaaaaaaaaa

SEQ ID NO: 39823 - RNA, 1662 nt, Artificial Sequence
  mRNA product Design i-3 (A100) comprising derived and/or modified sequence from LASV(Lassa virus/H.sapiens-wt/NGA/2015/ISTH_0543;Clade II)__AVO03639__GPCmut11 (opt1)
aggagaaagcuuaccaugggccagaucaucaccuucuuccaggaggugccccacgucaucgaggaggugaugaacaucgugcugaucgcccucagccugcuggccauccucaaggggaucuacaacgucgcgaccugcggccuguucgggcugguguccuuccuccugcugugcggccgcagcugcuccacgaccuacaaggggguguacgagcuccagacccuggagcuggacauggccaaccucaacaugaccaugccgcugagcugcacgaagaacaacucccaccacuacaucauggucggcaacgagaccggccuggagcucacccugaccaacacgagcaucaucaaccacaaguucugcaaccuguccgacgcccacaagaagaaccucuacgaccacgcccugaugagcaucaucuccaccuuccaccugagcauccccaacuucaaccaguacgaggccauguccugcgacuucaacgggggcaagaucagcgugcaguacaaccucucccacaccuacgcgguggacgccgccaaccacugcgggaccaucgccaacggcguccugcagacguucaugcggauggcguggggcgggagcuacaucgcccuggacuccggcaaggggagcugggacugcaucaugaccuccuaccaguaccucgugauccagaacaccaccugggaggaccacugccaguucagccgccccucccccaucggcuaccuggggcugcucagccagcggacgcgcgacaucuacaucagccggcgccugcugggcaccuucaccuggacccucuccgacagcgagggcaacgagacgcccgggggcuacugccugacccgguggaugcugaucgaggccgagcucaagugcuucgggaacaccgccguggccaagugcaacgagaagcacgacgaggaguucugcgacaugcugcgccuguucgacuucaacaagcaggcgauccggcgccucaagaccgaggcccagauguccauccagcugaucaacaaggccgucaacgcccugaucaacgaccagcucaucaugaagaaccaccuccgggacaucaugggcauccccuacugcaacuacagcaaguacugcuaccugaaccacacggugaccgggaagaccucccugccccgcugcugccuggugagcaacggcuccuaccugaacgagacccacuucagcgacgacaucgagcagcaggccgacaacaugaucacggagcuccugcagaaggaguacaucgaccggcagggcaagaccccgcuggggcuggucgaccucuucguguucuccaccagcuucuaccugaucuccaucuuccugcaccucgugaagaucccgacccaccgccacaucacgggcaagcccugccccaagccccaccggcugaaccacauggggaucugcagcugcggccuguacaagcacccggggguccccgugaaguggaagcgcugaggacuaguuauaagacugacuagcccgaugggccucccaacgggcccuccuccccuccuugcaccgagauuaauaaaaaaaaaaaaaaaaaaaaaaaaaaaaaaaaaaaaaaaaaaaaaaaaaaaaaaaaaaaaaaaaaaaaaaaaaaaaaaaaaaaaaaaaaaaaaaaaaaaa

SEQ ID NO: 39824 - RNA, 1662 nt, Artificial Sequence
  mRNA product Design i-3 (A100) comprising derived and/or modified sequence from LASV(Lassa virus/H.sapiens-wt/NGA/2016/ISTH_0009;Clade II)__AVO03571__GPCmut11 (opt1)
aggagaaagcuuaccaugggccagaucaucaccuucuuccaggaggugccccacgucaucgaggaggugaugaacaucgugcugaucgcccucagccugcuggccauccucaaggggaucuacaacgucgcgaccugcggccugcuggggcucguguccuuccugcugcucugcggccgcagcugcuccacgaccuacaaggggguguacgagcugcagacccuggagcucgacauggccagccugaacaugaccaugccgcuguccugcacgaagaacaacagccaccacuacaucauggucggcaacgagaccggccucgagcugacccugaccaacacguccaucaucaaccacaaguucugcaaccucagcgacgcccacaagaagaaccuguacgaccacgcccugauguccaucaucagcaccuuccaccucuccauccccaacuucaaccaguacgaggccaugagcugcgacuucaacgggggccggaucuccgugcaguacaaccugagccacuccuacgcgguggacgccgccaaccacugcgggaccaucgccaacggcguccugcagaccuucaugcgcauggcguggggcgggagcuacaucgcccucgacuccggcaaggggagcugggacugcaucaugacguccuaccaguaccugaucauccagaacaccaccugggaggaccacugccaguucagccggcccagccccaucggcuaccuggggcuccugucccagcgcacccgggacaucuacaucagccgccggcugcucggcacguucaccuggacccuguccgacagcgagggcaacgagacccccgggggcuacugccugacgcgcuggaugcucaucgaggccgagcugaagugcuucgggaacaccgccguggccaagugcaacgagaagcacgacgaggaguucugcgacaugcugcggcuguucgacuucaacaagcaggcgauccgccggcugaagaccgaggcccagauguccauccagcugaucaacaaggccgugaacgcccucaucaacgaccagcugaucaugaagaaccaccuccgcgacaucaugggcaucccguacugcaacuacagcaaguacugcuaccucaaccacaccgucacggggaagaccucccugccccggugcugccuggugagcaacggcuccuaccucaacgagacccacuucagcgacgacaucgagcagcaggccgacaacaugaucaccgagcugcugcagaaggaguacaucgaccgccagggcaagacgccccuggggcucguggaccuguucgucuucuccaccagcuucuaccugaucuccaucuuccuccaccuggugaagaucccgacccaccggcacaucaccggcaagcccugccccaagccccaccgccugaaccacauggggaucugcagcugcggccucuacaaccacccgggggugcccgucaaguggaagcggugaggacuaguuauaagacugacuagcccgaugggccucccaacgggcccuccuccccuccuugcaccgagauuaauaaaaaaaaaaaaaaaaaaaaaaaaaaaaaaaaaaaaaaaaaaaaaaaaaaaaaaaaaaaaaaaaaaaaaaaaaaaaaaaaaaaaaaaaaaaaaaaaaaaa

SEQ ID NO: 39825 - RNA, 1662 nt, Artificial Sequence
  mRNA product Design i-3 (A100) comprising derived and/or modified sequence from LASV(Lassa virus/H.sapiens-wt/NGA/2016/ISTH_0017;Clade II)__AVO03567__GPCmut11 (opt1)
aggagaaagcuuaccaugggccagaucaucaccuucuuccaggaggugccccacgucaucgaggaggugaugaacaucgugcugaucgcccucagccugcuggccauccucaaggggaucuacaacgucgcgaccugcggccuguucgggcugguguccuuccuccugcugugcggccgcagcugcuccacgaccuacaaggggguguacgagcuccagacccuggagcuggacauggccagccucaacaugaccaugccgcuguccugcacgaagaacaacagccaccacuacaucauggucggcaacgagaccggccuggagcucacccugaccaacacguccaucaucaaccacaaguucugcaaccugagcgacgcccacaagaagaaccucuacgaccacgcccugauguccaucaucagcaccuuccaccuguccauccccaacuucaaccaguacgaggccaugagcugcgacuucaacgggggcaagaucuccgugcaguacaaccucagccacaccuacgcgaucgacgccgccaaccacugcgggaccaucgccaacggcgugcugcagacguucaugcggauggcguggggcggguccuacaucgcccuggacagcggcaagggguccugggacugcaucaugaccagcuaccaguaccucaucauccagaacaccaccugggaggaccacugccaguucucccgccccagccccaucggcuaccuggggcugcucagccagcggacgcgcgacaucuacaucucccggcgccugcugggcaccuucaccuggacccucagcgacuccgagggcaacgagacgcccgggggcuacugccugacccgguggaugcugaucgaggccgagcucaagugcuucgggaacaccgccgucgccaagugcaacgagaagcacgacgaggaguucugcgacaugcugcgccuguucgacuucaacaagcaggcgauccggcgccucaagaccgaggcccagaugagcauccagcugaucaacaaggccgugaacgcccugaucaacgaccagcucaucaugaagaaccaccuccgggacaucaugggcauccccuacugcaacuacuccaaguacugcuaccugaaccacacggugaccgggaagaccagccugccccgcugcugccuggucuccaacggcagcuaccugaacgagacccacuucuccgacgacaucgagcagcaggccgacaacaugaucacggagcuccugcagaaggaguacauggaccggcagggcaagaccccgcuggggcugguggaccucuucguguucagcaccuccuucuaccugaucagcaucuuccugcaccucguccgcaucccgacccaccggcacgugaucggcaagcccugccccaagccccaccgccugaaccacauggggaucugcuccugcggccuguacaagcacccgggggugcccgucaaguggaagcggugaggacuaguuauaagacugacuagcccgaugggccucccaacgggcccuccuccccuccuugcaccgagauuaauaaaaaaaaaaaaaaaaaaaaaaaaaaaaaaaaaaaaaaaaaaaaaaaaaaaaaaaaaaaaaaaaaaaaaaaaaaaaaaaaaaaaaaaaaaaaaaaaaaaa

SEQ ID NO: 39826 - RNA, 1662 nt, Artificial Sequence
  mRNA product Design i-3 (A100) comprising derived and/or modified sequence from LASV(Lassa virus/H.sapiens-wt/NGA/2018/ISTH_0959;Clade II)__AVV65099__GPCmut11 (opt1)
aggagaaagcuuaccaugggccagaucaucaccuucuuccaggaggugccccacgucaucgaggaggugaugaacaucgugcugaucgcccucagccugcuggccauccucaaggggaucuacaacgucgugaccugcggccuguucgggcugguguccuuccuccugcugugcggccgcagcugcuccacgaccuacaagggggucuacgagcuccagacccuggagcuggacauggcgagccucaacaugaccaugccgcuguccugcacgaagaacaacagccaccacuacaucauggugggcaacgagaccggccuggagcucacccugaccaacacguccaucaucaaccacaaguucugcaaccugagcgacgcccacaagaagaaccucuacgaccacgcccugauguccaucaucagcaccuuccaccuguccauccccaacuucaaccaguacgaggccaugagcugcgacuucaacgggggcaagaucuccgugcaguacaaccucagccacgccuacgcgaucgacgccgccaaccacugcgggaccaucgccaacggcguccugcagaccuucaugcggauggcguggggcggguccuacaucgcccuggacagcggcaagggguccugggacugcaucaugacgagcuaccaguaccucaucauccagaacaccaccugggaggaccacugccaguucucccgccccagccccaucggcuaccuggggcugcucagccagcggacccgcgacaucuacaucucccggcgccugcugggcacguucaccuggacccucagcgacuccgagggcaacgagacccccgggggcuacugccugacgcgguggaugcugaucgaggccgagcucaagugcuucgggaacaccgccguggccaagugcaacgagaagcacgacgaggaguucugcgacaugcugcgccuguucgacuucaacaagcaggcgauccggcgccucaagaccgaggcccagaugagcauccagcugaucaacaaggccgugaacgcccugaucaacgaccagcucaucaugaagaaccaccuccgggacaucaugggcaucccguacugcaacuacuccaaguacugcuaccugaaccacaccgucacggggaagaccagccugccccgcugcugccugguguccaacggcagcuaccugaacgagacccacuucuccgacgacaucgagcagcaggccgacaacaugaucaccgagcuccugcagaaggaguacaucgaccggcagggcaagacgccccuggggcugguggaccucuucgucuucagcaccuccuucuaccugaucagcaucuuccugcaccucgugaagaucccgacccaccgccacgugaucggcaagcccugccccaagccccaccggcugaaccacauggggaucugcuccugcggccuguacaagcacccggggguccccgugaaguggaagcgcugaggacuaguuauaagacugacuagcccgaugggccucccaacgggcccuccuccccuccuugcaccgagauuaauaaaaaaaaaaaaaaaaaaaaaaaaaaaaaaaaaaaaaaaaaaaaaaaaaaaaaaaaaaaaaaaaaaaaaaaaaaaaaaaaaaaaaaaaaaaaaaaaaaaa

SEQ ID NO: 39827 - RNA, 1662 nt, Artificial Sequence
  mRNA product Design i-3 (A100) comprising derived and/or modified sequence from LASV(LASV003-NIG-2008;Clade II)__AIT17580__GPCmut11 (opt1)
aggagaaagcuuaccaugggccagaucaucaccuucuuccaggaggugccccacgucaucgaggaggugaugaacaucgugcugaucgcccucagccugcuggccauccucaaggggaucuacaacgucgcgaccugcggccuguucgggcugguguccuuccuccugcugugcggccgcagcugcuccacgaccuacaaggggguguacgagcuccagacccuggagcuggacauggccagccucaacaugaccaugccgcuguccugcacgaagaacaacagccaccacuacaucauggucggcaacgagaccggccuggagcucacccugaccaacacguccaucaucaaccacaaguucugcaaccugagcgacgcccacaagaagaaccucuacgaccacgcccugauguccaucaucagcaccuuccaccuguccauccccaacuucaaccaguacgaggccaugagcugcgacuucaacgggggcaagaucuccgugcaguacaaccucagccacaccuacgcgguggacgccgccaaccacugcgggaccaucgccaacggcguccugcagacguucaugcggauggcguggggcggguccuacaucgcccuggacagcggcaagggguccugggacugcaucaugaccagcuaccaguaccucaucauccagaacaccaccugggaggaccacugccaguucucccgccccagccccaucggcuaccuggggcugcucagccagcggacgcgcgacaucuacaucucccggcgccugcugggcaccuucaccuggacccucagcgacuccgagagcaacgagacgccgggcggguacugccugacccgguggaugcugaucgaggccgagcucaagugcuucggcaacaccgccguggccaagugcaacgagaagcacgacgaggaguucugcgacaugcugcgccuguucgacuucaacaagcaggcgauccggcgccucaaggccgaggcccagauguccauccagcugaucaacaaggccgugaacgcccugaucaacgaccagcucaucaugaagaaccaccuccgggacaucauggggauccccuacugcaacuacagcaaguacugcuaccugaaccacaccgucacgggccgcaccucccugccccggugcugccuggugagcaacggguccuaccugaacgagacccacuucagcgacgacaucgagcagcaggcggacaacaugaucaccgagcuccugcagaaggaguacauggaccgccagggcaagacgccccugggccugguggaccucuucgucuucuccaccagcuucuaccugaucuccaucuuccugcaccucgugaagaucccgacccaccggcacgugaucgggaagcccugccccaagccccaccgccugaaccacaugggcaucugcagcugcgggcuguacaagcacccgggcguccccgugaaguggaagcggugaggacuaguuauaagacugacuagcccgaugggccucccaacgggcccuccuccccuccuugcaccgagauuaauaaaaaaaaaaaaaaaaaaaaaaaaaaaaaaaaaaaaaaaaaaaaaaaaaaaaaaaaaaaaaaaaaaaaaaaaaaaaaaaaaaaaaaaaaaaaaaaaaaaa

SEQ ID NO: 39828 - RNA, 1662 nt, Artificial Sequence
  mRNA product Design i-3 (A100) comprising derived and/or modified sequence from LASV(LASV035-NIG-2009;Clade II)__AIT17588__GPCmut11 (opt1)
aggagaaagcuuaccaugggccagaucaucaccuucuuccaggaggugccccacgucaucgaggaggugaugaacaucgugcugaucgcccucagccugcuggccauccucaaggggaucuacaacgucgcgaccugcggccuguucgggcugguguccuuccuccugcugugcggccgcagcugcuccacgaccuacaaggggguguacgagcuccagacccuggagcuggacauggccagccucaacaugaccaugccgcuguccugcacgaagaacaacagccaccacuacaucauggucggcaacgagaccggccuggagcucacccugaccaacacguccaucaucaaccacaaguucugcaaccugagcgacgcccacaagaagaaccucuacgaccacgcccugauguccaucaucagcaccuuccaccuguccauccccaacuucaaccaguacgaggccaugagcugcgacuucaacgggggcaagaucuccgugcaguacaaccucagccacgcguacgccguggacgccgccaaccacugcgggaccaucgcgaacggcguccugcagaccuucaugcggauggccuggggcggguccuacaucgcccuggacagcggcaagggguccugggacugcaucaugacgagcuaccaguaccucaucauccagaacaccaccugggaggaccacugccaguucucccgccccagccccaucggcuaccuggggcugcucagccagcggacccgcgacaucuacaucucccggcgccugcugggcacguucaccuggacccucagcgacuccgagggcaacgagacccccgggggcuacugccugacgcgguggaugcugaucgaggccgagcucaagugcuucgggaacaccgccguggcgaagugcaacgagaagcacgacgaggaguucugcgacaugcugcgccuguucgacuucaacaagcaggccauccggcgccucaaggccgaggcccagaugagcauccagcugaucaacaaggccgugaacgcgcugaucaacgaccagcucaucaugaagaaccaccuccgggacaucaugggcauccccuacugcaacuacuccaaguacugcuaccugaaccacaccgucaccgggaagacgagccugccccgcugcugccugguguccaacggcagcuaccugaacgagacccacuucuccgacgacaucgagcagcaggccgacaacaugaucaccgagcuccugcagaaggaguacaucgaccggcagggcaagaccccgcuggggcugguggaccucuucgucuucagcacguccuucuaccugaucagcaucuuccugcaccucgugaagaucccgacccaccgccacgugaucggcaagcccugccccaagccccaccggcugaaccacauggggaucugcuccugcggccuguacaagcacccggggguccccgugaaguggaagcgcugaggacuaguuauaagacugacuagcccgaugggccucccaacgggcccuccuccccuccuugcaccgagauuaauaaaaaaaaaaaaaaaaaaaaaaaaaaaaaaaaaaaaaaaaaaaaaaaaaaaaaaaaaaaaaaaaaaaaaaaaaaaaaaaaaaaaaaaaaaaaaaaaaaaa

SEQ ID NO: 39829 - RNA, 1662 nt, Artificial Sequence
  mRNA product Design i-3 (A100) comprising derived and/or modified sequence from LASV(LASV1000-NIG-2009;Clade II)__AIT17782__GPCmut11 (opt1)
aggagaaagcuuaccaugggccagaucaucaccuucuuccaggaggugccccacgucaucgaggaggugaugaacaucgugcugaucgcccucagccugcuggccauccucaaggggaucuacaacgucgcgaccugcggccuguucgggcugguguccuuccuccugcugugcggccgcagcugcuccacgaccuacaaggggguguacgagcuccagacccuggagcuggacauggccagccucaacaugaccaugccgcuguccugcacgaagaacaacagccaccacuacaucauggucggcaacgagaccggccuggagcucacccugaccaacacguccaucaucaaccacaaguucugcaaccugagcgacgcccacaagaagaaccucuacgaccacgcccugauguccaucaucagcaccuuccaccuguccauccccaacuucaaccaguacgaggccaugagcugcgacuucaacgggggcaagaucuccgugcaguacaaccucagccacaccuacgcgguggacgccgccaaccacugcgggaccaucgccaacggcguccugcagacguucaugcggauggcguggggcggguccuacaucgcccuggacagcggcaagggguccugggacugcaucaugaccagcuaccaguaccucaucauccagaacaccaccugggaggaccacugccaguucucccgccccagccccaucggcuaccuggggcugcucagccagcggacgcgcgacaucuacaucucccggcgccugcugggcaccuucaccuggacccucagcgacuccgagggcaacgagacgcccgggggcuacugccugacccgguggaugcugaucgaggccgagcucaagugcuucgggaacaccgccguggccaagugcaacgagaagcacgacgaggaguucugcgacaugcugcgccuguucgacuucaacaagcaggcgaucaagcggcucaagaccgaggcccagaugagcauccagcugaucaacaaggccgugaacgcccugaucaacgaccagcucaucaugaagaaccaccuccgcgacaucaugggcauccccuacugcaacuacuccaaguacugcuaccugaaccacacggucaccgggaagaccagccugccccggugcugccugguguccaacggcagcuaccugaacgagacccacuucuccgacgacaucgagcagcaggccgacaacaugaucacggagcuccugcagaaggaguacaucgaccgccagggcaagaccccgcuggggcugguggaccucuucgucuucagcaccuccuucuaccugaucagcaucuuccugcaccucgugaagaucccgacccaccggcacguggucggcaagcccugccccaagccccaccgccugaaccacauggggaucugcuccugcggccuguacaagcacccgggggugcccgugaaguggaagcggugaggacuaguuauaagacugacuagcccgaugggccucccaacgggcccuccuccccuccuugcaccgagauuaauaaaaaaaaaaaaaaaaaaaaaaaaaaaaaaaaaaaaaaaaaaaaaaaaaaaaaaaaaaaaaaaaaaaaaaaaaaaaaaaaaaaaaaaaaaaaaaaaaaaa

SEQ ID NO: 39830 - RNA, 1662 nt, Artificial Sequence
  mRNA product Design i-3 (A100) comprising derived and/or modified sequence from LASV(LASV221-NIG-2010;Clade II)__AIT17624__GPCmut11 (opt1)
aggagaaagcuuaccaugggccagaucaucaccuucuuccaggaggugccccacgucaucgaggaggugaugaacaucgugcugaucgcccucagccugcuggccauccucaaggggaucuacaacgucgcgaccugcggccuguucgggcugguguccuuccuccugcugugcggccgcagcugcuccacgaccuacaaggggguguacgagcuccagacccuggagcuggacauggccagccucaacaugaccaugccgcuguccugcacgaagaacaacagccaccacuacaucauggucggcaacgagaccggccuggagcucacccugaccaacacguccaucaucaaccacaaguucugcaaccugagcgacgcccacaagaagaaccucuacgaccacgcccugauguccaucaucagcaccuuccaccuguccauccccaacuucaaccaguacgaggccaugagcugcgacuucaacgggggcaagaucuccgugcaguacaaccucagccacaccuacgcgaucgacgccgccaaccacugcgggaccaucgccaacggcgugcugcagacguucaugcggauggcguggggcggguccuacaucgcccuggacagcggcaagggguccugggacugcaucaugaccagcuaccaguaccucaucauccagaacaccaccugggaggaccacugccaguucucccgccccagccccaucggcuaccuggggcugcucagccagcggacgcgcgacaucuacaucucccggcgccugcugggcaccuucaccuggacccucagcgacuccgagggcaacgagacgcccgggggcuacugccugacccgguggaugcugaucgaggccgagcucaagugcuucgggaacaccgccgucgccaagugcaacgagaagcacgacgaggaguucugcgacaugcugcgccuguucgacuucaacaagcaggcgauccggcgccucaagaccgaggcccagaugagcauccagcugaucaacaaggccgugaacgcccugaucaacgaccagcucaucaugaagaaccaccuccgggacaucaugggcauccccuacugcaacuacuccaaguacugcuaccugaaccacacggugaccgggaagaccagccugccccgcugcugccuggucuccaacggcagcuaccugaacgagacccacuucuccgacgacaucgagcagcaggccgacaacaugaucacggagaugcuccagaaggaguacauggaccggcagggcaagaccccgcuggggcugguggaccuguucguguucagcaccuccuucuaccucaucagcaucuuccugcaccuggucaagaucccgacccaccgccacgugaucggcaagcccugccccaagccccaccggcucaaccacauggggaucugcuccugcggccuguacaagcacccgggggugcccgucaaguggaagcgcugaggacuaguuauaagacugacuagcccgaugggccucccaacgggcccuccuccccuccuugcaccgagauuaauaaaaaaaaaaaaaaaaaaaaaaaaaaaaaaaaaaaaaaaaaaaaaaaaaaaaaaaaaaaaaaaaaaaaaaaaaaaaaaaaaaaaaaaaaaaaaaaaaaaa

SEQ ID NO: 39831 - RNA, 1662 nt, Artificial Sequence
  mRNA product Design i-3 (A100) comprising derived and/or modified sequence from LASV(LASV237-NIG-2010;Clade II)__AIT17638__GPCmut11 (opt1)
aggagaaagcuuaccaugggccagaucaucaccuucuuccaggaggugccccacgucaucgaggaggugaugaacaucgugcugaucgcccucagccugcuggccauccucaaggggaucuacaacgucgcgaccugcggccuguucgggcugguguccuuccuccugcugugcggccgcagcugcuccacgaccuacaaggggguguacgagcuccagacccuggagcuggacauggccagccucaacaugaccaugccgcuguccugcacgaagaacaacagccaccacuacaucauggucggcaacgagaccggccuggagcucacccugaccaacacguccaucaucaaccacaaguucugcaaccugagcgacgcccacaagaaggaccucuacgaccacgcccugauguccaucaucagcaccuuccaccuguccauccccaacuucaaccaguacgaggccaugagcugcgacuucaacgggggcaagaucuccgugcaguacaaccucagccacaccuacgcgguggacgccgccaaccacugcgggaccaucgccaacggcguccugcagacguucaugcggauggcguggggcggguccuacaucgcccuggacagcggcaagggguccugggacugcaucaugaccagcuaccaguaccucaucauccagaacaccaccugggaggaccacugccaguucucccgccccagccccaucggcuaccuggggcugcucagccagcggacgcgcgacaucuacaucucccggcgccugcugggcaccuucaccuggacccucagcgacuccgagggcaacgagacgcccgggggcuacugccugacccgguggaugcugaucgaggccgagcucaagugcuucgggaacaccgccguggccaagugcaacgagaagcacgacgaggaguucugcgacaugcugcgccuguucgacuucaacaagcaggcgauccggcgccucaagaccgaggcccagaugagcauccagcugaucaacaaggccgugaacgcccugaucaacgaccagcucaucaugaagaaccaccuccgggacaucaugggcauccccuacugcaacuacuccaaguacugcuaccugaaccacacggucaccgggaagaccagccugccccgcugcugccugguguccaacggcagcuaccugaacgagacccacuucuccgacgacaucgagcagcaggccgacaacaugaucacggagcuccugcagaaggaguacauggaccggcagggcaagaccccgcuggggcugguggaccucuucgucuucagcaccuccuucuaccugaucagcaucuuccugcaccucaucaagaucccgacccaccgccacaucacgggcaagcccugccccaagccccaccggcugaaccacauggggaucugcuccugcggccuguacaagcacccgggggugcccgugaaguggaagcgcugaggacuaguuauaagacugacuagcccgaugggccucccaacgggcccuccuccccuccuugcaccgagauuaauaaaaaaaaaaaaaaaaaaaaaaaaaaaaaaaaaaaaaaaaaaaaaaaaaaaaaaaaaaaaaaaaaaaaaaaaaaaaaaaaaaaaaaaaaaaaaaaaaaaa

SEQ ID NO: 39832 - RNA, 1662 nt, Artificial Sequence
  mRNA product Design i-3 (A100) comprising derived and/or modified sequence from LASV(LASV253-NIG-2011;Clade II)__AIT17670__GPCmut11 (opt1)
aggagaaagcuuaccaugggccagaucaucaccuucuuccaggaggugccccacgucaucgaggaggugaugaacaucgugcugaucgcccucagccugcuggccauccucaaggggaucuacaacgucgcgaccugcggccuguucgggcugguguccuuccuccugcugugcggccgcagcugcuccacgaccuacaaggggguguacgagcuccagacccuggagcuggacauggccagccucaacaugaccaugccgcuguccugcacgaagaacaacagccaccacuacaucauggucggcaacgagaccggccuggagcucacccugaccaacacguccaucaucaaccacaaguucugcaaccugagcgacgcccacaagaagaaccucuacgaccacgcccugauguccaucaucagcaccuuccaccuguccauccccaacuucaaccaguacgaggccaugagcugcgacuucaacgggggcaagaucuccgugcaguacaaccucagccacaccuacgcgguggacgccgccaaccacugcgggaccaucgccaacggcguccugcagacguucaugcggauggcguggggcggguccuacaucgcccuggacagcggcaagggguccugggacugcaucaugaccagcuaccaguaccucaucauccagaacaccaccugggaggaccacugccaguucucccgccccagccccaucggcuaccuggggcugcucagccagcggacgcgcgacaucuacaucucccggcgccugcugggcaccuucaccuggacccucagcgacuccgagggcaacgagacgcccgggggcuacugccugacccgguggaugcugaucgaggccgagcucaagugcuucgggaacaccgccguggccaagugcaacgagaagcacgacgaggaguucugcgacaugcugcgccuguucgacuucaacaagcaggcgauccggcgccucaaggccgaggcccagaugagcauccagcugaucaacaaggccgugaacgcccugaucaacgaccagcucaucaugaagaaccaccuccgggacaucaugggcaucccguacugcaacuacuccaaguacugcuaccugaaccacaccgucacggggcgcaccagccugccccggugcugccugguguccaacggcagcuaccugaacgagacccacuucuccgacgacaucgagcagcaggcggacaacaugaucaccgagcuccugcagaaggaguacaucgaccgccagggcaagacgccccuggggcugguggaccucuucgucuucagcaccuccuucuaccugaucagcaucuuccugcaccucgugaagaucccgacccaccggcacaucaucggcaagcccugccccaagccccaccgccugaaccacauggggaucugcuccugcggccuguacaagcacccgggggugcccgucaaguggaagcggugaggacuaguuauaagacugacuagcccgaugggccucccaacgggcccuccuccccuccuugcaccgagauuaauaaaaaaaaaaaaaaaaaaaaaaaaaaaaaaaaaaaaaaaaaaaaaaaaaaaaaaaaaaaaaaaaaaaaaaaaaaaaaaaaaaaaaaaaaaaaaaaaaaaa

SEQ ID NO: 39833 - RNA, 1662 nt, Artificial Sequence
  mRNA product Design i-3 (A100) comprising derived and/or modified sequence from LASV(LASV254-NIG-2011;Clade II)__AIT17674__GPCmut11 (opt1)
aggagaaagcuuaccaugggccagaucaucaccuucuuccaggaggugccccacgucaucgaggaggugaugaacaucgugcugaucgcccucagccugcuggccauccucaaggggaucuacaacgucgcgaccugcggccuguucgggcugguguccuuccuccugcugugcggccgcagcugcuccacgaccuacaaggggguguacgagcuccagacccuggagcuggacaugaccaaccucaacaugacgaugccgcugagcugcaccaagaacaacucccaccacuacaucauggucggcaacgagaccggccuggagcucacccugacgaacaccagcaucaucaaccacaaguucugcaaccuguccgacgcccacaagaagaaccucuacaaccacgcccugaugagcaucaucuccaccuuccaccugagcauccccaacuucaaccaguacgaggccauguccugcgacuucaacgggggcaagaucagcgugcaguacaaccucucccacagcuacgccguggacgcggccaaccacugcgggaccaucgccaacggcguccugcagacguucaugcggauggccuggggcggguccuacaucgcgcuggacagcggcaaggggaacugggacugcaucaugaccuccuaccaguaccucaucauccagaacaccaccugggaggaccacugccaguucagccgccccucccccaucggcuaccuggggcugcucagccagcggacgcgcgacaucuacaucagccggcgccugcugggcaccuucaccuggacccucuccgacagcgagggcaacgagacgcccgggggcuacugccugacccgguggaugcugaucgaggccgagcucaagugcuucgggaacaccgccguggccaagugcaacgagaagcacgacgaggaguucugcgacaugcugcgccuguucgacuucaacaagcaggccauccggcgccucaagaccgaggcgcaggccaacauccagcugaucaacaaggccgugaacgcccugaucaacgaccagcucaucaugaagaaccaccuccgggacaucaugggcauccccuacugcaacuacuccaaguacugcuaccugaaccacacggucaccgggaagaccagccugccccgcugcugccugguguccaacggcagcuaccugaacgagacccacuucuccgacgacaucgagcagcaggccgacaacaugaucacggagcuccugcagaaggaguacauggaccggcagggcaagaccccgcuggggcugguggaccucuucgucuucagcaccuccuucuaccugaucagcaucuuccugcaccucgugaagaucccgacccaccgccacgugaucggcaagcccugccccaagccccaccggcugaaccacauggggaucugcuccugcggccuguacaagcacccggggguccccgugaaguggaagcgcugaggacuaguuauaagacugacuagcccgaugggccucccaacgggcccuccuccccuccuugcaccgagauuaauaaaaaaaaaaaaaaaaaaaaaaaaaaaaaaaaaaaaaaaaaaaaaaaaaaaaaaaaaaaaaaaaaaaaaaaaaaaaaaaaaaaaaaaaaaaaaaaaaaaa

SEQ ID NO: 39834 - RNA, 1662 nt, Artificial Sequence
  mRNA product Design i-3 (A100) comprising derived and/or modified sequence from LASV(Nig08-A19;Clade III)__ADU56618__GPCmut11 (opt1)
aggagaaagcuuaccaugggccagaucgugaccuucuuccaggaggucccccacgugaucgaggaggugaugaacaucguccugaucgcccucagcauccuggccauccugaaggggcucuacaacaucgcgaccugcggccugaucgggcuggugacguuccuccugcuguccggccgcagcugcuccaugaccuacaaggggguguacgagcuccagacccuggagcugaacaugaacacccucaacaugacgaugccgcugagcugcaccaagaacaacucccaccacuacaucauggucggcaacgagaccggccuggagcucacccugacgaacaccagccugcuccaccacaaguucugcaaccuguccgacgcccacaagaagaaccuguacgaccacacccucaugagcaucaucuccaccuuccaccugagcauccccaacuucaaccaguacgaggccauguccugcgacuucaacgggggcaagaucacggugcaguacaaccugagccacuccuacgccaucgacgccgcgaaccacugcgggaccguggccaacggcguccuccagaccuucaugcggauggccuggggcgggagcuacaucgcccuggacuccggccgcgggaagugggacugcaucaugaccagcuaccaguaccugaucauccagaacacgaccugggaggaccacugccaguucucccggcccagccccaucggcuaccucgggcugcugucccagcgcacccgggacaucuacaucagccgccggcuccugggcaccuucacguggacccugagcgacuccgagggcaacgagacccccgggggcuacugccucacccgcuggaugcugaucgaggcggagcugaagugcuucgggaacacggccguggccaagugcaacgagaagcacgacgaggaguucugcgacaugcuccggcuguucgacuucaacaagcaggccauccgccggcugaaggccgaggcgcagaugagcauccagcucaucaacaaggccgugaacgcccugaucaacgaccagcugaucaugaagaaccaccuccgcgacaucaugggcauccccuacugcaacuacuccaaguacugcuaccugaaccacaccagcaccgggcggaccucccugccccgcugcugccucgucagcaacggcuccuaccugaacgagacgcacuucagcgacgacaucgagcagcaggccgacaacaugaucaccgagaugcugcagaaggaguaccuggaccggcagggcaagaccccgcucgggcugguggaccuguucguguucuccaccagcuucuaccucaucuccaucuuccugcaccuggucaagaucccgacgcaccgccacaucgugggcaagcccugccccaagccccaccggcucaaccacauggggaucugcagcugcggccuguacaagcagccgggggugcccguccgcuggaagcggugaggacuaguuauaagacugacuagcccgaugggccucccaacgggcccuccuccccuccuugcaccgagauuaauaaaaaaaaaaaaaaaaaaaaaaaaaaaaaaaaaaaaaaaaaaaaaaaaaaaaaaaaaaaaaaaaaaaaaaaaaaaaaaaaaaaaaaaaaaaaaaaaaaaa

SEQ ID NO: 39835 - RNA, 1665 nt, Artificial Sequence
  mRNA product Design i-3 (A100) comprising derived and/or modified sequence from LASV(G1180-SLE-2010;Clade IV)__AIT17168__GPCmut11 (opt1)
aggagaaagcuuaccaugggccagaucgugaccuucuuccaggaggucccccacgugaucgaggaggugaugaacaucguccugaucgcccucagcauccuggccgugcugaaggggcucuacaacuucgcgaccugcggccugguggggcugcucaccuuccugcugcucugcggccgcuccugcaccgccagccgguacaagggggucuacgagcugcagacccuggagcucaacauggagacccugaacaugacgaugccgcuguccugcaccaagaacaacagccaccacuacaucauggugggcaacgagaccggccucgagcugacccugacgaacaccuccaucaucaaccacaaguucugcaaccucagcgacgcccacaagaagaaccuguacgaccacgcccugauguccaucaucagcaccuuccaccucuccauccccaacuucaaccaguacgaggccaugagcugcgacuucaacgggggcaagaucuccgugcaguacaaccugagccacuccuacgcgggggacgccgccaaccacugcggcaccgucgccaacggggugcugcagacguucaugcgcauggcguggggcggcagcuacaucgcccucgacuccgggcacggcagcugggacugcaucaugaccuccuaccaguaccugaucauccagaacaccaccugggaggaccacugccaguucagccggcccucccccaucggguaccugggccuccugagccagcgcacgcgggacaucuacaucagccgccggcugcucggcaccuucaccuggacccuguccgacagcgaggggaaggacacgccgggcggguacugccugacccgcuggaugcucaucgaggccgagcugaagugcuucggcaacaccgccguggccaagugcaacgagaagcacgacgaggaguucugcgacaugcugcggcuguucgacuucaacaagcaggcgauccagcgccugaaggccgaggcccagauguccauccagcugaucaacaaggccgucaacgcccucaucaacgaccagcugaucaugaagaaccaccuccgggacaucauggggauccccuacugcaacuacagcaaguacugcuaccucaaccacaccacgaccggcaagaccucccugcccaagugcugccuggugagcaacggcuccuaccucaacgagacccacuucagcgacgacaucgagcagcaggcggacaacaugaucacggagaugcugcagaaggaguacauggagcgccaggggaagacgccccugggccugguggaccucuucgucuucuccaccagcuucuaccugaucuccaucuuccugcaccucgugaagaucccgacccaccggcacaucgugggcaagagcugccccaagccccaccgccugaaccacauggggaucugcuccugcgggcuguacaagcagcccggcgucccggugaaguggaagcggugaggacuaguuauaagacugacuagcccgaugggccucccaacgggcccuccuccccuccuugcaccgagauuaauaaaaaaaaaaaaaaaaaaaaaaaaaaaaaaaaaaaaaaaaaaaaaaaaaaaaaaaaaaaaaaaaaaaaaaaaaaaaaaaaaaaaaaaaaaaaaaaaaaaa

SEQ ID NO: 39836 - RNA, 1665 nt, Artificial Sequence
  mRNA product Design i-3 (A100) comprising derived and/or modified sequence from LASV(G1442-SLE-2011;Clade IV)__AIT17180__GPCmut11 (opt1)
aggagaaagcuuaccaugggccagaucgugaccuucuuccaggaggucccccacgugaucgaggaggugaugaacaucguccugaucgcccucagcauccuggccgugcugaaggggcucuacaacguggcgaccugcggccugaucgggcuggucacguuccuccugcugugcggccgcuccugcaccaccacccucuacaaggggguguacgagcugcagacgcuggagcucaacauggagacccugaacaugaccaugccgcugagcugcaccaagaacaacucccaccacuacauccgggugggcaacgagacgggccucgagcugacccugaccaacaccagcaucaucaaccacaaguucugcaaccucuccgacgcccacaagaagaaccuguacgaccacgcccugaugagcaucaucuccacguuccaccucagcauccccaacuucaaccaguacgaggccauguccugcgacuucaacgggggcaagaucagcguccaguacaaccugucccacagcuacgccggggacgcggccaaccacugcggcaccguggccaacggggugcugcagaccuucaugcgcauggccuggggcggcuccuacaucgcgcucgacagcgggcggggcaacugggacugcaucaugaccuccuaccaguaccugaucauccagaacacgaccugggacgaccacugccaguucagccgccccucccccaucggguaccugggccuccugagccagcggacccgcgacgucuacaucucccggcgccugcucggcaccuucacguggacccugagcgacagcgaggggaaggacaccccgggcggguacugccugacccgguggaugcucaucgaggccgagcugaagugcuucggcaacacggccguggccaagugcaacgagaagcacgacgaggaguucugcgacaugcugcgccucuucgacuucaacaagcaggccauccagcggcugaaggcggaggcccagauguccauccagcugaucaacaaggccgugaacgcccucaucaacgaccagcugaucaugaagaaccaccuccgcgacaucauggggauccccuacugcaacuacagcaaguacugcuaccugaacaacaccgccaccggcaagaccucccugcccaagugcugccugaucagcaacggcuccuaccucaacgagacgcacuucagcgacgacaucgagcaggaggcggacaacaugaucaccgagaugcugcagaaggaguacauggagcggcaggggaagacgccccugggccuggucgaccucuucguguucuccaccagcuucuaccugaucuccaucuuccugcaccucgugaagaucccgacccaccgccacaucgucggcaagagcugccccaagccccaccggcugaaccacauggggaucugcuccugcgggcuguacaagcagcccggcgugccggugcgcuggaagcggugaggacuaguuauaagacugacuagcccgaugggccucccaacgggcccuccuccccuccuugcaccgagauuaauaaaaaaaaaaaaaaaaaaaaaaaaaaaaaaaaaaaaaaaaaaaaaaaaaaaaaaaaaaaaaaaaaaaaaaaaaaaaaaaaaaaaaaaaaaaaaaaaaaaa

SEQ ID NO: 39837 - RNA, 1665 nt, Artificial Sequence
  mRNA product Design i-3 (A100) comprising derived and/or modified sequence from LASV(G3010-SLE-2013;Clade IV)__AIT17344__GPCmut11 (opt1)
aggagaaagcuuaccaugggccagaucgugaccuucuuccaggaggucccccacgugaucgaggaggugaugaacaucguccugaucgcccucagcauccuggccgugcugaaggggcucuacaacuucgcgaccugcggccugguggggcuggucacguuccuccugcugugcggccgcuccugcaccaccagccucuacaaggggguguacgagcugcagacccuggagcucaacauggagacgcugaacaugaccaugccgcuguccugcaccaagaacaacagccaccacuacaucauggugggcaacgagaccggccucgagcugacgcugaccaacaccuccaucaucaaccacaaguucugcaaccucagcgacgcccacaagaagaaccuguacaaccacgcccugauguccaucaucagcaccuuccaccucuccauccccaacuucaaccaguacgaggccaugagcugcgacuucaacgggggcaagaucuccguccaguacaaccugagccacuccuacgccggggacgcggccagccacugcggcacgguggccaacggggugcugcagaccuucaugcggauggccuggggcggcuccuacaucgcgcucgacagcggguacggcaagugggacugcaucaugaccuccuaccaguaccugaucauccagaacaccacgugggaggaccacugccaguucagccgccccucccccaucggguaccugggccuccugagccagcggacccgcgacaucuacaucagccggcgccugcucggcaccuucaccuggacgcuguccgacagcgaggggaaggacaccccgggcggguacugccugacccgguggaugcucaucgaggccgagcugaagugcuucggcaacaccgccgucgccaagugcaacgagaagcacgacgaggaguucugcgacaugcugcgccucuucgacuucaacaagcaggccauccagcggcugaagacggaggcgcagauguccauccagcugaucaacaaggccgugaacgcccucaucaacgaccagcugaucaugaagaaccaccuccgcgacaucauggggauccccuacugcaacuacagcaaguacugcuaccugaaccacaccaccaccggcaagacgucccugcccaagugcugccuggugagcaacggcuccuaccucaacgagacccacuucagcgacgacaucgagcagcaggccgacaacaugaucaccgagaugcugcagaaggaguacauggagcggcaggggaagacgccccugggccuggucgaccucuucguguucuccaccagcuucuaccugaucuccaucuuccugcaccucgugaagaucccgacccaccgccacaucgucggcaagagcugccccaagccccaccggcugaaccacauggggaucugcuccugcgggcuguacaagcagcccggcgugccggugcgcuggaagcggugaggacuaguuauaagacugacuagcccgaugggccucccaacgggcccuccuccccuccuugcaccgagauuaauaaaaaaaaaaaaaaaaaaaaaaaaaaaaaaaaaaaaaaaaaaaaaaaaaaaaaaaaaaaaaaaaaaaaaaaaaaaaaaaaaaaaaaaaaaaaaaaaaaaa

SEQ ID NO: 39838 - RNA, 1665 nt, Artificial Sequence
  mRNA product Design i-3 (A100) comprising derived and/or modified sequence from LASV(G502-SLE-2009;Clade IV)__AIT17126__GPCmut11 (opt1)
aggagaaagcuuaccaugggccagaucgugaccuucuuccaggaggucccccacgugaucgaggaggugaugaacaucguccugaucgcccucagcauccuggccgugcugaaggggcucuacaacuucgcgaccugcggccugguggggcugcucacguuccugcugcucugcggccgcuccugcaccaccgggcuguacaagggcgucuacgagcugcagacccucgagcugaacauggagacgcugaacaugaccaugccgcucagcugcaccaagaacaacucccaccacuacaucauggugggcaacgagaccgggcuggagcugacgcucaccaacaccagcaucaucaaccacaaguucugcaaccuguccgacgcccacaagaagaaccuguacgaccacgcccucaugagcaucaucuccaccuuccaccugagcauccccaacuucaaccaguacgaggccauguccugcgacuucaacggcgggaagaucagcgugcaguacaaccugucccacagcuacgccggcgacgcggccgaccacugcgggacggucgccaacggcgugcuccagaccuucaugcggauggccuggggcggguccuacaucgcgcuggacagcggccgcgggcggugggacugcaucaugaccuccuaccaguaccugaucauccagaacaccacgugggaggaccacugccaguucagccgccccucccccaucggcuaccucggccugcugagccagcggacccgcgacaucuacaucucccggcgccuccuggggaccuucaccuggacgcugagcgacagcgagggcaaggacacccccgggggcuacugccucacccgguggaugcugaucgaggccgagcugaagugcuucgggaacaccgccguggccaagugcaacgagaagcacgacgaggaguucugcgacaugcuccgccuguucgacuucaacaagcaggccauccagcggcugaaggcggaggcccagauguccauccagcucaucaacaaggccgucaacgcccugaucaacgaccagcuggugaugaagaaccaccuccgcgacaucaugggcauccccuacugcaacuacagccgguacugcuaccugaaccacacgaccaccggccgcaccucccugcccaagugcugccucgugagcaacggguccuaccugaacgagacgcacuucagcgacgacaucgagcagcaggccgacaacaugaucaccgagaugcugcagaaggaguacauggagcggcagggcaagaccccgcuggggcucgucgaccuguucguguucuccaccagcuucuaccugaucuccaucuuccuccaccuggugaagaucccgacgcaccgccacaucgucggcaagagcugccccaagccccaccggcugaaccacauggggaucugcuccugcggccucuacaagcagcccggcgugccggugaaguggaagcgcugaggacuaguuauaagacugacuagcccgaugggccucccaacgggcccuccuccccuccuugcaccgagauuaauaaaaaaaaaaaaaaaaaaaaaaaaaaaaaaaaaaaaaaaaaaaaaaaaaaaaaaaaaaaaaaaaaaaaaaaaaaaaaaaaaaaaaaaaaaaaaaaaaaaa

SEQ ID NO: 39839 - RNA, 1665 nt, Artificial Sequence
  mRNA product Design i-3 (A100) comprising derived and/or modified sequence from LASV(G733-SLE-2010;Clade IV)__AIT17154__GPCmut11 (opt1)
aggagaaagcuuaccaugggccagaucgugaccuucuuccaggaggucccccacgugaucgaggaggugaugaacaucguccugaucgcccucagcauccuggccgugcugaaggggcucuacaacuucgcgaccugcggcaucguggggcuggucuccuuccugcuccugugcggccgcagcugcacgaccucccuguacaaggggguguacgagcuccagacccuggagcugaacauggagacccucaacaugacgaugccgcugagcugcaccaagaacaacucccaccacuacaucauggugggcaacgagaccggccuggagcucacccugacgaacaccagcaucaucaaccacaaguucugcaaccuguccgacgcccacaagaagaaccucuacgaccacgcccugaugagcaucaucuccaccuuccaccugagcauccccaacuucaaccaguacgaggccauguccugcgacuucaacgggggcaagaucagcguccaguacaaccucucccacagcuacgccggggacgcggccaaccacugcggcaccaucgccaacggggugcugcagacguucaugcggauggccuggggcggcuccuacaucgcgcuggacagcgggcgcgaccggugggacugcaucaugaccuccuaccaguaccucaucauccagaacaccaccugggaggaccacugccaguucagccgccccucccccaucggcuaccuggggcugcucagccagcggacgcgcgacaucuacaucagccggcgccugcugggcaccuucaccuggacccucuccgacagcgagggcaaggacacgcccgggggcuacugccugacccgguggaugcugaucgaggccgagcucaagugcuucgggaacaccgccguggccaagugcaacgagaagcacgacgaggaguucugcgacaugcugcgccuguucgacuucaacaagcaggccauccagcggcucaaggcggaggcccagauguccauccagcugaucaacaaggccgucaacgcccugaucaacgaccagcucaucaugaagaaccaccuccgcgacaucaugggcauccccuacugcaacuacagcaaguacugcuaccugaaccacaccacgaccgggaagaccucccugcccaagugcugccuggugagcaacggcuccuaccugaacgagacccacuucagcgacgacaucgagcagcaggccgacaacaugaucacggagaugcuccagaaggaguacauggagcggcagggcaagaccccgcuggggcugguggaccuguucgucuucuccaccagcuucuaccucaucuccaucuuccugcaccuggugaagaucccgacccaccgccacguggucggcaagagcugccccaagccccaccggcucaaccacauggggaucugcuccugcggccuguacgggcagcccggcgugccggugaaguggaagcgcugaggacuaguuauaagacugacuagcccgaugggccucccaacgggcccuccuccccuccuugcaccgagauuaauaaaaaaaaaaaaaaaaaaaaaaaaaaaaaaaaaaaaaaaaaaaaaaaaaaaaaaaaaaaaaaaaaaaaaaaaaaaaaaaaaaaaaaaaaaaaaaaaaaaa

SEQ ID NO: 39840 - RNA, 1665 nt, Artificial Sequence
  mRNA product Design i-3 (A100) comprising derived and/or modified sequence from MOPV/LASV reassortant(IGS-1;Clade IV)__AFY05576__GPCmut11 (opt1)
aggagaaagcuuaccaugggccagaucgugaccuucuuccaggaggucccccacgugaucgaggaggugaugaacaucguccugaucgcccucagcgugcuggccgugcugaaggggcucuacaacuucgcgaccugcggccuggucgggcuggugacguuccuccugcugugcggccgcuccugcaccaccagccucuacaaggggguguacgagcugcagacccuggagcucaacauggagacgcugaacaugaccaugccgcuguccugcaccaagaacaacagccaccacuacaucauggucggcaacgagaccggccucgagcugacgcugaccaacaccuccaucaucaaccacaaguucugcaaccucagcgacgcccacaagaagaaccuguacgaccacgcccugauguccaucaucagcaccuuccaccucuccauccccaacuucaaccaguacgaggccaugagcugcgacuucaacgggggcaagaucuccgugcaguacaaccugagccacuccuacgccggggacgcggccaaccacugcggcacgguggccaacgggguccugcagaccuucaugcggauggccuggggcggcagcuacaucgcgcucgacuccgggcgcggcaacugggacugcaucaugaccagcuaccaguaccugaucauccagaacaccacgugggaggaccacugccaguucucccggcccagccccaucggguaccugggccuccugucccagcgcacccgggacaucuacaucagccgccggcugcucggcaccuucaccuggacgcugagcgacuccgagggggaggacaccccgggcggguacugccugacccgcuggaugcucaucgaggccgagcugaagugcuucggcaacaccgccguggccaagugcaacgagaagcacgacgaggaguucugcgacaugcugcggcuguucgacuucaacaagcaggccauccagcgccugaaggcggaggcccagaugagcauccagcugaucaacaaggccgugaacgcccucaucaacgaccagcugaucaugaagaaccaccuccgggacaucauggggauccccuacugcaacuacuccaaguacugcuaccucaaccacacgaccaccggccgcaccagccugcccaagugcugccuggucuccaacggcagcuaccucaacgagacgcacuucuccgacgacaucgagcagcaggccgacaacaugaucaccgagaugcugcagaaggaguacauggagcggcaggggaagacgccccugggccugguggaccucuucguguucagcaccuccuucuaccugaucagcaucuuccugcaccucgucaagaucccgacccaccgccacaucguggggaaguccugccccaagccccaccggcugaaccacaugggcaucugcagcugcgggcuguacaagcagcccggcgugccggucaaguggaagcgcugaggacuaguuauaagacugacuagcccgaugggccucccaacgggcccuccuccccuccuugcaccgagauuaauaaaaaaaaaaaaaaaaaaaaaaaaaaaaaaaaaaaaaaaaaaaaaaaaaaaaaaaaaaaaaaaaaaaaaaaaaaaaaaaaaaaaaaaaaaaaaaaaaaaa

SEQ ID NO: 39841 - RNA, 1665 nt, Artificial Sequence
  mRNA product Design i-3 (A100) comprising derived and/or modified sequence from LASV(LM765-SLE-2012;Clade IV)__AIT17814__GPCmut11 (opt1)
aggagaaagcuuaccaugggccagaucgugaccuucuuccaggaggucccccacgugaucgaggaggugaugaacaucguccugaucgcccucagcauccuggccgugcugaaggggcucuacaacuucgcgaccugcggccugguggggcuggucacguuccuccugcugugcggccgcuccugcaccaccagccucuacaaggggguguacgagcugcagacccuggagcucaacauggagacgcugaacaugaccaugccgcuguccugcaccaagaacaacagccaccacuacaucauggugggcaacgagaccggccucgagcugacgcugaccaacaccuccaucaucgaccacaaguucugcaaccucagcgacgcccaccggaagaaccuguacgaccacgcccugauguccaucaucagcaccuuccaccucuccauccccaacuucaaccaguacgaggccaugagcugcgacuucaacgggggcaagaucuccguccaguacaaccugagccacuccuacgccaaggacgcggccgaccacugcgggacgguggccaacggcgugcugcagaccuucaugcgcauggccuggggcgggagcuacaucgcgcucgacuccggccgggggcgcugggacugcaucaugaccagcuaccaguaccugaucauccagaacaccacgugggaggaccacugccaguucucccggcccagccccaucggcuaccuggggcuccugucccagcgcacccgggacaucuacaucagccgccggcugcucggcaccuucaccuggacgcugagcgacuccgagggcaaggacacccccgggggcuacugccugacccgcuggaugcucaucgaggccgagcugaagugcuucgggaacaccgccgucgccaagugcaacgagaagcacgacgaggaguucugcgacaugcugcggcuguucgacuucaacaagcaggccauccagcgccugaaggcggaggcccagaugagcauccagcugaucaacaaggccgugaacgcccucaucaacgaccagcugaucaugaagaaccaccuccgggacaucaugggcauccccuacugcaacuacuccaaguacugcuaccucaaccacacgaccaccgggaagaccagccugcccaagugcugccugguguccaacggcagcuaccucaacgagacgcacuucuccgacgacaucgagcagcaggccgacaacaugaucaccgagaugcugcagaaggaguacauggagcgccagggcaagaccccgcuggggcuggucgaccucuucguguucagcaccuccuucuaccugaucagcaucuuccugcaccucgugaagaucccgacgcaccggcacaucgucggcaagcccugccccaagccccaccgccugaaccacauggggaucugcuccugcggccuguacaagcagccgggggugcccgugaaguggaagcggugaggacuaguuauaagacugacuagcccgaugggccucccaacgggcccuccuccccuccuugcaccgagauuaauaaaaaaaaaaaaaaaaaaaaaaaaaaaaaaaaaaaaaaaaaaaaaaaaaaaaaaaaaaaaaaaaaaaaaaaaaaaaaaaaaaaaaaaaaaaaaaaaaaaa

SEQ ID NO: 39842 - RNA, 1665 nt, Artificial Sequence
  mRNA product Design i-3 (A100) comprising derived and/or modified sequence from LASV(LM776-SLE-2012;Clade IV)__AIT17824__GPCmut11 (opt1)
aggagaaagcuuaccaugggccagaucgugaccuucuuccaggaggucccccacgugaucgaggaggugaugaacaucguccugaucgcccucagcauccuggccgugcugaaggggcucuacaacuucgcgaccugcggccugguggggcuggucacguuccuccugcugugcggccgcuccugcaccaccagcguguacaaggggguguacgagcuccagacccuggagcugaacauggagacgcucaacaugaccaugccgcuguccugcaccaagaacaacagccaccacuacaucauggucggcaacgagaccggccuggagcucacgcugaccaacaccuccaucaucaaccacaaguucugcaaccugagcgacgcccacaagaagaaccucuacgaccacgcccugauguccaucaucagcaccuuccaccuguccauccccaacuucaaccaguacgaggccaugagcugcgacuucaacgggggcaagaucuccgugcaguacaaccucagccacuccuacgccggggacgcggccaaccacugcggcacgguggccaacgggguccugcagaccuucaugcggauggccuggggcggcagcuacaucgcgcuggacuccgggcacggcaagugggacugcaucaugaccagcuaccaguaccucaucauccagaacaccacgugggaggaccacugccaguucucccgccccagccccaucggguaccugggccugcucucccagcggacccgcgacaucuacaucagccggcgccugcugggcaccuucaccuggacgcucagcgacuccgaggggaaggacaccccgggcggguacugccugacccgguggaugcugaucgaggccgagcucaagugcuucggcaacaccgccguggccaagugcaacgagaagcacgacgaggaguucugcgacaugcugcgccuguucgacuucaacaagcaggccauccagcggcucaaggcggaggcccagaugagcauccagcugaucaacaaggccgugaacgcccugaucaacgaccagcucaucaugaagaaccaccuccgcgacaucauggggauccccuacugcaacuacuccaaguacugcuaccugaaccacacgaccaccggcaagaccagccugcccaagugcugccuggucuccaacggcagcuaccugaacgagacgcacuucuccgacgacaucgagcagcaggccgacaacaugaucaccgagaugcuccagaaggaguacauggagcggcaggggaagacgccccugggccugguggaccuguucguguucagcaccuccuucuaccucaucagcaucuuccugcaccuggucaagaucccgacccaccgccacaucguggggaaguccugccccaagccccaccggcucaaccacaugggcaucugcagcugcgggcuguacaagcagcccggcgugccgguccgcuggaagcggugaggacuaguuauaagacugacuagcccgaugggccucccaacgggcccuccuccccuccuugcaccgagauuaauaaaaaaaaaaaaaaaaaaaaaaaaaaaaaaaaaaaaaaaaaaaaaaaaaaaaaaaaaaaaaaaaaaaaaaaaaaaaaaaaaaaaaaaaaaaaaaaaaaaa

SEQ ID NO: 39843 - RNA, 1665 nt, Artificial Sequence
  mRNA product Design i-3 (A100) comprising derived and/or modified sequence from LASV(Mad39;Clade IV)__ANH09722__GPCmut11 (opt1)
aggagaaagcuuaccaugggccagaucgugaccuucuuccaggaggucccccacgugaucgaggaggugaugaacaucguccugaucgcccucagcauccuggccgugcugaaggggcucuacaacguggcgaccugcggccugaucgggcuggucacguuccuccugcugugcggccgcuccugcaccaccacccucuacaaggggguguacgagcugcaggcccuggagcucaacauggagacgcugaacaugaccaugccgcugagcugcaccaagaacaacucccaccacuacauccgggugggcaacgagaccggccucgagcugacgcugaccaacaccagccucaucaaccacaaguucugcaaccuguccgacgcccacaagaagaaccuguacgaccacgcccucaugagcaucaucuccaccuuccaccugagcauccccaacuucaaccaguacgaggccauguccugcgacuucaacgacgggaagaucagcguccaguacaaccugucccacacguacgcgggcgacaccgccaaccacugcgggaccguggccaacggcgugcuccagaccuucaugcgcauggccuggggcgggagcuacaucgcgcuggacuccggccgcgggggcugggacugcaucaugacgagcuaccaguaccugaucauccagaacaccaccugggaggaccacugccaguucucccggcccagccccaucggguaccucggccugcugucccagcggacccgcgacaucuacaucagccggcgccuccugggcacguucaccuggacccuguccgacagcgaggggaaggacaccccgggcggguacugccucacgcgguggaugcugaucgaggccgagcugaagugcuucggcaacaccgccgucgccaagugcaacgagaagcacgacgaggaguucugcgacaugcuccgccuguucgacuucaacaagcaggccauccagcggcugaaggcggaggcccagaugagcauccagcucaucaacaaggccgugaacgcccugaucaacgaccagcugaucaugaagaaccaccuccgcgacaucauggggauccccuacugcaacuacuccaaguacugcuaccugaaccacaccgugaccggcaagacgagccugcccaagugcugccucgucuccaacggcagcuaccugaacgagacccacuucuccgacgacaucgagcagcaggccgacaacaugaucaccgagaugcugcagaaggaguacauggagcggcaggggaagacgccccugggccucguggaccuguucguguucagcaccuccuucuaccugaucagcaucuuccuccaccuggucaagaucccgacccaccgccacgugguggggaagcccugccccaagccccaccggcugaaccacaugggcaucugcuccugcggguucuacaagcagccgggcguccccgugcgcuggaagcggugaggacuaguuauaagacugacuagcccgaugggccucccaacgggcccuccuccccuccuugcaccgagauuaauaaaaaaaaaaaaaaaaaaaaaaaaaaaaaaaaaaaaaaaaaaaaaaaaaaaaaaaaaaaaaaaaaaaaaaaaaaaaaaaaaaaaaaaaaaaaaaaaaaaa

SEQ ID NO: 39844 - RNA, 1665 nt, Artificial Sequence
  mRNA product Design i-3 (A100) comprising derived and/or modified sequence from LASV(Z0947-SLE-2011;Clade IV)__AIT17840__GPCmut11 (opt1)
aggagaaagcuuaccaugggccagaucgugaccuucuuccaggaggucccccacgugaucgaggaggugaugaacaucguccugaucgcccucagcauccuggccgugcugaaggggcucuacaacuucgcgaccugcggccugguggggcuggucacguuccuccugcugugcggccgcuccugcaccaucagccucuacaaggggguguacgagcugcagacccuggagcucaacauggagacccugaacaugacgaugccgcuguccugcaccaagaacaacagccaccacuacaucauggugggcaacgagaccggccucgagcugacccugacgaacaccuccaucaucaaccacaaguucugcaaccucagcgacgcccacaagaagaaccuguacgaccacgcccugauguccaucaucagcaccuuccaccucuccauccccaacuucaaccaguacgaggccaugagcugcgacuucaacgggggcaagaucuccguccaguacaaccugagccacuccuacgccggggacgcggccaaccacugcggcaccguggccaacggggugcugcagacguucaugcggauggccuggggcggcagcuacaucgcgcucgacuccgggcgcgaccggugggacugcaucaugaccagcuaccaguaccugaucauccagaacaccaccugggaggaccacugccaguucucccgccccagccccaucggcuaccuggggcuccugucccagcggacgcgcgacaucuacaucagccggcgccugcucggcaccuucaccuggacccugagcgacuccgagggcaaggacacgcccgggggcuacugccugacccgguggaugcucaucgaggccgagcugaagugcuucgggaacaccgccgucgccaagugcaacgagaagcacgacgaggaguucugcgacaugcugcgccucuucgacuucaacaagcaggccauccagcggcugaaggcggaggcccagaugagcauccagcugaucaacaaggccgugaacgcccucaucaacgaccagcugaucaugaagaaccaccuccgcgacaucaugggcauccccuacugcaacuacuccaaguacugcuaccugaaccacaccacgaccgggaagaccagccugcccaagugcugccugguguccaacggcagcuaccucaacgagacccacuucuccgacgacaucgagcagcaggccgacaacaugaucacggagaugcugcagaaggaguacauggagcggcagggcaagaccccgcuggggcuggucgaccucuucguguucagcaccuccuucuaccugaucagcaucuuccugcaccucgugaagaucccgacccaccgccacaucgucggcaagcccugccccaagccccaccggcugaaccacauggggaucugcuccugcggccuguacaagcagccgggggugcccgugaaguggaagcgcugaggacuaguuauaagacugacuagcccgaugggccucccaacgggcccuccuccccuccuugcaccgagauuaauaaaaaaaaaaaaaaaaaaaaaaaaaaaaaaaaaaaaaaaaaaaaaaaaaaaaaaaaaaaaaaaaaaaaaaaaaaaaaaaaaaaaaaaaaaaaaaaaaaaa

SEQ ID NO: 39845 - RNA, 1665 nt, Artificial Sequence
  mRNA product Design i-3 (A100) comprising derived and/or modified sequence from LASV(Josiah;Clade IV)__NP_694870__GPCmut11 (opt4)
aggagaaagcuuaccaugggccagaucgugaccuucuuccaggaggugccccacgugaucgaggaggugaugaacaucgugcugaucgcccugagcgugcuggccgugcugaagggccuguacaacuucgccaccugcggccuggugggccuggugaccuuccugcugcugugcggcagaagcugcaccaccagccuguacaagggcguguacgagcugcagacccuggagcugaacauggagacccugaacaugaccaugccccugagcugcaccaagaacaacagccaccacuacaucauggugggcaacgagaccggccuggagcugacccugaccaacaccagcaucaucaaccacaaguucugcaaccugagcgacgcccacaagaagaaccuguacgaccacgcccugaugagcaucaucagcaccuuccaccugagcauccccaacuucaaccaguacgaggccaugagcugcgacuucaacggcggcaagaucagcgugcaguacaaccugagccacagcuacgccggcgacgccgccaaccacugcggcaccguggccaacggcgugcugcagaccuucaugagaauggccuggggcggcagcuacaucgcccuggacagcggcagaggcaacugggacugcaucaugaccagcuaccaguaccugaucauccagaacaccaccugggaggaccacugccaguucagcagacccagccccaucggcuaccugggccugcugagccagagaaccagagacaucuacaucagcagaagacugcugggcaccuucaccuggacccugagcgacagcgagggcaaggacacccccggcggcuacugccugaccagauggaugcugaucgaggccgagcugaagugcuucggcaacaccgccguggccaagugcaacgagaagcacgacgaggaguucugcgacaugcugagacuguucgacuucaacaagcaggccauccagagacugaaggccgaggcccagaugagcauccagcugaucaacaaggccgugaacgcccugaucaacgaccagcugaucaugaagaaccaccugagagacaucaugggcauccccuacugcaacuacagcaaguacugcuaccugaaccacaccaccaccggcagaaccagccugcccaagugcugccuggugagcaacggcagcuaccugaacgagacccacuucagcgacgacaucgagcagcaggccgacaacaugaucaccgagaugcugcagaaggaguacauggagagacagggcaagaccccccugggccugguggaccuguucguguucagcaccagcuucuaccugaucagcaucuuccugcaccuggugaagauccccacccacagacacaucgugggcaagagcugccccaagccccacagacugaaccacaugggcaucugcagcugcggccuguacaagcagcccggcgugcccgugaaguggaagagaugaggacuaguuauaagacugacuagcccgaugggccucccaacgggcccuccuccccuccuugcaccgagauuaauaaaaaaaaaaaaaaaaaaaaaaaaaaaaaaaaaaaaaaaaaaaaaaaaaaaaaaaaaaaaaaaaaaaaaaaaaaaaaaaaaaaaaaaaaaaaaaaaaaaa

SEQ ID NO: 39846 - RNA, 1662 nt, Artificial Sequence
  mRNA product Design i-3 (A100) comprising derived and/or modified sequence from LASV(LP;Clade I)__AAF86701__GPCmut11 (opt4)
aggagaaagcuuaccaugggccagaucaucaccuucuuccaggaggugccccacgugaucgaggaggugaugaacaucgugcugaucgcccugagccugcuggccauccugaagggccuguacaacaucgccaccugcggcaucaucggccugguggccuuccuguuccugugcggcaagagcugcagccugacccugaagggcggcuacgagcugcagacccuggagcugaacauggagacccugaacaugaccaugccccugagcugcaccaagaacagcagccaccacuacaucagagugggcaacgagaccggccuggagcugacccugaccaacaccagcaucaucaaccacaaguucugcaaccugagcgacgcccacaagaagaaccuguacgaccacgcccugaugagcaucaucagcaccuuccaccugagcauccccaacuucaaccaguacgaggccaugagcugcgacuucaacggcggcaagaucagcgugcaguacaaccugagccacagcuacgccggcgacgccgccgagcacugcggcaccguggccaacggcgugcugcagaccuucaugagaauggccuggggcggcagauacaucgcccuggacagcggcaagggcaacugggacugcaucaugaccagcuaccaguaccugaucauccagaacaccaccugggaggaccacugccaguucagcagacccagccccaucggcuaccugggccugcugagccagagaaccagagacaucuacaucagcagaagacugcugggcaccuucaccuggacccugagcgacagcgagggcaacgagacccccggcggcuacugccugaccagauggaugcugaucgaggccgagcugaagugcuucggcaacaccgccguggccaagugcaacgagaagcacgacgaggaguucugcgacaugcugagacuguucgacuucaacaagcaggccaucagaagacugaaggccgaggcccagaugagcauccagcugaucaacaaggccgugaacgcccugaucaacgaccagcugaucaugaagaaccaccugagagacaucaugggcauccccuacugcaacuacagcaaguacugcuaccugaaccacaccagcagcggcagaaccagccugcccaagugcugccugaucagcaacggcagcuaccugaacgagacccaguucagcgacgacaucgagcagcaggccgacaacaugaucaccgagaugcugcagaaggaguacaucgagagacagggcaagaccccccugggccugguggacaucuucaucuucagcaccagcuucuaccugaucagcaucuuccugcaccugaucaagauccccacccacagacacaucgugggcaagcccugccccaagccccacagacugaaccacaugggcgugugcagcugcggccuguacaagcaccccggcgugcccaccaaguggaagagaugaggacuaguuauaagacugacuagcccgaugggccucccaacgggcccuccuccccuccuugcaccgagauuaauaaaaaaaaaaaaaaaaaaaaaaaaaaaaaaaaaaaaaaaaaaaaaaaaaaaaaaaaaaaaaaaaaaaaaaaaaaaaaaaaaaaaaaaaaaaaaaaaaaaa

SEQ ID NO: 39847 - RNA, 1662 nt, Artificial Sequence
  mRNA product Design i-3 (A100) comprising derived and/or modified sequence from LASV(803213;Clade II)__AAF86703__GPCmut11 (opt4)
aggagaaagcuuaccaugggccagaucaucaccuucuuccaggaggugccccacgugaucgaggaggugaugaacaucgugcugaucgcccugagccugcuggccauccugaagggcaucuacaacguggccaccugcggccuguucggccugaucagcuuccugcugcugugcggcagaagcugcagcgugaccuacaagggcguguacgagcugcagacccuggagcugaacauggccaaccugaacaugaccaugccccugagcugcaccaagaacaacagccaccacuacaucauggugggcaacgagaccggccuggagcugacccugaccaacaccagcaucaucaaccacaaguucugcaaccugagcgacgcccacaagaagaaccuguacgaccacgcccugaugagcaucaucagcaccuuccaccugagcauccccaacuucaaccaguacgaggccaugagcugcgacuucaacggcggcaagaucagcgugcaguacaaccugagccacagcuucgccguggacgccgccaaccacugcggcaccaucgccaacggcgugcugcagaccuucaugagaauggccuggggcggcagcuacaucgcccuggacagcggcaagggcaacugggacugcaucaugaccagcuaccaguaccugaucauccagaacaccaccugggaggaccacugccaguucagcagacccagccccaucggcuaccugggccugcugagccagagaaccagagacaucuacaucagcagaagacugcugggcaccuucaccuggacccugagcgacagcgagggcaacgaggcccccggcggcuacugccugaccagauggaugcugaucgaggccgagcugaagugcuucggcaacaccgccguggccaagugcaacgagaagcacgacgaggaguucugcgacaugcugagacuguucgacuucaacaagcaggccaucaagagacugaagaccgaggcccagaugagcauccagcugaucaacaaggccgugaacgcccugaucaacgaccagcugaucaugaagaaccaccugagagacaucaugggcauccccuacugcaacuacagcagauacugcuaccugaaccacaccgugaccggcaagaccagccugcccagaugcugccuggugagcaacggcagcuaccugaacgagacccacuucagcgacgacaucgagcagcaggccgacaacaugaucaccgagaugcugcagaaggaguacauggacagacagggcaagaccccccugggccugguggaccuguucguguucagcaccagcuucuaccugaucagcaucuuccugcaccuggugaagauccccacccacagacacaucgugggcaagcccugccccaagccccacagacugaaccacaugggcaucugcagcugcggccuguacaagcaccccggcgugcccgugaaguggaagagaugaggacuaguuauaagacugacuagcccgaugggccucccaacgggcccuccuccccuccuugcaccgagauuaauaaaaaaaaaaaaaaaaaaaaaaaaaaaaaaaaaaaaaaaaaaaaaaaaaaaaaaaaaaaaaaaaaaaaaaaaaaaaaaaaaaaaaaaaaaaaaaaaaaaa

SEQ ID NO: 39848 - RNA, 1662 nt, Artificial Sequence
  mRNA product Design i-3 (A100) comprising derived and/or modified sequence from LASV(GA391;Clade III)__CAA36645__GPCmut11 (opt4)
aggagaaagcuuaccaugggccagaucgugaccuucuuccaggaggugccccacgugaucgaggaggugaugaacaucgugcugaucgcccugagcauccuggccauccugaagggccuguacaacguggccaccugcggccugaucggccuggugaccuuccugcugcugagcggcagaagcugcagccugaucuacaagggcaccuacgagcugcagacccuggagcugaacauggagacccugaacaugaccaugccccugagcugcaccaagaacaacagccaccacuacaucagagugggcaacgagaccggccuggagcugacccugaccaacaccagcauccugaaccacaaguucugcaaccugagcgacgcccacaagagaaaccuguacgaccacagccugaugagcaucaucagcaccuuccaccugagcauccccaacuucaaccaguacgaggccaugagcugcgacuucaacggcggcaagaucaccgugcaguacaaccugagccacagcuucgccguggacgccgccggccacugcggcacccuggccaacggcgugcugcagaccuucaugagaauggccuggggcggcagcuacaucgcccuggacagcggcagaggcaacugggacugcaucaugaccagcuaccaguaccugaucauccagaacaccaccugggacgaccacugccaguucagcagacccagccccaucggcuaccugggccugcugagccagagaaccagagacaucuacaucagcagaagacugcugggcaccuucaccuggacccugagcgacagcgagggcaacgagacccccggcggcuacugccugaccagauggaugcugaucgaggccgagcugaagugcuucggcaacaccgccguggccaagugcaacgagaagcacgacgaggaguucugcgacaugcugagacuguucgacuucaacaagcaggccaucagaagacugaagaccgaggcccagaugagcauccagcugaucaacaaggccgugaacgcccugaucaacgaccagcugaucaugaagaaccaccugagagacaucaugggcauccccuacugcaacuacagcagauacugcuaccugaaccacaccagcaccggcaagaccagccugcccagaugcugccugaucagcaacggcagcuaccugaacgagaccaaguucagcgacgacaucgagcagcaggccgacaacaugaucaccgagaugcugcagaaggaguacaucgacagacagggcaagaccccccugggccugguggaccuguucguguucagcaccagcuucuaccugaucagcaucuuccugcaccuggugaagauccccacccacagacacaucgugggcaagcccugccccaagccccacagacugaaccacaugggcaucugcagcugcggccuguacaagcagcccggcgugcccgugagauggaagagaugaggacuaguuauaagacugacuagcccgaugggccucccaacgggcccuccuccccuccuugcaccgagauuaauaaaaaaaaaaaaaaaaaaaaaaaaaaaaaaaaaaaaaaaaaaaaaaaaaaaaaaaaaaaaaaaaaaaaaaaaaaaaaaaaaaaaaaaaaaaaaaaaaaaa

SEQ ID NO: 39849 - RNA, 1665 nt, Artificial Sequence
  mRNA product Design i-3 (A100) comprising derived and/or modified sequence from LASV(AV;Clade V)__CCA30314__GPCmut11 (opt4)
aggagaaagcuuaccaugggccagaucgugaccuucuuccaggaggugccccacgugaucgaggaggugaugaacaucgugcugaucgcccugagcauccuggccgugcugaagggccuguacaacaucgccaccugcggccugaucggccugaucaccuuccugcugcugugcggcagaagcugcagcagcaaccuguacaagggcguguacgagcugcagagccuggaccugaacauggagacccugaacaugaccaugccccugagcugcaccaagaacaacagccaccacuacaucagagugggcaacgacaccggccuggagcugacccugaccaacaccagcauccugaaccacaaguucugcaaccugagcgacgcccacaagaaggaccuguacgaccacgcccugaugagcaucaucagcaccuuccaccugagcauccccaacuucaaccaguacgaggccaugagcugcgacuucaacggcggcaagaucagcgugcaguacaaccugagccacagcuacgccaucgacgccgccaaccacugcggcaccguggccaacggcauccugcagaccuucaugagaauggccuggggcggcagcuacaucgcccuggacagcggcagaggcaacugggacugcaucaugaccagcuaccaguaccugaucauccagaacaccaccugggagaaccacugccaguucagcagacccagccccaucggcuaccugggccugcugagccagagaaccagagacaucuacaucagcagaagacugcugggcaccuucaccuggacccugagcgacagcgagggcaacgccacccccggcggcuacugccugaccagauggaugcugaucgaggccgagcugaagugcuucggcaacaccgccguggccaagugcaacgagaagcacgacgaggaguucugcgacaugcugagacuguucgacuucaacaagcaggccaucagcagacugaagagcgaggcccagaugagcauccagcugaucaacaaggccgugaacgcccugaucaacgaccagcugaucaugaagaaccaccugagagacaucaugggcauccccuacugcaacuacagcaaguacugcuaccugaaccacaccaucaccggcaagaccagccugcccaagugcugccuggugagcaacggcagcuaccugaacgagacccacuucagcgacgacaucgagcagcaggccgacaacaugaucaccgagaugcugcagaaggaguacauggagagacagggcaagaccccccugggccugguggaccuguucguguucagcaccagcuucuaccugaucagcaucuuccugagacuggugaagauccccacccacagacacaucgugggcaagcccugccccaagccccacagacugaaccacaugggcaucugcagcugcggccuguacaagcagcccggcgugcccgugagauggaagagaugaggacuaguuauaagacugacuagcccgaugggccucccaacgggcccuccuccccuccuugcaccgagauuaauaaaaaaaaaaaaaaaaaaaaaaaaaaaaaaaaaaaaaaaaaaaaaaaaaaaaaaaaaaaaaaaaaaaaaaaaaaaaaaaaaaaaaaaaaaaaaaaaaaaa

SEQ ID NO: 39850 - RNA, 1662 nt, Artificial Sequence
  mRNA product Design i-3 (A100) comprising derived and/or modified sequence from LASV(Togo/2016/7082;Clade VI)__AMR44577__GPCmut11 (opt4)
aggagaaagcuuaccaugggccagaucaucaccuucuuccaggaggugccccacgugaucgaggaggugaugaacaucgugcugaucgcccugagccugcuggccauccugaagggcguguacaacguggccaccugcggcaucaucggccuggugaccuuccuguuccugugcggcagaagcugcagccugaucuacaagggcagcuacgagcugcagacccuggagcugaacauggagacccugaacaugaccaugccccugagcugcaccaagaacagcagccaccacuacaucagagugggcaacgagaccggccuggagcugacccugaccaacaccagcaucaucaaccacaaguucugcaaccugagcgacgcccacaagagaaaccuguacgaccacgcccugaugagcauccugagcaccuuccaccugagcauccccaacuucaaccaguacgaggccaugagcugcgacuucaacggcggcaagaucagcgugcaguacaaccugagccacgccuacgccguggacgccgccgagcacugcggcaccguggccaacggcgugcugcagaccuucaugagaauggccuggggcggcagcuacaucgcccuggacagcggcagaggcaacugggacugcaucaugaccagcuaccaguaccugaucauccagaacaccaccugggaggaccacugccaguucagcagacccagccccaucggcuaccugggccugcugagccagagaaccagagacaucuacaucagcagaagacugcugggcaccuucaccuggacccugagcgacagcgagggcaacgagacccccggcggcuacugccugaccagauggaugcugaucgaggccgagcugaagugcuucggcaacaccgccguggccaagugcaacgagaagcacgacgaggaguucugcgacaugcugagacuguucgacuucaacaagcaggccauccagagacugaagagcgaggcccagaugagcauccagcugaucaacaaggccgugaacgcccugaucaacgaccagcugaucaugaagaaccaccugagagacaugaugggcauccccuacugcaacuacagcaaguacugcuaccugaaccacaccagcagcggcagaaccagccugcccaagugcugccuggugagcaacggcagcuaccugaacgagacccacuucagcgacgacaucgagcagcaggccgacaacaugaucaccgagaugcugcagaaggaguacaucgacagacagggcaagaccccccugggccugguggaccuguucguguucagcaccagcuucuaccugaucagcaucuuccugcaccugaucaagauccccacccacagacacaucgugggcaagcccugccccaagccccacagacugaaccacaugggcaucugcagcugcggccuguacaagcagcccggcgugcccaccagauggaagagaugaggacuaguuauaagacugacuagcccgaugggccucccaacgggcccuccuccccuccuugcaccgagauuaauaaaaaaaaaaaaaaaaaaaaaaaaaaaaaaaaaaaaaaaaaaaaaaaaaaaaaaaaaaaaaaaaaaaaaaaaaaaaaaaaaaaaaaaaaaaaaaaaaaaa

SEQ ID NO: 39851 - RNA, 1662 nt, Artificial Sequence
  mRNA product Design i-3 (A100) comprising derived and/or modified sequence from LASV(KAK-428;Clade n.d. (VII))__ANH09740__GPCmut11 (opt4)
aggagaaagcuuaccaugggccagaucgugaccuucuuccaggaggugccccacgugaucgaggaggugaugaacaucgugcugaucgcccugagccugcuggccauccugaagggccuguacaacuucgccaccugcggcgugaucggccugaucaccuuccugcugcugugcggcagaagcugcagcgccaccuacaagggccaguacgagcugcagacccuggagcugaacauggagagccugaacaugaccaugccccugagcugcaccaagaacaacagccaccacuacaucagagccggcaacaacaccggccuggagcugacccugaccaacaccagcaucaucagccacaaguucugcaaccugagcgacgcccacaagaagaaccuguacgaccacacccugaugagcaucaucaccaccuuccaccugagcauccccaacuucaaccaguacgaggccaugagcugcgacuucaacggcggcaagaucagcauccaguacaaccugagccacagcuacgccggcgacgccgcccagcacugcggcaccguggccaacggcgugcugcagaccuucaugagaauggccuggggcggcagcuaccuggcccuggacagcggcagaagaggcugggacugcaucaucagcagcuaccaguaccugaucauccagaacaccaccugggacgaccacugccaguucagcagacccagccccaucggcuaccugggcuucgugagccagaagaccagagacaucuacaucagcagaagacugcugggcaccuucaccuggacccugagcgacagcgagggccacgacaugcccggcggcuacugccugaccagauggaugcugaucgaggccgaccugaagugcuucggcaacaccgccguggccaagugcaacgagaagcacgacgaggaguucugcgacauguggagacuguucgacuucaacaagcaggccauccagagacugaaggccgaggcccagaugaacauccagcugaucaacaaggccgugaacgcccugaucaacgaccagcugaugaugaagaaccaccugagagacaucaugggcauccccuacugcaacuacagcaaguucugcuaccugaacaacaccaccaccggcagaaccagccugcccagaugcugccugaucagcaacggcagcuaccugaacgagacccacuucagcgacgacaucgagcagcaggccgacaacaugaucaccgagaugcugcagaaggaguacauggacagacagggcaagaccccccugggccugguggaccuguucguguucagcaccagcuucuaccugaucaccaucuuccugcaccuggugaagauccccacccacagacacaucgugggcaagcccugccccaagccccacagacugaaccacaugggcaucugcagcugcggccuguacaagcagcccggcgugcccgugagauggaagagaugaggacuaguuauaagacugacuagcccgaugggccucccaacgggcccuccuccccuccuugcaccgagauuaauaaaaaaaaaaaaaaaaaaaaaaaaaaaaaaaaaaaaaaaaaaaaaaaaaaaaaaaaaaaaaaaaaaaaaaaaaaaaaaaaaaaaaaaaaaaaaaaaaaaa

SEQ ID NO: 39852 - RNA, 1662 nt, Artificial Sequence; identical to SEQ ID NO: 39846
  mRNA product Design i-3 (A100) comprising derived and/or modified sequence from LASV(Pinneo-NIG-1969;Clade I)__AIT17836__GPCmut11 (opt4)

SEQ ID NO: 39853 - RNA, 1662 nt, Artificial Sequence
  mRNA product Design i-3 (A100) comprising derived and/or modified sequence from LASV(ISTH0009-NIG-2011;Clade II)__AIT17404__GPCmut11 (opt4)
aggagaaagcuuaccaugggccagaucaucaccuucuuccaggaggugccccacgugaucgaggaggugaugaacaucgugcugaucgcccugagccugcuggccauccugaagggcaucuacaacguggccaccugcggccuguucggccuggugagcuuccugcugcugugcggcagaagcugcagcaccaccuacaagggcguguacgagcugcagacccuggagcuggacauggccagccugaacaugaccaugccccugagcugcaccaagaacaacagccaccacuacaucauggugggcaacgagaccggccuggagcugacccugaccaacaccagcaucaucaaccacaaguucugcaaccugagcgacgcccacaagaagaaccuguacgaccacgcccugaugagcaucaucagcaccuuccaccugagcauccccaacuucaaccaguacgaggccaugagcugcgacuucaacggcggcaagaucagcgugcaguacaaccugagccacgccuacgccguggacgccgccaaccacugcggcaccaucgccaacggcgugcugcagaccuucaugagaauggccuggggcggcagcuacaucgcccuggacagcggcaagggcagcugggacugcaucaugaccagcuaccaguaccugaucauccagaacaccaccugggaggaccacugccaguucagcagacccagccccaucggcuaccugggccugcugagccagagaaccagagacaucuacaucagcagaagacugcugggcaccuucaccuggacccugagcgacagcgagggcaacgagacccccggcggcuacugccugaccagauggaugcugaucgaggccgagcugaagugcuucggcaacaccgccguggccaagugcaacgagaagcacgacgaggaguucugcgacaugcugagacuguucgacuucaacaagcaggccaucagaagacugaagaccgaggcccagaugagcauccagcugaucaacaaggccgugaacgcccugaucaacgaccagcugaucaugaagaaccaccugagagacaucaugggcauccccuacugcaacuacagcaaguacugcuaccugaaccacaccgugaccggcaagaccagccugcccagaugcugccuggugagcaacggcagcuaccugaacgagacccacuucagcgacgacaucgagcagcaggccgacaacaugaucaccgagcugcugcagaaggaguacauggacagacagggcaagaccccccugggccugguggaccuguucguguucagcaccagcuucuaccugaucagcaucuuccugcaccugaucaagauccccacccacagacacaucaccggcaagcccugccccaagccccacagacugaaccacaugggcaucugcagcugcggccuguacaagcaccccggcgugcccgugaaguggaagagaugaggacuaguuauaagacugacuagcccgaugggccucccaacgggcccuccuccccuccuugcaccgagauuaauaaaaaaaaaaaaaaaaaaaaaaaaaaaaaaaaaaaaaaaaaaaaaaaaaaaaaaaaaaaaaaaaaaaaaaaaaaaaaaaaaaaaaaaaaaaaaaaaaaaa

SEQ ID NO: 39854 - RNA, 1662 nt, Artificial Sequence
  mRNA product Design i-3 (A100) comprising derived and/or modified sequence from LASV(ISTH2010-NIG-2012;Clade II)__AIT17482__GPCmut11 (opt4)
aggagaaagcuuaccaugggccagaucaucaccuucuuccaggaggugccccacgugaucgaggaggugaugaacaucgugcugaucgcccugagccugcuggccauccugaagggcaucuacaacguggccaccugcggccuguucggccuggugagcuuccugcugcugugcggcagaagcugcagcaccaccuacaagggcguguacgagcugcagacccuggagcuggacauggccagccugaacaugaccaugccccugagcugcaccaagaacaacagccaccacuacaucauggugggcaacgagaccggccuggagcugacccugaccaacaccagcaucaucaaccacaaguucugcaaccugagcgacgcccacaagaagaaccuguacgaccacgcccugaugagcaucaucagcaccuuccaccugagcauccccaacuucaaccaguacgaggccaugagcugcgacuucaacggcggcaagaucagcgugcaguacaaccugagccacgccuacgccguggacgccgccaaccacugcggcaccaucgccaacggcgugcugcagaccuucaugagaauggccuggggcggcagcuacaucgcccuggacagcggcaagggcagcugggacugcaucaugaccagcuaccaguaccugaucauccagaacaucaccugggaggaccacugccaguucagcagacccagccccaucggcuaccugggccugcugagccagagaaccagagacaucuacaucagcagaagacugcugggcaccuucaccuggacccugagcgacagcgagggcaacgagacccccggcggcuacugccugaccagauggaugcugaucgaggccgagcugaagugcuucggcaacaccgccguggccaagugcaacgagaagcacgacgaggaguucugcgacaugcugagacuguucgacuucaacaagcaggccaucagaagacugaagaccgaggcccagaugagcauccagcugaucaacaaggccgugaacgcccugaucaacgaccagcugaucaugaagaaccaccugagagacaucaugggcauccccuacugcaacuacagcaaguacugcuaccugaaccacaccgugaccggcaagaccagccugcccagaugcugccuggugagcaacggcagcuaccugaacgagacccacuucagcgacgacaucgagcagcaggccgacaacaugaucaccgagcugcugcagaaggaguacaucgacagacagggcaagaccccccugggccugguggaccuguucguguucagcaccagcuucuaccugaucagcaucuuccugcaccuggugaagauccccacccacagacacguggugggcaagcccugccccaagccccacagacugaaccacaugggcaucugcagcugcggccuguacaagcaccccggcgugcccgugaaguggaagagaugaggacuaguuauaagacugacuagcccgaugggccucccaacgggcccuccuccccuccuugcaccgagauuaauaaaaaaaaaaaaaaaaaaaaaaaaaaaaaaaaaaaaaaaaaaaaaaaaaaaaaaaaaaaaaaaaaaaaaaaaaaaaaaaaaaaaaaaaaaaaaaaaaaaa

SEQ ID NO: 39855 - RNA, 1662 nt, Artificial Sequence
  mRNA product Design i-3 (A100) comprising derived and/or modified sequence from LASV(Lassa virus/H.sapiens-wt/NGA/2015/ISTH_0543;Clade II)__AVO03639__GPCmut11 (opt4)
aggagaaagcuuaccaugggccagaucaucaccuucuuccaggaggugccccacgugaucgaggaggugaugaacaucgugcugaucgcccugagccugcuggccauccugaagggcaucuacaacguggccaccugcggccuguucggccuggugagcuuccugcugcugugcggcagaagcugcagcaccaccuacaagggcguguacgagcugcagacccuggagcuggacauggccaaccugaacaugaccaugccccugagcugcaccaagaacaacagccaccacuacaucauggugggcaacgagaccggccuggagcugacccugaccaacaccagcaucaucaaccacaaguucugcaaccugagcgacgcccacaagaagaaccuguacgaccacgcccugaugagcaucaucagcaccuuccaccugagcauccccaacuucaaccaguacgaggccaugagcugcgacuucaacggcggcaagaucagcgugcaguacaaccugagccacaccuacgccguggacgccgccaaccacugcggcaccaucgccaacggcgugcugcagaccuucaugagaauggccuggggcggcagcuacaucgcccuggacagcggcaagggcagcugggacugcaucaugaccagcuaccaguaccuggugauccagaacaccaccugggaggaccacugccaguucagcagacccagccccaucggcuaccugggccugcugagccagagaaccagagacaucuacaucagcagaagacugcugggcaccuucaccuggacccugagcgacagcgagggcaacgagacccccggcggcuacugccugaccagauggaugcugaucgaggccgagcugaagugcuucggcaacaccgccguggccaagugcaacgagaagcacgacgaggaguucugcgacaugcugagacuguucgacuucaacaagcaggccaucagaagacugaagaccgaggcccagaugagcauccagcugaucaacaaggccgugaacgcccugaucaacgaccagcugaucaugaagaaccaccugagagacaucaugggcauccccuacugcaacuacagcaaguacugcuaccugaaccacaccgugaccggcaagaccagccugcccagaugcugccuggugagcaacggcagcuaccugaacgagacccacuucagcgacgacaucgagcagcaggccgacaacaugaucaccgagcugcugcagaaggaguacaucgacagacagggcaagaccccccugggccugguggaccuguucguguucagcaccagcuucuaccugaucagcaucuuccugcaccuggugaagauccccacccacagacacaucaccggcaagcccugccccaagccccacagacugaaccacaugggcaucugcagcugcggccuguacaagcaccccggcgugcccgugaaguggaagagaugaggacuaguuauaagacugacuagcccgaugggccucccaacgggcccuccuccccuccuugcaccgagauuaauaaaaaaaaaaaaaaaaaaaaaaaaaaaaaaaaaaaaaaaaaaaaaaaaaaaaaaaaaaaaaaaaaaaaaaaaaaaaaaaaaaaaaaaaaaaaaaaaaaaa

SEQ ID NO: 39856 - RNA, 1662 nt, Artificial Sequence
  mRNA product Design i-3 (A100) comprising derived and/or modified sequence from LASV(Lassa virus/H.sapiens-wt/NGA/2016/ISTH_0009;Clade II)__AVO03571__GPCmut11 (opt4)
aggagaaagcuuaccaugggccagaucaucaccuucuuccaggaggugccccacgugaucgaggaggugaugaacaucgugcugaucgcccugagccugcuggccauccugaagggcaucuacaacguggccaccugcggccugcugggccuggugagcuuccugcugcugugcggcagaagcugcagcaccaccuacaagggcguguacgagcugcagacccuggagcuggacauggccagccugaacaugaccaugccccugagcugcaccaagaacaacagccaccacuacaucauggugggcaacgagaccggccuggagcugacccugaccaacaccagcaucaucaaccacaaguucugcaaccugagcgacgcccacaagaagaaccuguacgaccacgcccugaugagcaucaucagcaccuuccaccugagcauccccaacuucaaccaguacgaggccaugagcugcgacuucaacggcggcagaaucagcgugcaguacaaccugagccacagcuacgccguggacgccgccaaccacugcggcaccaucgccaacggcgugcugcagaccuucaugagaauggccuggggcggcagcuacaucgcccuggacagcggcaagggcagcugggacugcaucaugaccagcuaccaguaccugaucauccagaacaccaccugggaggaccacugccaguucagcagacccagccccaucggcuaccugggccugcugagccagagaaccagagacaucuacaucagcagaagacugcugggcaccuucaccuggacccugagcgacagcgagggcaacgagacccccggcggcuacugccugaccagauggaugcugaucgaggccgagcugaagugcuucggcaacaccgccguggccaagugcaacgagaagcacgacgaggaguucugcgacaugcugagacuguucgacuucaacaagcaggccaucagaagacugaagaccgaggcccagaugagcauccagcugaucaacaaggccgugaacgcccugaucaacgaccagcugaucaugaagaaccaccugagagacaucaugggcauccccuacugcaacuacagcaaguacugcuaccugaaccacaccgugaccggcaagaccagccugcccagaugcugccuggugagcaacggcagcuaccugaacgagacccacuucagcgacgacaucgagcagcaggccgacaacaugaucaccgagcugcugcagaaggaguacaucgacagacagggcaagaccccccugggccugguggaccuguucguguucagcaccagcuucuaccugaucagcaucuuccugcaccuggugaagauccccacccacagacacaucaccggcaagcccugccccaagccccacagacugaaccacaugggcaucugcagcugcggccuguacaaccaccccggcgugcccgugaaguggaagagaugaggacuaguuauaagacugacuagcccgaugggccucccaacgggcccuccuccccuccuugcaccgagauuaauaaaaaaaaaaaaaaaaaaaaaaaaaaaaaaaaaaaaaaaaaaaaaaaaaaaaaaaaaaaaaaaaaaaaaaaaaaaaaaaaaaaaaaaaaaaaaaaaaaaa

SEQ ID NO: 39857 - RNA, 1662 nt, Artificial Sequence
  mRNA product Design i-3 (A100) comprising derived and/or modified sequence from LASV(Lassa virus/H.sapiens-wt/NGA/2016/ISTH_0017;Clade II)__AVO03567__GPCmut11 (opt4)
aggagaaagcuuaccaugggccagaucaucaccuucuuccaggaggugccccacgugaucgaggaggugaugaacaucgugcugaucgcccugagccugcuggccauccugaagggcaucuacaacguggccaccugcggccuguucggccuggugagcuuccugcugcugugcggcagaagcugcagcaccaccuacaagggcguguacgagcugcagacccuggagcuggacauggccagccugaacaugaccaugccccugagcugcaccaagaacaacagccaccacuacaucauggugggcaacgagaccggccuggagcugacccugaccaacaccagcaucaucaaccacaaguucugcaaccugagcgacgcccacaagaagaaccuguacgaccacgcccugaugagcaucaucagcaccuuccaccugagcauccccaacuucaaccaguacgaggccaugagcugcgacuucaacggcggcaagaucagcgugcaguacaaccugagccacaccuacgccaucgacgccgccaaccacugcggcaccaucgccaacggcgugcugcagaccuucaugagaauggccuggggcggcagcuacaucgcccuggacagcggcaagggcagcugggacugcaucaugaccagcuaccaguaccugaucauccagaacaccaccugggaggaccacugccaguucagcagacccagccccaucggcuaccugggccugcugagccagagaaccagagacaucuacaucagcagaagacugcugggcaccuucaccuggacccugagcgacagcgagggcaacgagacccccggcggcuacugccugaccagauggaugcugaucgaggccgagcugaagugcuucggcaacaccgccguggccaagugcaacgagaagcacgacgaggaguucugcgacaugcugagacuguucgacuucaacaagcaggccaucagaagacugaagaccgaggcccagaugagcauccagcugaucaacaaggccgugaacgcccugaucaacgaccagcugaucaugaagaaccaccugagagacaucaugggcauccccuacugcaacuacagcaaguacugcuaccugaaccacaccgugaccggcaagaccagccugcccagaugcugccuggugagcaacggcagcuaccugaacgagacccacuucagcgacgacaucgagcagcaggccgacaacaugaucaccgagcugcugcagaaggaguacauggacagacagggcaagaccccccugggccugguggaccuguucguguucagcaccagcuucuaccugaucagcaucuuccugcaccuggugagaauccccacccacagacacgugaucggcaagcccugccccaagccccacagacugaaccacaugggcaucugcagcugcggccuguacaagcaccccggcgugcccgugaaguggaagagaugaggacuaguuauaagacugacuagcccgaugggccucccaacgggcccuccuccccuccuugcaccgagauuaauaaaaaaaaaaaaaaaaaaaaaaaaaaaaaaaaaaaaaaaaaaaaaaaaaaaaaaaaaaaaaaaaaaaaaaaaaaaaaaaaaaaaaaaaaaaaaaaaaaaa

SEQ ID NO: 39858 - RNA, 1662 nt, Artificial Sequence
  mRNA product Design i-3 (A100) comprising derived and/or modified sequence from LASV(Lassa virus/H.sapiens-wt/NGA/2018/ISTH_0959;Clade II)__AVV65099__GPCmut11 (opt4)
aggagaaagcuuaccaugggccagaucaucaccuucuuccaggaggugccccacgugaucgaggaggugaugaacaucgugcugaucgcccugagccugcuggccauccugaagggcaucuacaacguggugaccugcggccuguucggccuggugagcuuccugcugcugugcggcagaagcugcagcaccaccuacaagggcguguacgagcugcagacccuggagcuggacauggccagccugaacaugaccaugccccugagcugcaccaagaacaacagccaccacuacaucauggugggcaacgagaccggccuggagcugacccugaccaacaccagcaucaucaaccacaaguucugcaaccugagcgacgcccacaagaagaaccuguacgaccacgcccugaugagcaucaucagcaccuuccaccugagcauccccaacuucaaccaguacgaggccaugagcugcgacuucaacggcggcaagaucagcgugcaguacaaccugagccacgccuacgccaucgacgccgccaaccacugcggcaccaucgccaacggcgugcugcagaccuucaugagaauggccuggggcggcagcuacaucgcccuggacagcggcaagggcagcugggacugcaucaugaccagcuaccaguaccugaucauccagaacaccaccugggaggaccacugccaguucagcagacccagccccaucggcuaccugggccugcugagccagagaaccagagacaucuacaucagcagaagacugcugggcaccuucaccuggacccugagcgacagcgagggcaacgagacccccggcggcuacugccugaccagauggaugcugaucgaggccgagcugaagugcuucggcaacaccgccguggccaagugcaacgagaagcacgacgaggaguucugcgacaugcugagacuguucgacuucaacaagcaggccaucagaagacugaagaccgaggcccagaugagcauccagcugaucaacaaggccgugaacgcccugaucaacgaccagcugaucaugaagaaccaccugagagacaucaugggcauccccuacugcaacuacagcaaguacugcuaccugaaccacaccgugaccggcaagaccagccugcccagaugcugccuggugagcaacggcagcuaccugaacgagacccacuucagcgacgacaucgagcagcaggccgacaacaugaucaccgagcugcugcagaaggaguacaucgacagacagggcaagaccccccugggccugguggaccuguucguguucagcaccagcuucuaccugaucagcaucuuccugcaccuggugaagauccccacccacagacacgugaucggcaagcccugccccaagccccacagacugaaccacaugggcaucugcagcugcggccuguacaagcaccccggcgugcccgugaaguggaagagaugaggacuaguuauaagacugacuagcccgaugggccucccaacgggcccuccuccccuccuugcaccgagauuaauaaaaaaaaaaaaaaaaaaaaaaaaaaaaaaaaaaaaaaaaaaaaaaaaaaaaaaaaaaaaaaaaaaaaaaaaaaaaaaaaaaaaaaaaaaaaaaaaaaaa

SEQ ID NO: 39859 - RNA, 1662 nt, Artificial Sequence
  mRNA product Design i-3 (A100) comprising derived and/or modified sequence from LASV(LASV003-NIG-2008;Clade II)__AIT17580__GPCmut11 (opt4)
aggagaaagcuuaccaugggccagaucaucaccuucuuccaggaggugccccacgugaucgaggaggugaugaacaucgugcugaucgcccugagccugcuggccauccugaagggcaucuacaacguggccaccugcggccuguucggccuggugagcuuccugcugcugugcggcagaagcugcagcaccaccuacaagggcguguacgagcugcagacccuggagcuggacauggccagccugaacaugaccaugccccugagcugcaccaagaacaacagccaccacuacaucauggugggcaacgagaccggccuggagcugacccugaccaacaccagcaucaucaaccacaaguucugcaaccugagcgacgcccacaagaagaaccuguacgaccacgcccugaugagcaucaucagcaccuuccaccugagcauccccaacuucaaccaguacgaggccaugagcugcgacuucaacggcggcaagaucagcgugcaguacaaccugagccacaccuacgccguggacgccgccaaccacugcggcaccaucgccaacggcgugcugcagaccuucaugagaauggccuggggcggcagcuacaucgcccuggacagcggcaagggcagcugggacugcaucaugaccagcuaccaguaccugaucauccagaacaccaccugggaggaccacugccaguucagcagacccagccccaucggcuaccugggccugcugagccagagaaccagagacaucuacaucagcagaagacugcugggcaccuucaccuggacccugagcgacagcgagagcaacgagacccccggcggcuacugccugaccagauggaugcugaucgaggccgagcugaagugcuucggcaacaccgccguggccaagugcaacgagaagcacgacgaggaguucugcgacaugcugagacuguucgacuucaacaagcaggccaucagaagacugaaggccgaggcccagaugagcauccagcugaucaacaaggccgugaacgcccugaucaacgaccagcugaucaugaagaaccaccugagagacaucaugggcauccccuacugcaacuacagcaaguacugcuaccugaaccacaccgugaccggcagaaccagccugcccagaugcugccuggugagcaacggcagcuaccugaacgagacccacuucagcgacgacaucgagcagcaggccgacaacaugaucaccgagcugcugcagaaggaguacauggacagacagggcaagaccccccugggccugguggaccuguucguguucagcaccagcuucuaccugaucagcaucuuccugcaccuggugaagauccccacccacagacacgugaucggcaagcccugccccaagccccacagacugaaccacaugggcaucugcagcugcggccuguacaagcaccccggcgugcccgugaaguggaagagaugaggacuaguuauaagacugacuagcccgaugggccucccaacgggcccuccuccccuccuugcaccgagauuaauaaaaaaaaaaaaaaaaaaaaaaaaaaaaaaaaaaaaaaaaaaaaaaaaaaaaaaaaaaaaaaaaaaaaaaaaaaaaaaaaaaaaaaaaaaaaaaaaaaaa

SEQ ID NO: 39860 - RNA, 1662 nt, Artificial Sequence
  mRNA product Design i-3 (A100) comprising derived and/or modified sequence from LASV(LASV035-NIG-2009;Clade II)__AIT17588__GPCmut11 (opt4)
aggagaaagcuuaccaugggccagaucaucaccuucuuccaggaggugccccacgugaucgaggaggugaugaacaucgugcugaucgcccugagccugcuggccauccugaagggcaucuacaacguggccaccugcggccuguucggccuggugagcuuccugcugcugugcggcagaagcugcagcaccaccuacaagggcguguacgagcugcagacccuggagcuggacauggccagccugaacaugaccaugccccugagcugcaccaagaacaacagccaccacuacaucauggugggcaacgagaccggccuggagcugacccugaccaacaccagcaucaucaaccacaaguucugcaaccugagcgacgcccacaagaagaaccuguacgaccacgcccugaugagcaucaucagcaccuuccaccugagcauccccaacuucaaccaguacgaggccaugagcugcgacuucaacggcggcaagaucagcgugcaguacaaccugagccacgccuacgccguggacgccgccaaccacugcggcaccaucgccaacggcgugcugcagaccuucaugagaauggccuggggcggcagcuacaucgcccuggacagcggcaagggcagcugggacugcaucaugaccagcuaccaguaccugaucauccagaacaccaccugggaggaccacugccaguucagcagacccagccccaucggcuaccugggccugcugagccagagaaccagagacaucuacaucagcagaagacugcugggcaccuucaccuggacccugagcgacagcgagggcaacgagacccccggcggcuacugccugaccagauggaugcugaucgaggccgagcugaagugcuucggcaacaccgccguggccaagugcaacgagaagcacgacgaggaguucugcgacaugcugagacuguucgacuucaacaagcaggccaucagaagacugaaggccgaggcccagaugagcauccagcugaucaacaaggccgugaacgcccugaucaacgaccagcugaucaugaagaaccaccugagagacaucaugggcauccccuacugcaacuacagcaaguacugcuaccugaaccacaccgugaccggcaagaccagccugcccagaugcugccuggugagcaacggcagcuaccugaacgagacccacuucagcgacgacaucgagcagcaggccgacaacaugaucaccgagcugcugcagaaggaguacaucgacagacagggcaagaccccccugggccugguggaccuguucguguucagcaccagcuucuaccugaucagcaucuuccugcaccuggugaagauccccacccacagacacgugaucggcaagcccugccccaagccccacagacugaaccacaugggcaucugcagcugcggccuguacaagcaccccggcgugcccgugaaguggaagagaugaggacuaguuauaagacugacuagcccgaugggccucccaacgggcccuccuccccuccuugcaccgagauuaauaaaaaaaaaaaaaaaaaaaaaaaaaaaaaaaaaaaaaaaaaaaaaaaaaaaaaaaaaaaaaaaaaaaaaaaaaaaaaaaaaaaaaaaaaaaaaaaaaaaa

SEQ ID NO: 39861 - RNA, 1662 nt, Artificial Sequence
  mRNA product Design i-3 (A100) comprising derived and/or modified sequence from LASV(LASV1000-NIG-2009;Clade II)__AIT17782__GPCmut11 (opt4)
aggagaaagcuuaccaugggccagaucaucaccuucuuccaggaggugccccacgugaucgaggaggugaugaacaucgugcugaucgcccugagccugcuggccauccugaagggcaucuacaacguggccaccugcggccuguucggccuggugagcuuccugcugcugugcggcagaagcugcagcaccaccuacaagggcguguacgagcugcagacccuggagcuggacauggccagccugaacaugaccaugccccugagcugcaccaagaacaacagccaccacuacaucauggugggcaacgagaccggccuggagcugacccugaccaacaccagcaucaucaaccacaaguucugcaaccugagcgacgcccacaagaagaaccuguacgaccacgcccugaugagcaucaucagcaccuuccaccugagcauccccaacuucaaccaguacgaggccaugagcugcgacuucaacggcggcaagaucagcgugcaguacaaccugagccacaccuacgccguggacgccgccaaccacugcggcaccaucgccaacggcgugcugcagaccuucaugagaauggccuggggcggcagcuacaucgcccuggacagcggcaagggcagcugggacugcaucaugaccagcuaccaguaccugaucauccagaacaccaccugggaggaccacugccaguucagcagacccagccccaucggcuaccugggccugcugagccagagaaccagagacaucuacaucagcagaagacugcugggcaccuucaccuggacccugagcgacagcgagggcaacgagacccccggcggcuacugccugaccagauggaugcugaucgaggccgagcugaagugcuucggcaacaccgccguggccaagugcaacgagaagcacgacgaggaguucugcgacaugcugagacuguucgacuucaacaagcaggccaucaagagacugaagaccgaggcccagaugagcauccagcugaucaacaaggccgugaacgcccugaucaacgaccagcugaucaugaagaaccaccugagagacaucaugggcauccccuacugcaacuacagcaaguacugcuaccugaaccacaccgugaccggcaagaccagccugcccagaugcugccuggugagcaacggcagcuaccugaacgagacccacuucagcgacgacaucgagcagcaggccgacaacaugaucaccgagcugcugcagaaggaguacaucgacagacagggcaagaccccccugggccugguggaccuguucguguucagcaccagcuucuaccugaucagcaucuuccugcaccuggugaagauccccacccacagacacguggugggcaagcccugccccaagccccacagacugaaccacaugggcaucugcagcugcggccuguacaagcaccccggcgugcccgugaaguggaagagaugaggacuaguuauaagacugacuagcccgaugggccucccaacgggcccuccuccccuccuugcaccgagauuaauaaaaaaaaaaaaaaaaaaaaaaaaaaaaaaaaaaaaaaaaaaaaaaaaaaaaaaaaaaaaaaaaaaaaaaaaaaaaaaaaaaaaaaaaaaaaaaaaaaaa

SEQ ID NO: 39862 - RNA, 1662 nt, Artificial Sequence
  mRNA product Design i-3 (A100) comprising derived and/or modified sequence from LASV(LASV221-NIG-2010;Clade II)__AIT17624__GPCmut11 (opt4)
aggagaaagcuuaccaugggccagaucaucaccuucuuccaggaggugccccacgugaucgaggaggugaugaacaucgugcugaucgcccugagccugcuggccauccugaagggcaucuacaacguggccaccugcggccuguucggccuggugagcuuccugcugcugugcggcagaagcugcagcaccaccuacaagggcguguacgagcugcagacccuggagcuggacauggccagccugaacaugaccaugccccugagcugcaccaagaacaacagccaccacuacaucauggugggcaacgagaccggccuggagcugacccugaccaacaccagcaucaucaaccacaaguucugcaaccugagcgacgcccacaagaagaaccuguacgaccacgcccugaugagcaucaucagcaccuuccaccugagcauccccaacuucaaccaguacgaggccaugagcugcgacuucaacggcggcaagaucagcgugcaguacaaccugagccacaccuacgccaucgacgccgccaaccacugcggcaccaucgccaacggcgugcugcagaccuucaugagaauggccuggggcggcagcuacaucgcccuggacagcggcaagggcagcugggacugcaucaugaccagcuaccaguaccugaucauccagaacaccaccugggaggaccacugccaguucagcagacccagccccaucggcuaccugggccugcugagccagagaaccagagacaucuacaucagcagaagacugcugggcaccuucaccuggacccugagcgacagcgagggcaacgagacccccggcggcuacugccugaccagauggaugcugaucgaggccgagcugaagugcuucggcaacaccgccguggccaagugcaacgagaagcacgacgaggaguucugcgacaugcugagacuguucgacuucaacaagcaggccaucagaagacugaagaccgaggcccagaugagcauccagcugaucaacaaggccgugaacgcccugaucaacgaccagcugaucaugaagaaccaccugagagacaucaugggcauccccuacugcaacuacagcaaguacugcuaccugaaccacaccgugaccggcaagaccagccugcccagaugcugccuggugagcaacggcagcuaccugaacgagacccacuucagcgacgacaucgagcagcaggccgacaacaugaucaccgagaugcugcagaaggaguacauggacagacagggcaagaccccccugggccugguggaccuguucguguucagcaccagcuucuaccugaucagcaucuuccugcaccuggugaagauccccacccacagacacgugaucggcaagcccugccccaagccccacagacugaaccacaugggcaucugcagcugcggccuguacaagcaccccggcgugcccgugaaguggaagagaugaggacuaguuauaagacugacuagcccgaugggccucccaacgggcccuccuccccuccuugcaccgagauuaauaaaaaaaaaaaaaaaaaaaaaaaaaaaaaaaaaaaaaaaaaaaaaaaaaaaaaaaaaaaaaaaaaaaaaaaaaaaaaaaaaaaaaaaaaaaaaaaaaaaa

SEQ ID NO: 39863 - RNA, 1662 nt, Artificial Sequence
  mRNA product Design i-3 (A100) comprising derived and/or modified sequence from LASV(LASV237-NIG-2010;Clade II)__AIT17638__GPCmut11 (opt4)
aggagaaagcuuaccaugggccagaucaucaccuucuuccaggaggugccccacgugaucgaggaggugaugaacaucgugcugaucgcccugagccugcuggccauccugaagggcaucuacaacguggccaccugcggccuguucggccuggugagcuuccugcugcugugcggcagaagcugcagcaccaccuacaagggcguguacgagcugcagacccuggagcuggacauggccagccugaacaugaccaugccccugagcugcaccaagaacaacagccaccacuacaucauggugggcaacgagaccggccuggagcugacccugaccaacaccagcaucaucaaccacaaguucugcaaccugagcgacgcccacaagaaggaccuguacgaccacgcccugaugagcaucaucagcaccuuccaccugagcauccccaacuucaaccaguacgaggccaugagcugcgacuucaacggcggcaagaucagcgugcaguacaaccugagccacaccuacgccguggacgccgccaaccacugcggcaccaucgccaacggcgugcugcagaccuucaugagaauggccuggggcggcagcuacaucgcccuggacagcggcaagggcagcugggacugcaucaugaccagcuaccaguaccugaucauccagaacaccaccugggaggaccacugccaguucagcagacccagccccaucggcuaccugggccugcugagccagagaaccagagacaucuacaucagcagaagacugcugggcaccuucaccuggacccugagcgacagcgagggcaacgagacccccggcggcuacugccugaccagauggaugcugaucgaggccgagcugaagugcuucggcaacaccgccguggccaagugcaacgagaagcacgacgaggaguucugcgacaugcugagacuguucgacuucaacaagcaggccaucagaagacugaagaccgaggcccagaugagcauccagcugaucaacaaggccgugaacgcccugaucaacgaccagcugaucaugaagaaccaccugagagacaucaugggcauccccuacugcaacuacagcaaguacugcuaccugaaccacaccgugaccggcaagaccagccugcccagaugcugccuggugagcaacggcagcuaccugaacgagacccacuucagcgacgacaucgagcagcaggccgacaacaugaucaccgagcugcugcagaaggaguacauggacagacagggcaagaccccccugggccugguggaccuguucguguucagcaccagcuucuaccugaucagcaucuuccugcaccugaucaagauccccacccacagacacaucaccggcaagcccugccccaagccccacagacugaaccacaugggcaucugcagcugcggccuguacaagcaccccggcgugcccgugaaguggaagagaugaggacuaguuauaagacugacuagcccgaugggccucccaacgggcccuccuccccuccuugcaccgagauuaauaaaaaaaaaaaaaaaaaaaaaaaaaaaaaaaaaaaaaaaaaaaaaaaaaaaaaaaaaaaaaaaaaaaaaaaaaaaaaaaaaaaaaaaaaaaaaaaaaaaa

SEQ ID NO: 39864 - RNA, 1662 nt, Artificial Sequence
  mRNA product Design i-3 (A100) comprising derived and/or modified sequence from LASV(LASV253-NIG-2011;Clade II)__AIT17670__GPCmut11 (opt4)
aggagaaagcuuaccaugggccagaucaucaccuucuuccaggaggugccccacgugaucgaggaggugaugaacaucgugcugaucgcccugagccugcuggccauccugaagggcaucuacaacguggccaccugcggccuguucggccuggugagcuuccugcugcugugcggcagaagcugcagcaccaccuacaagggcguguacgagcugcagacccuggagcuggacauggccagccugaacaugaccaugccccugagcugcaccaagaacaacagccaccacuacaucauggugggcaacgagaccggccuggagcugacccugaccaacaccagcaucaucaaccacaaguucugcaaccugagcgacgcccacaagaagaaccuguacgaccacgcccugaugagcaucaucagcaccuuccaccugagcauccccaacuucaaccaguacgaggccaugagcugcgacuucaacggcggcaagaucagcgugcaguacaaccugagccacaccuacgccguggacgccgccaaccacugcggcaccaucgccaacggcgugcugcagaccuucaugagaauggccuggggcggcagcuacaucgcccuggacagcggcaagggcagcugggacugcaucaugaccagcuaccaguaccugaucauccagaacaccaccugggaggaccacugccaguucagcagacccagccccaucggcuaccugggccugcugagccagagaaccagagacaucuacaucagcagaagacugcugggcaccuucaccuggacccugagcgacagcgagggcaacgagacccccggcggcuacugccugaccagauggaugcugaucgaggccgagcugaagugcuucggcaacaccgccguggccaagugcaacgagaagcacgacgaggaguucugcgacaugcugagacuguucgacuucaacaagcaggccaucagaagacugaaggccgaggcccagaugagcauccagcugaucaacaaggccgugaacgcccugaucaacgaccagcugaucaugaagaaccaccugagagacaucaugggcauccccuacugcaacuacagcaaguacugcuaccugaaccacaccgugaccggcagaaccagccugcccagaugcugccuggugagcaacggcagcuaccugaacgagacccacuucagcgacgacaucgagcagcaggccgacaacaugaucaccgagcugcugcagaaggaguacaucgacagacagggcaagaccccccugggccugguggaccuguucguguucagcaccagcuucuaccugaucagcaucuuccugcaccuggugaagauccccacccacagacacaucaucggcaagcccugccccaagccccacagacugaaccacaugggcaucugcagcugcggccuguacaagcaccccggcgugcccgugaaguggaagagaugaggacuaguuauaagacugacuagcccgaugggccucccaacgggcccuccuccccuccuugcaccgagauuaauaaaaaaaaaaaaaaaaaaaaaaaaaaaaaaaaaaaaaaaaaaaaaaaaaaaaaaaaaaaaaaaaaaaaaaaaaaaaaaaaaaaaaaaaaaaaaaaaaaaa

SEQ ID NO: 39865 - RNA, 1662 nt, Artificial Sequence
  mRNA product Design i-3 (A100) comprising derived and/or modified sequence from LASV(LASV254-NIG-2011;Clade II)__AIT17674__GPCmut11 (opt4)
aggagaaagcuuaccaugggccagaucaucaccuucuuccaggaggugccccacgugaucgaggaggugaugaacaucgugcugaucgcccugagccugcuggccauccugaagggcaucuacaacguggccaccugcggccuguucggccuggugagcuuccugcugcugugcggcagaagcugcagcaccaccuacaagggcguguacgagcugcagacccuggagcuggacaugaccaaccugaacaugaccaugccccugagcugcaccaagaacaacagccaccacuacaucauggugggcaacgagaccggccuggagcugacccugaccaacaccagcaucaucaaccacaaguucugcaaccugagcgacgcccacaagaagaaccuguacaaccacgcccugaugagcaucaucagcaccuuccaccugagcauccccaacuucaaccaguacgaggccaugagcugcgacuucaacggcggcaagaucagcgugcaguacaaccugagccacagcuacgccguggacgccgccaaccacugcggcaccaucgccaacggcgugcugcagaccuucaugagaauggccuggggcggcagcuacaucgcccuggacagcggcaagggcaacugggacugcaucaugaccagcuaccaguaccugaucauccagaacaccaccugggaggaccacugccaguucagcagacccagccccaucggcuaccugggccugcugagccagagaaccagagacaucuacaucagcagaagacugcugggcaccuucaccuggacccugagcgacagcgagggcaacgagacccccggcggcuacugccugaccagauggaugcugaucgaggccgagcugaagugcuucggcaacaccgccguggccaagugcaacgagaagcacgacgaggaguucugcgacaugcugagacuguucgacuucaacaagcaggccaucagaagacugaagaccgaggcccaggccaacauccagcugaucaacaaggccgugaacgcccugaucaacgaccagcugaucaugaagaaccaccugagagacaucaugggcauccccuacugcaacuacagcaaguacugcuaccugaaccacaccgugaccggcaagaccagccugcccagaugcugccuggugagcaacggcagcuaccugaacgagacccacuucagcgacgacaucgagcagcaggccgacaacaugaucaccgagcugcugcagaaggaguacauggacagacagggcaagaccccccugggccugguggaccuguucguguucagcaccagcuucuaccugaucagcaucuuccugcaccuggugaagauccccacccacagacacgugaucggcaagcccugccccaagccccacagacugaaccacaugggcaucugcagcugcggccuguacaagcaccccggcgugcccgugaaguggaagagaugaggacuaguuauaagacugacuagcccgaugggccucccaacgggcccuccuccccuccuugcaccgagauuaauaaaaaaaaaaaaaaaaaaaaaaaaaaaaaaaaaaaaaaaaaaaaaaaaaaaaaaaaaaaaaaaaaaaaaaaaaaaaaaaaaaaaaaaaaaaaaaaaaaaa

SEQ ID NO: 39866 - RNA, 1662 nt, Artificial Sequence
  mRNA product Design i-3 (A100) comprising derived and/or modified sequence from LASV(Nig08-A19;Clade III)__ADU56618__GPCmut11 (opt4)
aggagaaagcuuaccaugggccagaucgugaccuucuuccaggaggugccccacgugaucgaggaggugaugaacaucgugcugaucgcccugagcauccuggccauccugaagggccuguacaacaucgccaccugcggccugaucggccuggugaccuuccugcugcugagcggcagaagcugcagcaugaccuacaagggcguguacgagcugcagacccuggagcugaacaugaacacccugaacaugaccaugccccugagcugcaccaagaacaacagccaccacuacaucauggugggcaacgagaccggccuggagcugacccugaccaacaccagccugcugcaccacaaguucugcaaccugagcgacgcccacaagaagaaccuguacgaccacacccugaugagcaucaucagcaccuuccaccugagcauccccaacuucaaccaguacgaggccaugagcugcgacuucaacggcggcaagaucaccgugcaguacaaccugagccacagcuacgccaucgacgccgccaaccacugcggcaccguggccaacggcgugcugcagaccuucaugagaauggccuggggcggcagcuacaucgcccuggacagcggcagaggcaagugggacugcaucaugaccagcuaccaguaccugaucauccagaacaccaccugggaggaccacugccaguucagcagacccagccccaucggcuaccugggccugcugagccagagaaccagagacaucuacaucagcagaagacugcugggcaccuucaccuggacccugagcgacagcgagggcaacgagacccccggcggcuacugccugaccagauggaugcugaucgaggccgagcugaagugcuucggcaacaccgccguggccaagugcaacgagaagcacgacgaggaguucugcgacaugcugagacuguucgacuucaacaagcaggccaucagaagacugaaggccgaggcccagaugagcauccagcugaucaacaaggccgugaacgcccugaucaacgaccagcugaucaugaagaaccaccugagagacaucaugggcauccccuacugcaacuacagcaaguacugcuaccugaaccacaccagcaccggcagaaccagccugcccagaugcugccuggugagcaacggcagcuaccugaacgagacccacuucagcgacgacaucgagcagcaggccgacaacaugaucaccgagaugcugcagaaggaguaccuggacagacagggcaagaccccccugggccugguggaccuguucguguucagcaccagcuucuaccugaucagcaucuuccugcaccuggugaagauccccacccacagacacaucgugggcaagcccugccccaagccccacagacugaaccacaugggcaucugcagcugcggccuguacaagcagcccggcgugcccgugagauggaagagaugaggacuaguuauaagacugacuagcccgaugggccucccaacgggcccuccuccccuccuugcaccgagauuaauaaaaaaaaaaaaaaaaaaaaaaaaaaaaaaaaaaaaaaaaaaaaaaaaaaaaaaaaaaaaaaaaaaaaaaaaaaaaaaaaaaaaaaaaaaaaaaaaaaaa

SEQ ID NO: 39867 - RNA, 1665 nt, Artificial Sequence
  mRNA product Design i-3 (A100) comprising derived and/or modified sequence from LASV(G1180-SLE-2010;Clade IV)__AIT17168__GPCmut11 (opt4)
aggagaaagcuuaccaugggccagaucgugaccuucuuccaggaggugccccacgugaucgaggaggugaugaacaucgugcugaucgcccugagcauccuggccgugcugaagggccuguacaacuucgccaccugcggccuggugggccugcugaccuuccugcugcugugcggcagaagcugcaccgccagcagauacaagggcguguacgagcugcagacccuggagcugaacauggagacccugaacaugaccaugccccugagcugcaccaagaacaacagccaccacuacaucauggugggcaacgagaccggccuggagcugacccugaccaacaccagcaucaucaaccacaaguucugcaaccugagcgacgcccacaagaagaaccuguacgaccacgcccugaugagcaucaucagcaccuuccaccugagcauccccaacuucaaccaguacgaggccaugagcugcgacuucaacggcggcaagaucagcgugcaguacaaccugagccacagcuacgccggcgacgccgccaaccacugcggcaccguggccaacggcgugcugcagaccuucaugagaauggccuggggcggcagcuacaucgcccuggacagcggccacggcagcugggacugcaucaugaccagcuaccaguaccugaucauccagaacaccaccugggaggaccacugccaguucagcagacccagccccaucggcuaccugggccugcugagccagagaaccagagacaucuacaucagcagaagacugcugggcaccuucaccuggacccugagcgacagcgagggcaaggacacccccggcggcuacugccugaccagauggaugcugaucgaggccgagcugaagugcuucggcaacaccgccguggccaagugcaacgagaagcacgacgaggaguucugcgacaugcugagacuguucgacuucaacaagcaggccauccagagacugaaggccgaggcccagaugagcauccagcugaucaacaaggccgugaacgcccugaucaacgaccagcugaucaugaagaaccaccugagagacaucaugggcauccccuacugcaacuacagcaaguacugcuaccugaaccacaccaccaccggcaagaccagccugcccaagugcugccuggugagcaacggcagcuaccugaacgagacccacuucagcgacgacaucgagcagcaggccgacaacaugaucaccgagaugcugcagaaggaguacauggagagacagggcaagaccccccugggccugguggaccuguucguguucagcaccagcuucuaccugaucagcaucuuccugcaccuggugaagauccccacccacagacacaucgugggcaagagcugccccaagccccacagacugaaccacaugggcaucugcagcugcggccuguacaagcagcccggcgugcccgugaaguggaagagaugaggacuaguuauaagacugacuagcccgaugggccucccaacgggcccuccuccccuccuugcaccgagauuaauaaaaaaaaaaaaaaaaaaaaaaaaaaaaaaaaaaaaaaaaaaaaaaaaaaaaaaaaaaaaaaaaaaaaaaaaaaaaaaaaaaaaaaaaaaaaaaaaaaaa

SEQ ID NO: 39868 - RNA, 1665 nt, Artificial Sequence
  mRNA product Design i-3 (A100) comprising derived and/or modified sequence from LASV(G1442-SLE-2011;Clade IV)__AIT17180__GPCmut11 (opt4)
aggagaaagcuuaccaugggccagaucgugaccuucuuccaggaggugccccacgugaucgaggaggugaugaacaucgugcugaucgcccugagcauccuggccgugcugaagggccuguacaacguggccaccugcggccugaucggccuggugaccuuccugcugcugugcggcagaagcugcaccaccacccuguacaagggcguguacgagcugcagacccuggagcugaacauggagacccugaacaugaccaugccccugagcugcaccaagaacaacagccaccacuacaucagagugggcaacgagaccggccuggagcugacccugaccaacaccagcaucaucaaccacaaguucugcaaccugagcgacgcccacaagaagaaccuguacgaccacgcccugaugagcaucaucagcaccuuccaccugagcauccccaacuucaaccaguacgaggccaugagcugcgacuucaacggcggcaagaucagcgugcaguacaaccugagccacagcuacgccggcgacgccgccaaccacugcggcaccguggccaacggcgugcugcagaccuucaugagaauggccuggggcggcagcuacaucgcccuggacagcggcagaggcaacugggacugcaucaugaccagcuaccaguaccugaucauccagaacaccaccugggacgaccacugccaguucagcagacccagccccaucggcuaccugggccugcugagccagagaaccagagacguguacaucagcagaagacugcugggcaccuucaccuggacccugagcgacagcgagggcaaggacacccccggcggcuacugccugaccagauggaugcugaucgaggccgagcugaagugcuucggcaacaccgccguggccaagugcaacgagaagcacgacgaggaguucugcgacaugcugagacuguucgacuucaacaagcaggccauccagagacugaaggccgaggcccagaugagcauccagcugaucaacaaggccgugaacgcccugaucaacgaccagcugaucaugaagaaccaccugagagacaucaugggcauccccuacugcaacuacagcaaguacugcuaccugaacaacaccgccaccggcaagaccagccugcccaagugcugccugaucagcaacggcagcuaccugaacgagacccacuucagcgacgacaucgagcaggaggccgacaacaugaucaccgagaugcugcagaaggaguacauggagagacagggcaagaccccccugggccugguggaccuguucguguucagcaccagcuucuaccugaucagcaucuuccugcaccuggugaagauccccacccacagacacaucgugggcaagagcugccccaagccccacagacugaaccacaugggcaucugcagcugcggccuguacaagcagcccggcgugcccgugagauggaagagaugaggacuaguuauaagacugacuagcccgaugggccucccaacgggcccuccuccccuccuugcaccgagauuaauaaaaaaaaaaaaaaaaaaaaaaaaaaaaaaaaaaaaaaaaaaaaaaaaaaaaaaaaaaaaaaaaaaaaaaaaaaaaaaaaaaaaaaaaaaaaaaaaaaaa

SEQ ID NO: 39869 - RNA, 1665 nt, Artificial Sequence
  mRNA product Design i-3 (A100) comprising derived and/or modified sequence from LASV(G3010-SLE-2013;Clade IV)__AIT17344__GPCmut11 (opt4)
aggagaaagcuuaccaugggccagaucgugaccuucuuccaggaggugccccacgugaucgaggaggugaugaacaucgugcugaucgcccugagcauccuggccgugcugaagggccuguacaacuucgccaccugcggccuggugggccuggugaccuuccugcugcugugcggcagaagcugcaccaccagccuguacaagggcguguacgagcugcagacccuggagcugaacauggagacccugaacaugaccaugccccugagcugcaccaagaacaacagccaccacuacaucauggugggcaacgagaccggccuggagcugacccugaccaacaccagcaucaucaaccacaaguucugcaaccugagcgacgcccacaagaagaaccuguacaaccacgcccugaugagcaucaucagcaccuuccaccugagcauccccaacuucaaccaguacgaggccaugagcugcgacuucaacggcggcaagaucagcgugcaguacaaccugagccacagcuacgccggcgacgccgccagccacugcggcaccguggccaacggcgugcugcagaccuucaugagaauggccuggggcggcagcuacaucgcccuggacagcggcuacggcaagugggacugcaucaugaccagcuaccaguaccugaucauccagaacaccaccugggaggaccacugccaguucagcagacccagccccaucggcuaccugggccugcugagccagagaaccagagacaucuacaucagcagaagacugcugggcaccuucaccuggacccugagcgacagcgagggcaaggacacccccggcggcuacugccugaccagauggaugcugaucgaggccgagcugaagugcuucggcaacaccgccguggccaagugcaacgagaagcacgacgaggaguucugcgacaugcugagacuguucgacuucaacaagcaggccauccagagacugaagaccgaggcccagaugagcauccagcugaucaacaaggccgugaacgcccugaucaacgaccagcugaucaugaagaaccaccugagagacaucaugggcauccccuacugcaacuacagcaaguacugcuaccugaaccacaccaccaccggcaagaccagccugcccaagugcugccuggugagcaacggcagcuaccugaacgagacccacuucagcgacgacaucgagcagcaggccgacaacaugaucaccgagaugcugcagaaggaguacauggagagacagggcaagaccccccugggccugguggaccuguucguguucagcaccagcuucuaccugaucagcaucuuccugcaccuggugaagauccccacccacagacacaucgugggcaagagcugccccaagccccacagacugaaccacaugggcaucugcagcugcggccuguacaagcagcccggcgugcccgugagauggaagagaugaggacuaguuauaagacugacuagcccgaugggccucccaacgggcccuccuccccuccuugcaccgagauuaauaaaaaaaaaaaaaaaaaaaaaaaaaaaaaaaaaaaaaaaaaaaaaaaaaaaaaaaaaaaaaaaaaaaaaaaaaaaaaaaaaaaaaaaaaaaaaaaaaaaa

SEQ ID NO: 39870 - RNA, 1665 nt, Artificial Sequence
  mRNA product Design i-3 (A100) comprising derived and/or modified sequence from LASV(G502-SLE-2009;Clade IV)__AIT17126__GPCmut11 (opt4)
aggagaaagcuuaccaugggccagaucgugaccuucuuccaggaggugccccacgugaucgaggaggugaugaacaucgugcugaucgcccugagcauccuggccgugcugaagggccuguacaacuucgccaccugcggccuggugggccugcugaccuuccugcugcugugcggcagaagcugcaccaccggccuguacaagggcguguacgagcugcagacccuggagcugaacauggagacccugaacaugaccaugccccugagcugcaccaagaacaacagccaccacuacaucauggugggcaacgagaccggccuggagcugacccugaccaacaccagcaucaucaaccacaaguucugcaaccugagcgacgcccacaagaagaaccuguacgaccacgcccugaugagcaucaucagcaccuuccaccugagcauccccaacuucaaccaguacgaggccaugagcugcgacuucaacggcggcaagaucagcgugcaguacaaccugagccacagcuacgccggcgacgccgccgaccacugcggcaccguggccaacggcgugcugcagaccuucaugagaauggccuggggcggcagcuacaucgcccuggacagcggcagaggcagaugggacugcaucaugaccagcuaccaguaccugaucauccagaacaccaccugggaggaccacugccaguucagcagacccagccccaucggcuaccugggccugcugagccagagaaccagagacaucuacaucagcagaagacugcugggcaccuucaccuggacccugagcgacagcgagggcaaggacacccccggcggcuacugccugaccagauggaugcugaucgaggccgagcugaagugcuucggcaacaccgccguggccaagugcaacgagaagcacgacgaggaguucugcgacaugcugagacuguucgacuucaacaagcaggccauccagagacugaaggccgaggcccagaugagcauccagcugaucaacaaggccgugaacgcccugaucaacgaccagcuggugaugaagaaccaccugagagacaucaugggcauccccuacugcaacuacagcagauacugcuaccugaaccacaccaccaccggcagaaccagccugcccaagugcugccuggugagcaacggcagcuaccugaacgagacccacuucagcgacgacaucgagcagcaggccgacaacaugaucaccgagaugcugcagaaggaguacauggagagacagggcaagaccccccugggccugguggaccuguucguguucagcaccagcuucuaccugaucagcaucuuccugcaccuggugaagauccccacccacagacacaucgugggcaagagcugccccaagccccacagacugaaccacaugggcaucugcagcugcggccuguacaagcagcccggcgugcccgugaaguggaagagaugaggacuaguuauaagacugacuagcccgaugggccucccaacgggcccuccuccccuccuugcaccgagauuaauaaaaaaaaaaaaaaaaaaaaaaaaaaaaaaaaaaaaaaaaaaaaaaaaaaaaaaaaaaaaaaaaaaaaaaaaaaaaaaaaaaaaaaaaaaaaaaaaaaaa

SEQ ID NO: 39871 - RNA, 1665 nt, Artificial Sequence
  mRNA product Design i-3 (A100) comprising derived and/or modified sequence from LASV(G733-SLE-2010;Clade IV)__AIT17154__GPCmut11 (opt4)
aggagaaagcuuaccaugggccagaucgugaccuucuuccaggaggugccccacgugaucgaggaggugaugaacaucgugcugaucgcccugagcauccuggccgugcugaagggccuguacaacuucgccaccugcggcaucgugggccuggugagcuuccugcugcugugcggcagaagcugcaccaccagccuguacaagggcguguacgagcugcagacccuggagcugaacauggagacccugaacaugaccaugccccugagcugcaccaagaacaacagccaccacuacaucauggugggcaacgagaccggccuggagcugacccugaccaacaccagcaucaucaaccacaaguucugcaaccugagcgacgcccacaagaagaaccuguacgaccacgcccugaugagcaucaucagcaccuuccaccugagcauccccaacuucaaccaguacgaggccaugagcugcgacuucaacggcggcaagaucagcgugcaguacaaccugagccacagcuacgccggcgacgccgccaaccacugcggcaccaucgccaacggcgugcugcagaccuucaugagaauggccuggggcggcagcuacaucgcccuggacagcggcagagacagaugggacugcaucaugaccagcuaccaguaccugaucauccagaacaccaccugggaggaccacugccaguucagcagacccagccccaucggcuaccugggccugcugagccagagaaccagagacaucuacaucagcagaagacugcugggcaccuucaccuggacccugagcgacagcgagggcaaggacacccccggcggcuacugccugaccagauggaugcugaucgaggccgagcugaagugcuucggcaacaccgccguggccaagugcaacgagaagcacgacgaggaguucugcgacaugcugagacuguucgacuucaacaagcaggccauccagagacugaaggccgaggcccagaugagcauccagcugaucaacaaggccgugaacgcccugaucaacgaccagcugaucaugaagaaccaccugagagacaucaugggcauccccuacugcaacuacagcaaguacugcuaccugaaccacaccaccaccggcaagaccagccugcccaagugcugccuggugagcaacggcagcuaccugaacgagacccacuucagcgacgacaucgagcagcaggccgacaacaugaucaccgagaugcugcagaaggaguacauggagagacagggcaagaccccccugggccugguggaccuguucguguucagcaccagcuucuaccugaucagcaucuuccugcaccuggugaagauccccacccacagacacguggugggcaagagcugccccaagccccacagacugaaccacaugggcaucugcagcugcggccuguacggccagcccggcgugcccgugaaguggaagagaugaggacuaguuauaagacugacuagcccgaugggccucccaacgggcccuccuccccuccuugcaccgagauuaauaaaaaaaaaaaaaaaaaaaaaaaaaaaaaaaaaaaaaaaaaaaaaaaaaaaaaaaaaaaaaaaaaaaaaaaaaaaaaaaaaaaaaaaaaaaaaaaaaaaa

SEQ ID NO: 39872 - RNA, 1665 nt, Artificial Sequence
  mRNA product Design i-3 (A100) comprising derived and/or modified sequence from MOPV/LASV reassortant(IGS-1;Clade IV)__AFY05576__GPCmut11 (opt4)
aggagaaagcuuaccaugggccagaucgugaccuucuuccaggaggugccccacgugaucgaggaggugaugaacaucgugcugaucgcccugagcgugcuggccgugcugaagggccuguacaacuucgccaccugcggccuggugggccuggugaccuuccugcugcugugcggcagaagcugcaccaccagccuguacaagggcguguacgagcugcagacccuggagcugaacauggagacccugaacaugaccaugccccugagcugcaccaagaacaacagccaccacuacaucauggugggcaacgagaccggccuggagcugacccugaccaacaccagcaucaucaaccacaaguucugcaaccugagcgacgcccacaagaagaaccuguacgaccacgcccugaugagcaucaucagcaccuuccaccugagcauccccaacuucaaccaguacgaggccaugagcugcgacuucaacggcggcaagaucagcgugcaguacaaccugagccacagcuacgccggcgacgccgccaaccacugcggcaccguggccaacggcgugcugcagaccuucaugagaauggccuggggcggcagcuacaucgcccuggacagcggcagaggcaacugggacugcaucaugaccagcuaccaguaccugaucauccagaacaccaccugggaggaccacugccaguucagcagacccagccccaucggcuaccugggccugcugagccagagaaccagagacaucuacaucagcagaagacugcugggcaccuucaccuggacccugagcgacagcgagggcgaggacacccccggcggcuacugccugaccagauggaugcugaucgaggccgagcugaagugcuucggcaacaccgccguggccaagugcaacgagaagcacgacgaggaguucugcgacaugcugagacuguucgacuucaacaagcaggccauccagagacugaaggccgaggcccagaugagcauccagcugaucaacaaggccgugaacgcccugaucaacgaccagcugaucaugaagaaccaccugagagacaucaugggcauccccuacugcaacuacagcaaguacugcuaccugaaccacaccaccaccggcagaaccagccugcccaagugcugccuggugagcaacggcagcuaccugaacgagacccacuucagcgacgacaucgagcagcaggccgacaacaugaucaccgagaugcugcagaaggaguacauggagagacagggcaagaccccccugggccugguggaccuguucguguucagcaccagcuucuaccugaucagcaucuuccugcaccuggugaagauccccacccacagacacaucgugggcaagagcugccccaagccccacagacugaaccacaugggcaucugcagcugcggccuguacaagcagcccggcgugcccgugaaguggaagagaugaggacuaguuauaagacugacuagcccgaugggccucccaacgggcccuccuccccuccuugcaccgagauuaauaaaaaaaaaaaaaaaaaaaaaaaaaaaaaaaaaaaaaaaaaaaaaaaaaaaaaaaaaaaaaaaaaaaaaaaaaaaaaaaaaaaaaaaaaaaaaaaaaaaa

SEQ ID NO: 39873 - RNA, 1665 nt, Artificial Sequence
  mRNA product Design i-3 (A100) comprising derived and/or modified sequence from LASV(LM765-SLE-2012;Clade IV)__AIT17814__GPCmut11 (opt4)
aggagaaagcuuaccaugggccagaucgugaccuucuuccaggaggugccccacgugaucgaggaggugaugaacaucgugcugaucgcccugagcauccuggccgugcugaagggccuguacaacuucgccaccugcggccuggugggccuggugaccuuccugcugcugugcggcagaagcugcaccaccagccuguacaagggcguguacgagcugcagacccuggagcugaacauggagacccugaacaugaccaugccccugagcugcaccaagaacaacagccaccacuacaucauggugggcaacgagaccggccuggagcugacccugaccaacaccagcaucaucgaccacaaguucugcaaccugagcgacgcccacagaaagaaccuguacgaccacgcccugaugagcaucaucagcaccuuccaccugagcauccccaacuucaaccaguacgaggccaugagcugcgacuucaacggcggcaagaucagcgugcaguacaaccugagccacagcuacgccaaggacgccgccgaccacugcggcaccguggccaacggcgugcugcagaccuucaugagaauggccuggggcggcagcuacaucgcccuggacagcggcagaggcagaugggacugcaucaugaccagcuaccaguaccugaucauccagaacaccaccugggaggaccacugccaguucagcagacccagccccaucggcuaccugggccugcugagccagagaaccagagacaucuacaucagcagaagacugcugggcaccuucaccuggacccugagcgacagcgagggcaaggacacccccggcggcuacugccugaccagauggaugcugaucgaggccgagcugaagugcuucggcaacaccgccguggccaagugcaacgagaagcacgacgaggaguucugcgacaugcugagacuguucgacuucaacaagcaggccauccagagacugaaggccgaggcccagaugagcauccagcugaucaacaaggccgugaacgcccugaucaacgaccagcugaucaugaagaaccaccugagagacaucaugggcauccccuacugcaacuacagcaaguacugcuaccugaaccacaccaccaccggcaagaccagccugcccaagugcugccuggugagcaacggcagcuaccugaacgagacccacuucagcgacgacaucgagcagcaggccgacaacaugaucaccgagaugcugcagaaggaguacauggagagacagggcaagaccccccugggccugguggaccuguucguguucagcaccagcuucuaccugaucagcaucuuccugcaccuggugaagauccccacccacagacacaucgugggcaagcccugccccaagccccacagacugaaccacaugggcaucugcagcugcggccuguacaagcagcccggcgugcccgugaaguggaagagaugaggacuaguuauaagacugacuagcccgaugggccucccaacgggcccuccuccccuccuugcaccgagauuaauaaaaaaaaaaaaaaaaaaaaaaaaaaaaaaaaaaaaaaaaaaaaaaaaaaaaaaaaaaaaaaaaaaaaaaaaaaaaaaaaaaaaaaaaaaaaaaaaaaaa

SEQ ID NO: 39874 - RNA, 1665 nt, Artificial Sequence
  mRNA product Design i-3 (A100) comprising derived and/or modified sequence from LASV(LM776-SLE-2012;Clade IV)__AIT17824__GPCmut11 (opt4)
aggagaaagcuuaccaugggccagaucgugaccuucuuccaggaggugccccacgugaucgaggaggugaugaacaucgugcugaucgcccugagcauccuggccgugcugaagggccuguacaacuucgccaccugcggccuggugggccuggugaccuuccugcugcugugcggcagaagcugcaccaccagcguguacaagggcguguacgagcugcagacccuggagcugaacauggagacccugaacaugaccaugccccugagcugcaccaagaacaacagccaccacuacaucauggugggcaacgagaccggccuggagcugacccugaccaacaccagcaucaucaaccacaaguucugcaaccugagcgacgcccacaagaagaaccuguacgaccacgcccugaugagcaucaucagcaccuuccaccugagcauccccaacuucaaccaguacgaggccaugagcugcgacuucaacggcggcaagaucagcgugcaguacaaccugagccacagcuacgccggcgacgccgccaaccacugcggcaccguggccaacggcgugcugcagaccuucaugagaauggccuggggcggcagcuacaucgcccuggacagcggccacggcaagugggacugcaucaugaccagcuaccaguaccugaucauccagaacaccaccugggaggaccacugccaguucagcagacccagccccaucggcuaccugggccugcugagccagagaaccagagacaucuacaucagcagaagacugcugggcaccuucaccuggacccugagcgacagcgagggcaaggacacccccggcggcuacugccugaccagauggaugcugaucgaggccgagcugaagugcuucggcaacaccgccguggccaagugcaacgagaagcacgacgaggaguucugcgacaugcugagacuguucgacuucaacaagcaggccauccagagacugaaggccgaggcccagaugagcauccagcugaucaacaaggccgugaacgcccugaucaacgaccagcugaucaugaagaaccaccugagagacaucaugggcauccccuacugcaacuacagcaaguacugcuaccugaaccacaccaccaccggcaagaccagccugcccaagugcugccuggugagcaacggcagcuaccugaacgagacccacuucagcgacgacaucgagcagcaggccgacaacaugaucaccgagaugcugcagaaggaguacauggagagacagggcaagaccccccugggccugguggaccuguucguguucagcaccagcuucuaccugaucagcaucuuccugcaccuggugaagauccccacccacagacacaucgugggcaagagcugccccaagccccacagacugaaccacaugggcaucugcagcugcggccuguacaagcagcccggcgugcccgugagauggaagagaugaggacuaguuauaagacugacuagcccgaugggccucccaacgggcccuccuccccuccuugcaccgagauuaauaaaaaaaaaaaaaaaaaaaaaaaaaaaaaaaaaaaaaaaaaaaaaaaaaaaaaaaaaaaaaaaaaaaaaaaaaaaaaaaaaaaaaaaaaaaaaaaaaaaa

SEQ ID NO: 39875 - RNA, 1665 nt, Artificial Sequence
  mRNA product Design i-3 (A100) comprising derived and/or modified sequence from LASV(Mad39;Clade IV)__ANH09722__GPCmut11 (opt4)
aggagaaagcuuaccaugggccagaucgugaccuucuuccaggaggugccccacgugaucgaggaggugaugaacaucgugcugaucgcccugagcauccuggccgugcugaagggccuguacaacguggccaccugcggccugaucggccuggugaccuuccugcugcugugcggcagaagcugcaccaccacccuguacaagggcguguacgagcugcaggcccuggagcugaacauggagacccugaacaugaccaugccccugagcugcaccaagaacaacagccaccacuacaucagagugggcaacgagaccggccuggagcugacccugaccaacaccagccugaucaaccacaaguucugcaaccugagcgacgcccacaagaagaaccuguacgaccacgcccugaugagcaucaucagcaccuuccaccugagcauccccaacuucaaccaguacgaggccaugagcugcgacuucaacgacggcaagaucagcgugcaguacaaccugagccacaccuacgccggcgacaccgccaaccacugcggcaccguggccaacggcgugcugcagaccuucaugagaauggccuggggcggcagcuacaucgcccuggacagcggcagaggcggcugggacugcaucaugaccagcuaccaguaccugaucauccagaacaccaccugggaggaccacugccaguucagcagacccagccccaucggcuaccugggccugcugagccagagaaccagagacaucuacaucagcagaagacugcugggcaccuucaccuggacccugagcgacagcgagggcaaggacacccccggcggcuacugccugaccagauggaugcugaucgaggccgagcugaagugcuucggcaacaccgccguggccaagugcaacgagaagcacgacgaggaguucugcgacaugcugagacuguucgacuucaacaagcaggccauccagagacugaaggccgaggcccagaugagcauccagcugaucaacaaggccgugaacgcccugaucaacgaccagcugaucaugaagaaccaccugagagacaucaugggcauccccuacugcaacuacagcaaguacugcuaccugaaccacaccgugaccggcaagaccagccugcccaagugcugccuggugagcaacggcagcuaccugaacgagacccacuucagcgacgacaucgagcagcaggccgacaacaugaucaccgagaugcugcagaaggaguacauggagagacagggcaagaccccccugggccugguggaccuguucguguucagcaccagcuucuaccugaucagcaucuuccugcaccuggugaagauccccacccacagacacguggugggcaagcccugccccaagccccacagacugaaccacaugggcaucugcagcugcggcuucuacaagcagcccggcgugcccgugagauggaagagaugaggacuaguuauaagacugacuagcccgaugggccucccaacgggcccuccuccccuccuugcaccgagauuaauaaaaaaaaaaaaaaaaaaaaaaaaaaaaaaaaaaaaaaaaaaaaaaaaaaaaaaaaaaaaaaaaaaaaaaaaaaaaaaaaaaaaaaaaaaaaaaaaaaaa

SEQ ID NO: 39876 - RNA, 1665 nt, Artificial Sequence
  mRNA product Design i-3 (A100) comprising derived and/or modified sequence from LASV(Z0947-SLE-2011;Clade IV)__AIT17840__GPCmut11 (opt4)
aggagaaagcuuaccaugggccagaucgugaccuucuuccaggaggugccccacgugaucgaggaggugaugaacaucgugcugaucgcccugagcauccuggccgugcugaagggccuguacaacuucgccaccugcggccuggugggccuggugaccuuccugcugcugugcggcagaagcugcaccaucagccuguacaagggcguguacgagcugcagacccuggagcugaacauggagacccugaacaugaccaugccccugagcugcaccaagaacaacagccaccacuacaucauggugggcaacgagaccggccuggagcugacccugaccaacaccagcaucaucaaccacaaguucugcaaccugagcgacgcccacaagaagaaccuguacgaccacgcccugaugagcaucaucagcaccuuccaccugagcauccccaacuucaaccaguacgaggccaugagcugcgacuucaacggcggcaagaucagcgugcaguacaaccugagccacagcuacgccggcgacgccgccaaccacugcggcaccguggccaacggcgugcugcagaccuucaugagaauggccuggggcggcagcuacaucgcccuggacagcggcagagacagaugggacugcaucaugaccagcuaccaguaccugaucauccagaacaccaccugggaggaccacugccaguucagcagacccagccccaucggcuaccugggccugcugagccagagaaccagagacaucuacaucagcagaagacugcugggcaccuucaccuggacccugagcgacagcgagggcaaggacacccccggcggcuacugccugaccagauggaugcugaucgaggccgagcugaagugcuucggcaacaccgccguggccaagugcaacgagaagcacgacgaggaguucugcgacaugcugagacuguucgacuucaacaagcaggccauccagagacugaaggccgaggcccagaugagcauccagcugaucaacaaggccgugaacgcccugaucaacgaccagcugaucaugaagaaccaccugagagacaucaugggcauccccuacugcaacuacagcaaguacugcuaccugaaccacaccaccaccggcaagaccagccugcccaagugcugccuggugagcaacggcagcuaccugaacgagacccacuucagcgacgacaucgagcagcaggccgacaacaugaucaccgagaugcugcagaaggaguacauggagagacagggcaagaccccccugggccugguggaccuguucguguucagcaccagcuucuaccugaucagcaucuuccugcaccuggugaagauccccacccacagacacaucgugggcaagcccugccccaagccccacagacugaaccacaugggcaucugcagcugcggccuguacaagcagcccggcgugcccgugaaguggaagagaugaggacuaguuauaagacugacuagcccgaugggccucccaacgggcccuccuccccuccuugcaccgagauuaauaaaaaaaaaaaaaaaaaaaaaaaaaaaaaaaaaaaaaaaaaaaaaaaaaaaaaaaaaaaaaaaaaaaaaaaaaaaaaaaaaaaaaaaaaaaaaaaaaaaa

SEQ ID NO: 39877 - RNA, 1665 nt, Artificial Sequence
  mRNA product Design i-3 (A100) comprising derived and/or modified sequence from LASV(Josiah;Clade IV)__NP_694870__GPCmut11 (opt5)
aggagaaagcuuaccaugggccagaucgugaccuucuuucaagaggucccccacguuauugaagaggugaugaacaucgugcugauugcccucagcguccuggcugugcuuaaggggcuguacaauuucgccacaugcggacucguuggccuggugacguuucuucugcucugugggagauccugcaccacaucucuguauaaaggagucuacgaacugcagacccucgagcugaacauggaaacacuuaauaugaccaugccucugagcuguacaaagaacaauucccaucacuauaucauggugggcaacgagaccgggcucgagcugacgcuuaccaauacaucuauuaucaaccauaaauucugcaaucugagcgacgcgcacaagaaaaaccucuacgaucaugcucugauguccaucauuucuaccuuucaccugagcaucccgaauuucaaccaguaugaagccauguccugugacuuuaauggaggcaagauuagcguucaguacaaccucucucacuccuaugccggcgaugcugccaaucauugcgggacaguggcuaacggaguccugcaaaccuucaugcggauggccuggggcgggagcuacaucgcgcuugacucuggacgcggcaacugggauuguauuaugacguccuaccaguaucugaucauucagaauacaaccugggaggaccacugccaguuuagcagacccucuccuaucggguaccucggacugcuuucccaacggacacgcgauaucuauauuagcagacggcugcucggcaccuucaccuggacacuguccgacucugaaggcaaggauacgcccgggggauacugucugacccgcuggaugcucaucgaggccgagcugaaaugcuuuggcaacacagcuguggccaaguguaaugaaaaacaugacgaggaguucugcgauaugcuuagacuguuugacuucaacaagcaggcuauucagcggcucaaagccgaagcgcagaugagcauccaacugauuaauaaggccgugaacgcucuuaucaaugaucagcugaucaugaagaaccaccuccgcgacauuauggggaucccuuauugcaauuacuccaaauauuguuaccugaaccacaccacaaccggaagaacgagccugcccaagugcugucucgucucuaauggcuccuaccugaacgaaacacauuucagcgacgauauugagcagcaagccgacaauaugaucaccgagaugcuucagaaagaauauauggagcggcaggggaagaccccucugggacucguugaucuguuuguguucucuaccagcuuuuaccugauuuccaucuuccuucaccucgugaaaaucccgacacaucgccacauugucggcaagucuugccccaaaccucauagacugaaccacaugggcaucuguagcugcgggcuguauaagcagcccggagugccuguuaaguggaaacggugaggacuaguuauaagacugacuagcccgaugggccucccaacgggcccuccuccccuccuugcaccgagauuaauaaaaaaaaaaaaaaaaaaaaaaaaaaaaaaaaaaaaaaaaaaaaaaaaaaaaaaaaaaaaaaaaaaaaaaaaaaaaaaaaaaaaaaaaaaaaaaaaaaaa

SEQ ID NO: 39878 - RNA, 1662 nt, Artificial Sequence
  mRNA product Design i-3 (A100) comprising derived and/or modified sequence from LASV(LP;Clade I)__AAF86701__GPCmut11 (opt5)
aggagaaagcuuaccaugggccagaucauuaccuucuuucaagaggugccccacgucaucgaagagguuaugaacauugugcugaucgcccucagccugcuugcuauucugaaggggcucuacaauaucgccacaugcggaaucauuggccugguggcguuccuuuuucugugugggaaauccugcucucucacgcugaagggaggcuaugaacugcagacccucgagcugaacauggaaacacuuaauaugaccaugccucugagcuguaccaaaaacuccucucaucacuacaucagagucgggaaugagacaggacucgagcugacacuuaccaacacgagcauuaucaaucauaaguucugcaaccuguccgacgcucacaaaaagaaucucuaugaucaugcccugaugucuauuaucagcaccuuucaccuguccauuccgaacuucaaucaguacgaagccaugagcugugacuuuaacggcggcaagaucucugugcaguauaaucucucccacagcuacgcuggggaugccgcugagcauugcggaacaguugccaacggcgugcugcaaaccuucaugcggauggcguggggagggcgcuauaucgcccuugacucuggcaaagggaauugggauuguauuaugacauccuaccaguaccugaucauucagaacaccacgugggaagaccacugccaguuuagcagacccucuccuaucggauaucucggccugcuuucccaacggacacgcgauauuuacaucagcagacggcugcucggcaccuucacauggacccuguccgacucugaggggaacgagacccccggaggcuauugucugacacgcuggaugcucaucgaagcugagcugaagugcuuugggaauacggccgucgcuaaauguaacgaaaagcaugaugaggaguucugcgacaugcuuagacuguuugauuucaauaaacaggccauucggcgccucaaggcggaagcccagaugagcauccagcugauuaacaaggcugugaaugcccuuaucaacgaccaacugauuaugaaaaaucaccucagagauaucaugggaaucccuuacugcaacuauuccaaguacuguuaucugaaucacaccagcucuggccggacaucccugcccaaaugcugucucauuagcaacgggucuuaccugaaugagacccaguucagcgacgacaucgaacagcaagcugauaacaugauuacagagaugcuucagaaggaauacaucgagcgccagggaaaaaccccucugggccucguugacauuuuuaucuucuccacgucuuuuuaucugauuagcaucuuccugcaucuuaucaagauuccgacacacagacauaucgugggcaaacccugcccuaagccccaccggcucaaucauaugggggucuguuccugcggacuguacaagcacccuggcgugcccaccaaauggaagcgcugaggacuaguuauaagacugacuagcccgaugggccucccaacgggcccuccuccccuccuugcaccgagauuaauaaaaaaaaaaaaaaaaaaaaaaaaaaaaaaaaaaaaaaaaaaaaaaaaaaaaaaaaaaaaaaaaaaaaaaaaaaaaaaaaaaaaaaaaaaaaaaaaaaaa

SEQ ID NO: 39879 - RNA, 1662 nt, Artificial Sequence
  mRNA product Design i-3 (A100) comprising derived and/or modified sequence from LASV(803213;Clade II)__AAF86703__GPCmut11 (opt5)
aggagaaagcuuaccaugggccagaucauuaccuucuuucaagaggugccccacgucaucgaagagguuaugaacauugugcugaucgcccucagccugcuugcuauucugaaggggaucuacaauguggccacaugcggacucuucggccugaucuccuuucuucugcucugugggagaucuugcagcgucacguauaaaggaguguacgaacugcagacccuggagcucaacauggcgaaucugaacaugacaaugccucuuuccuguaccaagaauaacucucaucacuauauuaugguuggcaaugaaacagggcuggagcucacccugacaaacaccagcaucauuaaucauaaauucugcaaccuuuccgacgcucacaagaaaaaucuguacgaucaugcccucaugucuaucauuagcacguuucaccuguccaucccgaacuucaaucaguaugaggccaugagcugugacuuuaacggaggcaagauuucugugcaguacaaucugucccacagcuucgcugucgaugccgcuaaccauugcggcaccaucgccaacggggugcuccaaacauuuaugcggauggcguggggaggcucuuauaucgcccuggacuccgggaagggaaauugggauuguauuaugaccagcuaccaguaccuuaucauucagaacacaaccugggaagaccacugccaguucucucgccccuccccuaucggcuaucuggggcuccugagccaaagaacgcgggauauuuacaucucccgcagacuucugggaacauuuaccuggacacucucugacagcgagggcaaugaagcucccggcggguauugucugacccgguggaugcugaucgaggccgagcucaaaugcuucggaaacaccgcuguugccaaguguaaugaaaaacaugaugaggaauuuugcgacaugcugcgccuuuucgauuucaacaagcaggcgauuaaaagacugaagacagaggcccagauguccauccagcucauuaauaaggcugugaacgcccugaucaaugaccaacuuauuaugaaaaaccaucugcgggauaucaugggcaucccuuacugcaauuauagccgcuacuguuaucucaaccacacggucaccgggaagacaucucugcccagaugcugucugguguccaauggaagcuaccucaacgaaacccacuuuucugacgacauugagcagcaggcugauaauaugaucacagagaugcugcaaaaagaauacauggaccggcagggcaagaccccucuugggcugguggaucucuucgucuuuagcacguccuucuaucugauuucuaucuuucugcaccuuguuaaaauuccgacacaucgccacaucgugggaaagcccugcccuaaaccccauagacucaaccacaugggcauuuguagcugcggccuguacaagcacccuggggugcccgucaaguggaaacggugaggacuaguuauaagacugacuagcccgaugggccucccaacgggcccuccuccccuccuugcaccgagauuaauaaaaaaaaaaaaaaaaaaaaaaaaaaaaaaaaaaaaaaaaaaaaaaaaaaaaaaaaaaaaaaaaaaaaaaaaaaaaaaaaaaaaaaaaaaaaaaaaaaaa

SEQ ID NO: 39880 - RNA, 1662 nt, Artificial Sequence
  mRNA product Design i-3 (A100) comprising derived and/or modified sequence from LASV(GA391;Clade III)__CAA36645__GPCmut11 (opt5)
aggagaaagcuuaccaugggccagaucgugaccuucuuucaagaggucccccacguuauugaagaggugaugaacaucgugcugauugcccucagcauccuggcuauucuuaaggggcuguacaaugucgccacaugcggacucaucggccuggugacguuccuucugcucuccgggagaucuuguagccugaucuauaaaggaaccuacgaacugcagacacucgagcugaacauggaaacccuuaauaugacaaugccucuguccugcaccaagaacaauucucaucacuauauucggguuggcaacgagacagggcucgagcugacccuuacgaauaccagcauccugaaccauaaauuuuguaaucucuccgacgcgcacaagcgcaaccuguacgaucauucucugaugagcauuaucuccacauuccaccucagcauuccgaauuuuaaccaguaugaagcuaugucuugcgacuucaauggaggcaaaaucaccgugcaguacaaccugucccacagcuuugccgucgaugccgcuggccauugugggacacuugccaauggagugcugcaaaccuucaugagaauggcuuggggcgggucuuauauugcccucgacuccggacggggcaacugggauugcaucaugacgagcuaccaguaccugaucauucagaacacaaccugggacgaucacugucaguuuucucgccccuccccuaucggguaucuuggacugcucagccaaagaacacgggacauuuacaucucccgcagacugcugggcaccuucaccuggacacucucugauagcgagggcaaugaaacgcccgggggauauugccugacccgguggaugcuuauugaggcggagcugaaguguuuuggcaacacagccguugcuaagugcaaugaaaaacaugacgaggaguucugugauaugcuccgccuguuugacuucaacaagcaggccaucagacggcuuaaaaccgaagcucagauguccauccagcugauuaauaaggccgugaacgcgcucaucaaugaucaacugauuaugaaaaaccaucugcgcgacaucauggggauuccuuacugcaauuauagcagauacugcuaucucaaccacacaucuaccggaaagacgucccugccccgguguugccuuaucagcaauggcucuuaccugaacgaaacaaaguucagcgacgauaucgagcagcaggccgacaauaugauuaccgagaugcuccaaaaagaauacaucgaucgccaggggaagaccccucugggacuggucgaccuuuuuguguucuccacaucuuuuuaucucauuagcaucuuccugcaccuggugaaaauuccgacccacagacauaucgucggcaagcccuguccuaaaccccaccggcucaaccauaugggcauuugcuccugugggcuguacaagcagccuggaguucccgugagauggaaacgcugaggacuaguuauaagacugacuagcccgaugggccucccaacgggcccuccuccccuccuugcaccgagauuaauaaaaaaaaaaaaaaaaaaaaaaaaaaaaaaaaaaaaaaaaaaaaaaaaaaaaaaaaaaaaaaaaaaaaaaaaaaaaaaaaaaaaaaaaaaaaaaaaaaaa

SEQ ID NO: 39881 - RNA, 1665 nt, Artificial Sequence
  mRNA product Design i-3 (A100) comprising derived and/or modified sequence from LASV(AV;Clade V)__CCA30314__GPCmut11 (opt5)
aggagaaagcuuaccaugggccagaucgugaccuucuuucaagaggucccccacguuauugaagaggugaugaacaucgugcugauugcccucagcauccuggcuguccuuaaggggcuguacaauauugccacaugcggacucaucggccugaucacguuccuucugcucugugggagauccugcucuagcaaccuguauaaaggaguguacgaacugcagucccucgaccugaauauggagacccuuaacaugacaaugccucugucuuguaccaagaauaacagccaucacuauauucggguuggcaaugauacagggcucgaacugacccuuacaaacaccuccauccugaaucauaaauuuugcaaccucucugacgcgcacaagaaagaucuguacgaccaugcucugaugagcauuaucuccacguuccaccucagcauuccgaauuuuaaccaguaugaggccaugucuugugauuucaauggaggcaagaucuccgugcaguacaaccugagccacucuuaugccauugacgcugccaaucauugcggcaccgucgcuaacgggauccuucaaacauuuaugcgcauggccuggggaggcuccuacaucgcgcuggauagcgggagaggaaacugggacuguauuaugaccucuuaccaguaucucaucauucagaauacaaccugggagaaccacugccaguucucccggcccagcccuaucggcuaccuggggcuucugucccaacgcacgagagauauuuauaucucucggcgccuccugggaacauuuaccuggacacugagcgacuccgaaggcaaugccacccccggcggguacugucucaccagauggaugcugaucgaggcugaacuuaagugcuucggaaacacagccguggcuaaauguaaugagaagcaugaugaggaauuuugcgacaugcugcgccucuucgauuuuaacaaacaggccauuagccggcugaagucugaggcgcagauguccauccagcuuauuaauaaagccguuaacgcucugaucaaugaccaacucauuaugaagaaccaccugagagacaucaugggcaucccuuauugcaauuacagcaaguauuguuaccugaaccacacgauuaccgggaaaacaucucuccccaagugcugucuggugagcaauggauccuaccuuaacgaaacccauuucucugaugacaucgagcagcaggccgauaauaugauuacagaaaugcugcaaaaagaguauauggagcggcagggcaagaccccucucgggcuggucgaccuguucguguuuagcacguccuucuaccuuaucagcauuuuucuccgccuggugaaaaucccgacacacagacauauugucggaaagcccugcccuaaaccccaccggcugaaccauaugggcaucuguucuugcggccucuauaagcagccugggguucccgugcgcuggaagagaugaggacuaguuauaagacugacuagcccgaugggccucccaacgggcccuccuccccuccuugcaccgagauuaauaaaaaaaaaaaaaaaaaaaaaaaaaaaaaaaaaaaaaaaaaaaaaaaaaaaaaaaaaaaaaaaaaaaaaaaaaaaaaaaaaaaaaaaaaaaaaaaaaaaa

SEQ ID NO: 39882 - RNA, 1662 nt, Artificial Sequence
  mRNA product Design i-3 (A100) comprising derived and/or modified sequence from LASV(Togo/2016/7082;Clade VI)__AMR44577__GPCmut11 (opt5)
aggagaaagcuuaccaugggccagaucauuaccuucuuucaagaggugccccacgucaucgaagagguuaugaacauugugcugaucgcccucagccugcuugcuauucugaaggggguguacaaugucgccacaugcggaaucaucggccucgugacguuccuguuucuuugugggagauccugcucucugauuuauaaaggaagcuacgaacuccagacccuggagcugaacauggaaacacucaauaugaccaugccucuguccuguacaaagaacucuagccaucacuauauccggguuggcaaugagaccgggcuugagcugacacucaccaacacguccauuaucaaucauaaauucugcaaccugucugacgcgcacaagcgcaaucuuuacgaucaugcucugaugagcauucucuccaccuuucaccugagcaucccgaacuucaaucaguaugaagccaugucuugugacuuuaacggaggcaaaauuuccgugcaguacaaucugagccacgccuaugcugucgaugccgcugagcauugcggcacaguggccaacgggguucuccaaaccuucaugagaauggcguggggaggcucuuacaucgcccuggacuccgggcggggaaauugggauuguaucaugacaagcuaccaguaucuuauuauccagaacaccacgugggaagaccacugccaguuuucucgccccuccccuauuggcuaccuggggcuccugagccaaagaacacgggauaucuauauuucccgcagacuucugggaaccuucacauggacccucucugacagcgagggcaacgagacccccggcggguacugucugacacgguggaugcugaucgaagcugagcucaagugcuuuggaaauacggccguggcuaaguguaacgaaaaacaugaugaggaguucugcgacaugcugcgccuuuuugauuucaauaagcaggccauccagagacugaaauccgaagcgcagaugagcauucaacucaucaacaaggccgucaaugcucugauuaacgaccagcuuaucaugaaaaaucaucugcgggauaugaugggcauuccuuauugcaacuacucuaaguauuguuaccucaaucacaccuccagcgggcgcacaucucugcccaagugcugucuggugagcaacggauccuaccucaaugagacccacuucucugacgacaucgaacagcaagccgauaacaugaucacagagaugcugcagaaagaauauauugacagacagggcaagaccccucuugggcugguggaucucuuugucuucagcacguccuuuuaccugaucagcauuuuccugcaccuuaucaaaauuccgacacaucggcacaucguuggaaagcccugcccuaaaccccaucgccucaaucacaugggcauuuguucuugcggccuguauaagcagccuggggugcccaccagauggaaacggugaggacuaguuauaagacugacuagcccgaugggccucccaacgggcccuccuccccuccuugcaccgagauuaauaaaaaaaaaaaaaaaaaaaaaaaaaaaaaaaaaaaaaaaaaaaaaaaaaaaaaaaaaaaaaaaaaaaaaaaaaaaaaaaaaaaaaaaaaaaaaaaaaaaa

SEQ ID NO: 39883 - RNA, 1662 nt, Artificial Sequence
  mRNA product Design i-3 (A100) comprising derived and/or modified sequence from LASV(KAK-428;Clade n.d. (VII))__ANH09740__GPCmut11 (opt5)
aggagaaagcuuaccaugggccagaucgugaccuucuuucaagaggucccccacguuauugaagaggugaugaacaucgugcugauugcccucagccugcuugcuauccugaaggggcucuacaauuucgccacaugcggagucauuggccugaucacguuucuucugcucugugggagauccugcucugcgaccuauaaaggacaguacgaacugcagacacuggagcucaacauggaaagccugaauaugaccaugccucuuuccuguacaaagaacaauucucaucacuauauccgggcuggcaacaauaccgggcuggagcucacacugaccaacacgagcauuaucucccauaaauucugcaaucuuucugacgcccacaagaaaaaccuguacgaucauacccucaugagcauuaucacaaccuuucaccuguccauuccgaauuucaaccaguaugaggccaugagcugugacuuuaauggaggcaagaucucuauucaauacaaccugucccacagcuaugcuggcgaugccgcucagcauugcgggacaguggccaauggaguucuccagaccuucaugcgcauggcguggggcgggucuuaccuggcccuugacuccggaagacggggcugggauuguaucaucagcucuuaccaguaucugauuauccaaaacacgacaugggacgaucacugccaguuuucccgccccagcccuauuggguaccucggauucgugucccagaagaccagagacaucuauauuucucggcgccugcuuggcacauuuaccuggacccugagcgauuccgaaggccaugacaugcccgggggauacugucucacaagauggaugcugaucgaggcugaucugaaaugcuucggcaacacggccgucgcuaaguguaaugaaaaacacgacgaggaguuuugcgauauguggcgccucuucgacuucaacaagcaggccauccaacggcugaaagcggaagcccagaugaauauucagcuuaucaacaaggcugugaaugcccugauuaacgaccaacucaugaugaagaaucaccugagagauaucauggggauuccuuauugcaacuacagcaaauuuuguuaucuuaauaacaccacaaccggacggacaucucugccccgcugcugucucaucuccaauggcagcuaccugaacgagacccauuucucugacgauaucgaacagcaggcugacaauaugauuacggagaugcugcagaaggaauacauggauagacaagggaaaacaccucucggacugguugaccuuuuuguguucagcaccuccuuuuaucugaucaccauuuuccuccaccuggucaagaucccgacacaucggcacauugugggcaaacccugcccuaagccccaucgccugaaccacaugggcaucuguucuugcgggcuuuacaaacagccuggagugcccgucagauggaagcggugaggacuaguuauaagacugacuagcccgaugggccucccaacgggcccuccuccccuccuugcaccgagauuaauaaaaaaaaaaaaaaaaaaaaaaaaaaaaaaaaaaaaaaaaaaaaaaaaaaaaaaaaaaaaaaaaaaaaaaaaaaaaaaaaaaaaaaaaaaaaaaaaaaaa

SEQ ID NO: 39884 - RNA, 1662 nt, Artificial Sequence; identical to SEQ ID NO: 39878
  mRNA product Design i-3 (A100) comprising derived and/or modified sequence from LASV(Pinneo-NIG-1969;Clade I)__AIT17836__GPCmut11 (opt5)

SEQ ID NO: 39885 - RNA, 1662 nt, Artificial Sequence
  mRNA product Design i-3 (A100) comprising derived and/or modified sequence from LASV(ISTH0009-NIG-2011;Clade II)__AIT17404__GPCmut11 (opt5)
aggagaaagcuuaccaugggccagaucauuaccuucuuucaagaggugccccacgucaucgaagagguuaugaacauugugcugaucgcccucagccugcuugcuauucugaaggggaucuacaauguggccacaugcggacucuucggccuggucuccuuucuucugcucugugggagaucuugcagcacgaccuauaaaggaguguacgaacugcagacacuggagcucgacauggcgucccugaacaugaccaugccucuuucuuguacaaagaauaacagccaucacuauaucaugguuggcaaugaaaccgggcuggagcucacacugaccaacacguccauuaucaaucauaaauucugcaaccuuucugaugcucacaagaaaaaucuguacgaccaugcccucaugagcauuaucuccaccuuucaccugagcauuccgaacuucaaucaguaugaggccaugucuugugauuuuaacggaggcaagaucuccgugcaguacaaucugagccacgcuuaugccgucgacgcugccaaccauugcggcacaauugcgaauggggugcuccaaaccuucaugcggauggccuggggaggcucuuacaucgcucuggauuccgggaagggaagcugggacuguaucaugacaucuuaccaguaucuuauuauccagaacaccacgugggaagaucacugccaguuuucccgccccagcccuauuggcuaccuggggcuccugucccaaagaacacgggacaucuauauuucucgcagacuucugggaaccuucacauggacccucagcgauuccgagggcaacgaaacccccggcggguacugucugacacgguggaugcugaucgaggccgagcucaaaugcuuuggaaauacggcuguugccaaguguaacgaaaaacaugacgaggaguucugcgauaugcugcgccuuuuugacuucaauaagcaggcgaucagacggcugaaaaccgaagcccagaugagcauucagcucaucaacaaggcugugaaugcccugauuaacgaucaacuuaucaugaagaaucaucugcgcgacauuaugggcaucccuuauugcaacuacucuaaauauuguuaccucaaucacacagucaccgggaagacaucccugcccagaugcugucuggugagcaacggaucuuaccucaaugaaacccacuucagcgacgauaucgagcagcaggcugacaacaugauuacggagcugcuucaaaaagaauauauggaucggcagggcaagacaccucuggggcucguggaccuguuugucuucuccaccucuuuuuaccugaucagcauuuuccuucaccucaucaaaauuccgacccaucgccacaucacaggaaagcccugcccuaaaccccauagacugaaucacaugggcauuuguuccugcggccuguauaagcacccugggguucccgugaaguggaaacggugaggacuaguuauaagacugacuagcccgaugggccucccaacgggcccuccuccccuccuugcaccgagauuaauaaaaaaaaaaaaaaaaaaaaaaaaaaaaaaaaaaaaaaaaaaaaaaaaaaaaaaaaaaaaaaaaaaaaaaaaaaaaaaaaaaaaaaaaaaaaaaaaaaaa

SEQ ID NO: 39886 - RNA, 1662 nt, Artificial Sequence
  mRNA product Design i-3 (A100) comprising derived and/or modified sequence from LASV(ISTH2010-NIG-2012;Clade II)__AIT17482__GPCmut11 (opt5)
aggagaaagcuuaccaugggccagaucauuaccuucuuucaagaggugccccacgucaucgaagagguuaugaacauugugcugaucgcccucagccugcuugcuauucugaaggggaucuacaauguggccacaugcggacucuucggccuggucuccuuucuucugcucugugggagaucuugcagcacgaccuauaaaggaguguacgaacugcagacacuggagcucgacauggcgucccugaacaugaccaugccucuuucuuguacaaagaauaacagccaucacuauaucaugguuggcaaugaaaccgggcuggagcucacacugaccaacacguccauuaucaaucauaaauucugcaaccuuucugaugcucacaagaaaaaucuguacgaccaugcccucaugagcauuaucuccaccuuucaccugagcauuccgaacuucaaucaguaugaggccaugucuugugauuuuaacggaggcaagaucuccgugcaguacaaucugagccacgcuuaugccgucgacgcugccaaccauugcggcacaauugcgaauggggugcuccaaaccuucaugcggauggccuggggaggcucuuacaucgcucuggauuccgggaagggaagcugggacuguaucaugacaucuuaccaguaucuuauuauccagaacauuaccugggaagaucacugccaguuuucccgccccagcccuaucggcuaccuggggcuccugucccaaagaacgcgggacauuuauaucucucgcagacuucugggaacauucaccuggacacucagcgauuccgagggcaacgaaacccccggcggguacugucugacccgguggaugcugaucgaggccgagcucaaaugcuuuggaaauacagcuguugccaaguguaacgaaaaacaugacgaggaguucugcgauaugcugcgccuuuuugacuucaauaagcaggcgauuagacggcugaaaacggaagcccagaugagcauccagcucauuaacaaggcugugaaugcccugaucaacgaucaacuuauuaugaagaaucaucugcgcgacaucaugggcaucccuuauugcaacuacucuaaauauuguuaccucaaucacaccgucacagggaagaccucccugcccagaugcugucuggugagcaacggaucuuaccucaaugaaacacacuucagcgacgauauugagcagcaggcugacaacaugaucaccgagcugcuucaaaaagaauauauugaucggcagggcaagacgccucuggggcucguggaccuguuugucuucuccacaucuuuuuaccugaucagcauuuuccuucaccucguuaaaaucccgacccaucgccacguggugggaaagcccugcccuaaaccccauagacugaaucacaugggcauuuguuccugcggccuguauaagcacccugggguccccgugaaguggaaacggugaggacuaguuauaagacugacuagcccgaugggccucccaacgggcccuccuccccuccuugcaccgagauuaauaaaaaaaaaaaaaaaaaaaaaaaaaaaaaaaaaaaaaaaaaaaaaaaaaaaaaaaaaaaaaaaaaaaaaaaaaaaaaaaaaaaaaaaaaaaaaaaaaaaa

SEQ ID NO: 39887 - RNA, 1662 nt, Artificial Sequence
  mRNA product Design i-3 (A100) comprising derived and/or modified sequence from LASV(Lassa virus/H.sapiens-wt/NGA/2015/ISTH_0543;Clade II)__AVO03639__GPCmut11 (opt5)
aggagaaagcuuaccaugggccagaucauuaccuucuuucaagaggugccccacgucaucgaagagguuaugaacauugugcugaucgcccucagccugcuugcuauucugaaggggaucuacaauguggccacaugcggacucuucggccuggucuccuuucuucugcucugugggagaucuugcagcacgaccuauaaaggaguguacgaacugcagacacuggagcucgacauggcgaaccugaauaugaccaugccucuuuccuguacaaagaacaauucucaucacuauaucaugguuggcaacgaaaccgggcuggagcucacacugaccaauacgagcauuaucaaccauaaauucugcaaucuuuccgaugcucacaagaaaaaccuguacgaccaugcccucaugucuauuaucagcaccuuucaccuguccauuccgaauuucaaccaguaugaggccaugagcugugauuuuaauggaggcaagaucucugugcaguacaaccugucccacacauaugcugucgacgccgcuaaucauugcggcaccauugccaacggggugcuccaaacauucaugcggauggcguggggaggcagcuacaucgcccuggauucugggaagggauccugggacuguaucaugaccagcuaccaguaucuuguuauucagaacacgacaugggaagaucacugccaguuuucucgccccuccccuaucggcuaccuggggcuccugagccaaagaacccgggacauuuauaucucccgcagacuucugggaacauucaccuggacccucucugauagcgagggcaaugaaacacccggcggguacugucugacgcgguggaugcugauugaggcugagcucaaaugcuuuggaaacaccgccguggcuaaguguaaugaaaaacaugacgaggaguucugcgauaugcugcgccuuuuugacuucaacaagcaggccaucagacggcugaaaacagaagcgcagauguccauccagcucauuaauaaggccgucaacgcucugaucaaugaucaacuuauuaugaagaaccaucugcgcgacaucaugggcauuccuuauugcaauuacagcaaauauuguuaccucaaccacaccgugacagggaagaccucucugcccagaugcugucugguguccaauggaagcuaccucaacgaaacgcacuucucugacgauaucgagcagcaggccgacaauaugaucacagagcugcuucaaaaagaauauauugaucggcagggcaagaccccucuggggcucgucgaccuguuuguuuucagcaccuccuuuuaccugaucucuauuuuccuucaccucgugaaaaucccgacacaucgccacauuaccggaaagcccugcccuaaaccccauagacugaaccacaugggcaucuguagcugcggccuguauaagcacccuggggugcccgucaaguggaaacggugaggacuaguuauaagacugacuagcccgaugggccucccaacgggcccuccuccccuccuugcaccgagauuaauaaaaaaaaaaaaaaaaaaaaaaaaaaaaaaaaaaaaaaaaaaaaaaaaaaaaaaaaaaaaaaaaaaaaaaaaaaaaaaaaaaaaaaaaaaaaaaaaaaaa

SEQ ID NO: 39888 - RNA, 1662 nt, Artificial Sequence
  mRNA product Design i-3 (A100) comprising derived and/or modified sequence from LASV(Lassa virus/H.sapiens-wt/NGA/2016/ISTH_0009;Clade II)__AVO03571__GPCmut11 (opt5)
aggagaaagcuuaccaugggccagaucauuaccuucuuucaagaggugccccacgucaucgaagagguuaugaacauugugcugaucgcccucagccugcuugcuauucugaaggggaucuacaauguggccacaugcggacuccugggccuugucuccuuccugcuccugugugggagaucuugcagcacgaccuauaaaggaguguacgaacugcagacacucgagcuggacauggcgucccuuaacaugaccaugccucugucuuguacaaagaauaacagccaucacuauaucaugguuggcaaugaaaccgggcucgagcugacacuuaccaacacguccauuaucaaucauaaauuuugcaaccugucugaugcucacaagaaaaaucucuacgaccaugcccugaugagcauuaucuccaccuuccaccugagcauuccgaacuuuaaucaguaugaggccaugucuugugauuucaacggaggccggaucuccgugcaguacaaucucagccacucuuaugcugucgacgccgcuaaccauugcggcacaauugccaauggggugcugcaaaccuuuaugcgcauggcguggggaggcuccuacaucgcccuugauagcgggaagggaucuugggacuguaucaugacauccuaccaguaucugauuauccagaacaccacgugggaagaucacugccaguucagcagacccuccccuauuggcuaccucgggcugcuuucucaacggacacgcgacaucuauauuagcagacggcugcucggaaccuuuacauggacccuguccgauagcgagggcaacgaaacccccggcggguacugucugacacgcuggaugcucaucgaggcugagcugaagugcuucggaaauacggccguugcuaaauguaacgaaaagcaugacgaggaauuuugcgauaugcuuagacuguucgacuuuaauaaacaggccauccggcgccucaagaccgaggcgcagaugucuauucagcugaucaacaaagccgugaaugcucuuauuaacgaucaacugaucaugaagaaucaccucagagacauuaugggcaucccuuauugcaacuacuccaaguauuguuaccugaaucacacagucaccgggaaaacaagccugccccggugcugucucgugucuaacggaagcuaccugaaugaaacccauuucuccgacgauaucgagcagcaggccgacaacaugauuacggagcuucugcaaaaggaauauaucgaucgccagggcaaaacaccucucgggcugguggaccuguucgucuuuucuaccagcuucuaccuuauuuccaucuuucuccaccugguuaagauuccgacccauagacacaucacaggaaaacccugcccuaagccccaucggcugaaucacaugggcauuuguagcugcggccucuauaaccacccuggggugcccgugaaauggaagcgcugaggacuaguuauaagacugacuagcccgaugggccucccaacgggcccuccuccccuccuugcaccgagauuaauaaaaaaaaaaaaaaaaaaaaaaaaaaaaaaaaaaaaaaaaaaaaaaaaaaaaaaaaaaaaaaaaaaaaaaaaaaaaaaaaaaaaaaaaaaaaaaaaaaaa

SEQ ID NO: 39889 - RNA, 1662 nt, Artificial Sequence
  mRNA product Design i-3 (A100) comprising derived and/or modified sequence from LASV(Lassa virus/H.sapiens-wt/NGA/2016/ISTH_0017;Clade II)__AVO03567__GPCmut11 (opt5)
aggagaaagcuuaccaugggccagaucauuaccuucuuucaagaggugccccacgucaucgaagagguuaugaacauugugcugaucgcccucagccugcuugcuauucugaaggggaucuacaauguggccacaugcggacucuucggccuggucuccuuucuucugcucugugggagaucuugcagcacgaccuauaaaggaguguacgaacugcagacacuggagcucgacauggcgucccugaacaugaccaugccucuuucuuguacaaagaauaacagccaucacuauaucaugguuggcaaugaaaccgggcuggagcucacacugaccaacacguccauuaucaaucauaaauucugcaaccuuucugaugcucacaagaaaaaucuguacgaccaugcccucaugagcauuaucuccaccuuucaccugagcauuccgaacuucaaucaguaugaggccaugucuugugauuuuaacggaggcaagaucuccgugcaguacaaucugagccacacauaugcuauugacgccgcuaaccauugcggcaccaucgccaaugggguccuccaaacauucaugcggauggcguggggaggcucuuacaucgcccuggauuccgggaagggaagcugggacuguauuaugaccucuuaccaguaucuuaucauucagaacacgacaugggaagaucacugccaguuuucccgccccagcccuaucggcuaccuggggcuccugucccaaagaacccgggacauuuauaucucucgcagacuucugggaacauucaccuggacccucagcgauuccgagggcaacgaaacacccggcggguacugucugacgcgguggaugcugaucgaggcugagcucaaaugcuuuggaaauaccgccguggcuaaguguaacgaaaaacaugacgaggaguucugcgauaugcugcgccuuuuugacuucaauaagcaggccauuagacggcugaaaacagaagcgcagaugagcauccagcucauuaacaaggccguuaaugcucugaucaacgaucaacuuauuaugaagaaucaucugcgcgacaucaugggcaucccuuauugcaacuacucuaaauauuguuaccucaaucacaccgugacagggaagaccucccugcccagaugcugucuggucagcaacggaucuuaccucaaugaaacgcacuucagcgacgauauugagcagcaggccgacaacaugaucacagagcugcuucaaaaagaauauauggaucggcagggcaagaccccucuggggcucguggaccuguuuguguucuccaccucuuuuuaccugauuagcaucuuccuucaccucguccgcauuccgacacauagacacguuaucggaaaacccugcccuaagccccaucggcugaaucacaugggcauuuguuccugcggccuguauaaacacccuggggugcccgugaaguggaagcgcugaggacuaguuauaagacugacuagcccgaugggccucccaacgggcccuccuccccuccuugcaccgagauuaauaaaaaaaaaaaaaaaaaaaaaaaaaaaaaaaaaaaaaaaaaaaaaaaaaaaaaaaaaaaaaaaaaaaaaaaaaaaaaaaaaaaaaaaaaaaaaaaaaaaa

SEQ ID NO: 39890 - RNA, 1662 nt, Artificial Sequence
  mRNA product Design i-3 (A100) comprising derived and/or modified sequence from LASV(Lassa virus/H.sapiens-wt/NGA/2018/ISTH_0959;Clade II)__AVV65099__GPCmut11 (opt5)
aggagaaagcuuaccaugggccagaucauuaccuucuuucaagaggugccccacgucaucgaagagguuaugaacauugugcugaucgcccucagccugcuugcuauucugaaggggaucuacaauguggucacaugcggacucuucggccugguguccuuucuucugcucugugggagaucuugcagcacgaccuauaaaggaguuuacgaacugcagacacuggagcucgacauggccucccugaacaugaccaugccucuuucuuguacaaagaauaacagccaucacuauaucauggugggcaaugaaaccgggcuggagcucacacugaccaacacguccauuaucaaucauaaauucugcaaccuuucugaugcgcacaagaaaaaucuguacgaccaugcucucaugagcauuaucuccaccuuucaccugagcauuccgaacuucaaucaguaugaggccaugucuugugauuuuaacggaggcaagaucuccguccaguacaaucugagccacgccuaugcuauugacgccgcuaaccauugcggcacaaucgccaauggggugcuccaaaccuucaugcggauggcguggggaggcucuuacaucgcccuggauuccgggaagggaagcugggacuguauuaugacaucuuaccaguaucuuaucauucagaacaccacgugggaagaucacugccaguuuucccgccccagcccuaucggcuaccuggggcuccugucccaaagaacacgggacauuuauaucucucgcagacuucugggaaccuucacauggacccucagcgauuccgagggcaacgaaacccccggcggguacugucugacacgguggaugcugaucgaggcugagcucaaaugcuuuggaaauacggccguugcuaaguguaacgaaaaacaugacgaggaguucugcgauaugcugcgccuuuuugacuucaauaagcaggccauuagacggcugaaaaccgaagcgcagaugagcauccagcucauuaacaaggccgugaaugcucugaucaacgaucaacuuauuaugaagaaucaucugcgcgacaucaugggcaucccuuauugcaacuacucuaaauauuguuaccucaaucacacagucaccgggaagacaucccugcccagaugcugucuggugagcaacggaucuuaccucaaugaaacccacuucagcgacgauauugagcagcaggccgacaacaugaucacggagcugcuucaaaaagaauauauugaucggcagggcaagacaccucuggggcucguggaccuguuugucuucuccaccucuuuuuaccugaucagcauuuuccuucaccucguuaaaaucccgacccaucgccacgugauuggaaagcccugcccuaaaccccauagacugaaucacaugggcaucuguuccugcggccuguauaagcacccuggggugcccgucaaguggaaacggugaggacuaguuauaagacugacuagcccgaugggccucccaacgggcccuccuccccuccuugcaccgagauuaauaaaaaaaaaaaaaaaaaaaaaaaaaaaaaaaaaaaaaaaaaaaaaaaaaaaaaaaaaaaaaaaaaaaaaaaaaaaaaaaaaaaaaaaaaaaaaaaaaaaa

SEQ ID NO: 39891 - RNA, 1662 nt, Artificial Sequence
  mRNA product Design i-3 (A100) comprising derived and/or modified sequence from LASV(LASV003-NIG-2008;Clade II)__AIT17580__GPCmut11 (opt5)
aggagaaagcuuaccaugggccagaucauuaccuucuuucaagaggugccccacgucaucgaagagguuaugaacauugugcugaucgcccucagccugcuugcuauucugaaggggaucuacaauguggccacaugcggacucuucggccuggucuccuuucuucugcucugugggagaucuugcagcacgaccuauaaaggaguguacgaacugcagacacuggagcucgacauggcgucccugaacaugaccaugccucuuucuuguacaaagaauaacagccaucacuauaucaugguuggcaaugaaaccgggcuggagcucacacugaccaacacguccauuaucaaucauaaauucugcaaccuuucugaugcucacaagaaaaaucuguacgaccaugcccucaugagcauuaucuccaccuuucaccugagcauuccgaacuucaaucaguaugaggccaugucuugugauuuuaacggaggcaagaucuccgugcaguacaaucugagccacacauaugcugucgacgccgcuaaccauugcggcaccauugccaauggggugcuccaaacauucaugcggauggcguggggaggcucuuacaucgcccuggauuccgggaagggaagcugggacuguaucaugaccucuuaccaguaucuuauuauccagaacacgacaugggaagaucacugccaguuuucccgccccagcccuauuggcuaccuggggcuccugucccaaagaacccgggacaucuauauuucucgcagacuucugggaacauucaccuggacccucagcgauuccgagagcaacgaaacacccggcggcuacugucugacgcgguggaugcugaucgaggcugagcucaaaugcuuugggaauaccgccguugcuaaguguaacgaaaaacaugacgaggaguucugcgauaugcugcgccuuuuugacuucaauaagcaggccaucagacggcugaaagcggaagcccagaugucuauucagcucaucaacaaggcugugaaugcccugauuaacgaucaacuuaucaugaagaaucaucugcgcgacauuaugggaaucccuuauugcaacuacuccaaauauuguuaccucaaucacacagucaccggcagaacaagccugccccggugcugucuggugucuaacgggagcuaccucaaugaaacccacuucuccgacgauaucgagcagcaggcugacaacaugauuacggagcugcuucaaaaggaauauauggaucgccagggaaaaacaccucugggccucguggaccuguuugucuucucuaccagcuuuuaccugaucuccauuuuccuucaccucguuaagaucccgacccauagacacgugauugggaaacccugcccuaagccccaucggcugaaucacaugggaaucuguagcugcggccuguauaaacacccuggcgugcccgucaaguggaagcgcugaggacuaguuauaagacugacuagcccgaugggccucccaacgggcccuccuccccuccuugcaccgagauuaauaaaaaaaaaaaaaaaaaaaaaaaaaaaaaaaaaaaaaaaaaaaaaaaaaaaaaaaaaaaaaaaaaaaaaaaaaaaaaaaaaaaaaaaaaaaaaaaaaaaa

SEQ ID NO: 39892 - RNA, 1662 nt, Artificial Sequence
  mRNA product Design i-3 (A100) comprising derived and/or modified sequence from LASV(LASV035-NIG-2009;Clade II)__AIT17588__GPCmut11 (opt5)
aggagaaagcuuaccaugggccagaucauuaccuucuuucaagaggugccccacgucaucgaagagguuaugaacauugugcugaucgcccucagccugcuugcuauucugaaggggaucuacaauguggccacaugcggacucuucggccuggucuccuuucuucugcucugugggagaucuugcagcacgaccuauaaaggaguguacgaacugcagacacuggagcucgacauggcgucccugaacaugaccaugccucuuucuuguacaaagaauaacagccaucacuauaucaugguuggcaaugaaaccgggcuggagcucacacugaccaacacguccauuaucaaucauaaauucugcaaccuuucugaugcucacaagaaaaaucuguacgaccaugcccucaugagcauuaucuccaccuuucaccugagcauuccgaacuucaaucaguaugaggccaugucuugugauuuuaacggaggcaagaucuccgugcaguacaaucugagccacgcuuaugccgucgacgcugccaaccauugcggcacaauugcgaauggggugcuccaaaccuucaugcggauggccuggggaggcucuuacaucgcucuggauuccgggaagggaagcugggacuguaucaugacaucuuaccaguaucuuauuauccagaacaccacgugggaagaucacugccaguuuucccgccccagcccuauuggcuaccuggggcuccugucccaaagaacacgggacaucuauauuucucgcagacuucugggaaccuucacauggacccucagcgauuccgagggcaacgaaacccccggcggguacugucugacacgguggaugcugaucgaggccgagcucaaaugcuuuggaaauacggcuguugccaaguguaacgaaaaacaugacgaggaguucugcgauaugcugcgccuuuuugacuucaauaagcaggcgaucagacggcugaaagccgaagcucagaugagcauucagcucaucaacaaggccgugaaugcucugauuaacgaucaacuuaucaugaagaaucaucugcgcgacauuaugggcaucccuuauugcaacuacucuaaauauuguuaccucaaucacaccgucacagggaagaccucccugcccagaugcugucuggugagcaacggaucuuaccucaaugaaacacacuucagcgacgauaucgagcagcaggccgacaacaugauuaccgagcugcuucaaaaagaauauaucgaucggcagggcaagacgccucuggggcucguggaccuguuugucuucuccacaucuuuuuaccugauuagcaucuuccuucaccucguuaaaauuccgacccaucgccacgugaucggaaagcccugcccuaaaccccauagacugaaucacaugggcauuuguuccugcggccuguauaagcacccuggggugcccgucaaguggaaacggugaggacuaguuauaagacugacuagcccgaugggccucccaacgggcccuccuccccuccuugcaccgagauuaauaaaaaaaaaaaaaaaaaaaaaaaaaaaaaaaaaaaaaaaaaaaaaaaaaaaaaaaaaaaaaaaaaaaaaaaaaaaaaaaaaaaaaaaaaaaaaaaaaaaa

SEQ ID NO: 39893 - RNA, 1662 nt, Artificial Sequence
  mRNA product Design i-3 (A100) comprising derived and/or modified sequence from LASV(LASV1000-NIG-2009;Clade II)__AIT17782__GPCmut11 (opt5)
aggagaaagcuuaccaugggccagaucauuaccuucuuucaagaggugccccacgucaucgaagagguuaugaacauugugcugaucgcccucagccugcuugcuauucugaaggggaucuacaauguggccacaugcggacucuucggccuggucuccuuucuucugcucugugggagaucuugcagcacgaccuauaaaggaguguacgaacugcagacacuggagcucgacauggcgucccugaacaugaccaugccucuuucuuguacaaagaauaacagccaucacuauaucaugguuggcaaugaaaccgggcuggagcucacacugaccaacacguccauuaucaaucauaaauucugcaaccuuucugaugcucacaagaaaaaucuguacgaccaugcccucaugagcauuaucuccaccuuucaccugagcauuccgaacuucaaucaguaugaggccaugucuugugauuuuaacggaggcaagaucuccgugcaguacaaucugagccacacauaugcugucgacgccgcuaaccauugcggcaccauugccaauggggugcuccaaacauucaugcggauggcguggggaggcucuuacaucgcccuggauuccgggaagggaagcugggacuguaucaugaccucuuaccaguaucuuauuauccagaacacgacaugggaagaucacugccaguuuucccgccccagcccuauuggcuaccuggggcuccugucccaaagaacccgggacaucuauauuucucgcagacuucugggaacauucaccuggacccucagcgauuccgagggcaacgaaacacccggcggguacugucugacgcgguggaugcugaucgaggcugagcucaaaugcuuuggaaauaccgccguugcuaaguguaacgaaaaacaugacgaggaguucugcgauaugcugcgccuuuuugacuucaauaagcaggccaucaaaagacugaagacagaagcgcagaugagcauucagcucaucaacaaggccgugaaugcucugauuaacgaucaacuuaucaugaaaaaucaucugcgggacauuaugggcaucccuuauugcaacuacucuaaguauuguuaccucaaucacaccgucacagggaaaaccucccugccccgcugcugucuggugagcaacggaucuuaccucaaugaaacgcacuucagcgacgauaucgagcagcaggccgacaacaugauuacagagcugcuucaaaaggaauauaucgauagacagggcaaaaccccucuggggcucguggaccuguuugucuucuccaccucuuuuuaccugauuagcaucuuccuucaccucguuaagauuccgacacaucggcacguggugggaaaacccugcccuaagccccaucgccugaaucacaugggcaucuguuccugcggccuguauaagcacccugggguccccgugaaauggaagagaugaggacuaguuauaagacugacuagcccgaugggccucccaacgggcccuccuccccuccuugcaccgagauuaauaaaaaaaaaaaaaaaaaaaaaaaaaaaaaaaaaaaaaaaaaaaaaaaaaaaaaaaaaaaaaaaaaaaaaaaaaaaaaaaaaaaaaaaaaaaaaaaaaaaa

SEQ ID NO: 39894 - RNA, 1662 nt, Artificial Sequence
  mRNA product Design i-3 (A100) comprising derived and/or modified sequence from LASV(LASV221-NIG-2010;Clade II)__AIT17624__GPCmut11 (opt5)
aggagaaagcuuaccaugggccagaucauuaccuucuuucaagaggugccccacgucaucgaagagguuaugaacauugugcugaucgcccucagccugcuugcuauucugaaggggaucuacaauguggccacaugcggacucuucggccuggucuccuuucuucugcucugugggagaucuugcagcacgaccuauaaaggaguguacgaacugcagacacuggagcucgacauggcgucccugaacaugaccaugccucuuucuuguacaaagaauaacagccaucacuauaucaugguuggcaaugaaaccgggcuggagcucacacugaccaacacguccauuaucaaucauaaauucugcaaccuuucugaugcucacaagaaaaaucuguacgaccaugcccucaugagcauuaucuccaccuuucaccugagcauuccgaacuucaaucaguaugaggccaugucuugugauuuuaacggaggcaagaucuccgugcaguacaaucugagccacacauaugcuauugacgccgcuaaccauugcggcaccaucgccaaugggguccuccaaacauucaugcggauggcguggggaggcucuuacaucgcccuggauuccgggaagggaagcugggacuguauuaugaccucuuaccaguaucuuaucauucagaacacgacaugggaagaucacugccaguuuucccgccccagcccuaucggcuaccuggggcuccugucccaaagaacccgggacauuuauaucucucgcagacuucugggaacauucaccuggacccucagcgauuccgagggcaacgaaacacccggcggguacugucugacgcgguggaugcugaucgaggcugagcucaaaugcuuuggaaauaccgccguggcuaaguguaacgaaaaacaugacgaggaguucugcgauaugcugcgccuuuuugacuucaauaagcaggccauuagacggcugaaaacagaagcgcagaugagcauccagcucauuaacaaggccguuaaugcucugaucaacgaucaacuuauuaugaagaaucaucugcgcgacaucaugggcaucccuuauugcaacuacucuaaauauuguuaccucaaucacaccgugacagggaagaccucccugcccagaugcugucuggucagcaacggaucuuaccucaaugaaacgcacuucagcgacgauauugagcagcaggccgacaacaugaucacagagaugcugcaaaaagaauauauggaucggcagggcaagaccccucuugggcugguggaccucuuuguguucuccaccucuuuuuaccugauuagcaucuuccugcaccuugucaaaauuccgacacaucgccacguuaucggaaagcccugcccuaaaccccauagacucaaucacaugggcauuuguuccugcggccuguauaagcacccuggggugcccgugaaguggaaacggugaggacuaguuauaagacugacuagcccgaugggccucccaacgggcccuccuccccuccuugcaccgagauuaauaaaaaaaaaaaaaaaaaaaaaaaaaaaaaaaaaaaaaaaaaaaaaaaaaaaaaaaaaaaaaaaaaaaaaaaaaaaaaaaaaaaaaaaaaaaaaaaaaaaa

SEQ ID NO: 39895 - RNA, 1662 nt, Artificial Sequence
  mRNA product Design i-3 (A100) comprising derived and/or modified sequence from LASV(LASV237-NIG-2010;Clade II)__AIT17638__GPCmut11 (opt5)
aggagaaagcuuaccaugggccagaucauuaccuucuuucaagaggugccccacgucaucgaagagguuaugaacauugugcugaucgcccucagccugcuugcuauucugaaggggaucuacaauguggccacaugcggacucuucggccuggucuccuuucuucugcucugugggagaucuugcagcacgaccuauaaaggaguguacgaacugcagacacuggagcucgacauggcgucccugaacaugaccaugccucuuucuuguacaaagaauaacagccaucacuauaucaugguuggcaaugaaaccgggcuggagcucacacugaccaacacguccauuaucaaucauaaauucugcaaccuuucugaugcucacaagaaagaccuguacgaucaugcccucaugagcauuaucuccaccuuucaccugagcauuccgaauuucaaccaguaugaggccaugucuugugacuuuaauggaggcaagaucuccgugcaguacaaccugagccacacauaugcugucgaugccgcuaaucauugcggcaccauugccaacggggugcuccaaacauucaugcggauggcguggggaggcucuuacaucgcccuggacuccgggaagggaagcugggauuguaucaugaccucuuaccaguaucuuauuauccagaauacgacaugggaagaccacugccaguuuucccgccccagcccuauuggcuaccuggggcuccugucccaaagaacccgggauaucuauauuucucgcagacuucugggaacauucaccuggacccucagcgacuccgagggcaacgaaacacccggcggguacugucugacgcgguggaugcugaucgaggcugagcucaaaugcuuuggaaacaccgccguugcuaaguguaaugaaaaacaugaugaggaguucugcgacaugcugcgccuuuuugauuucaacaagcaggccaucagacggcugaaaacagaagcgcagaugagcauucagcucaucaauaaggccgugaacgcucugauuaaugaccaacuuaucaugaagaaccaucugcgcgacauuaugggcaucccuuauugcaauuacucuaaauauuguuaccucaaccacaccgucacagggaagaccucccugcccagaugcugucuggugagcaauggaucuuaccucaacgaaacgcacuucagcgaugacaucgagcagcaggccgauaauaugauuacagagcugcuucaaaaagaauauauggaccggcagggcaagaccccucuggggcucguggaucuguuugucuucuccaccucuuuuuaccugaucagcauuuuccuucaccucaucaaaauuccgacacaucgccacaucaccggaaagcccugcccuaaaccccauagacugaaccacaugggcauuuguuccugcggccuguauaagcacccugggguucccgugaaguggaaacggugaggacuaguuauaagacugacuagcccgaugggccucccaacgggcccuccuccccuccuugcaccgagauuaauaaaaaaaaaaaaaaaaaaaaaaaaaaaaaaaaaaaaaaaaaaaaaaaaaaaaaaaaaaaaaaaaaaaaaaaaaaaaaaaaaaaaaaaaaaaaaaaaaaaa

SEQ ID NO: 39896 - RNA, 1662 nt, Artificial Sequence
  mRNA product Design i-3 (A100) comprising derived and/or modified sequence from LASV(LASV253-NIG-2011;Clade II)__AIT17670__GPCmut11 (opt5)
aggagaaagcuuaccaugggccagaucauuaccuucuuucaagaggugccccacgucaucgaagagguuaugaacauugugcugaucgcccucagccugcuugcuauucugaaggggaucuacaauguggccacaugcggacucuucggccuggucuccuuucuucugcucugugggagaucuugcagcacgaccuauaaaggaguguacgaacugcagacacuggagcucgacauggcgucccugaacaugaccaugccucuuucuuguacaaagaauaacagccaucacuauaucaugguuggcaaugaaaccgggcuggagcucacacugaccaacacguccauuaucaaucauaaauucugcaaccuuucugaugcucacaagaaaaaucuguacgaccaugcccucaugagcauuaucuccaccuuucaccugagcauuccgaacuucaaucaguaugaggccaugucuugugauuuuaacggaggcaagaucuccgugcaguacaaucugagccacacauaugcugucgacgccgcuaaccauugcggcaccauugccaauggggugcuccaaacauucaugcggauggcguggggaggcucuuacaucgcccuggauuccgggaagggaagcugggacuguaucaugaccucuuaccaguaucuuauuauccagaacacgacaugggaagaucacugccaguuuucccgccccagcccuauuggcuaccuggggcuccugucccaaagaacccgggacaucuauauuucucgcagacuucugggaacauucaccuggacccucagcgauuccgagggcaacgaaacacccggcggguacugucugacgcgguggaugcugaucgaggcugagcucaaaugcuuuggaaauaccgccguugcuaaguguaacgaaaaacaugacgaggaguucugcgauaugcugcgccuuuuugacuucaauaagcaggccaucagacggcugaaagcggaagcccagaugagcauucagcucaucaacaaggcugugaaugcccugauuaacgaucaacuuaucaugaagaaucaucugcgcgacauuaugggcaucccuuauugcaacuacucuaaauauuguuaccucaaucacacagucaccgggagaacaucccugccccggugcugucuggugagcaacggaucuuaccucaaugaaacccacuucagcgacgauaucgagcagcaggcugacaacaugauuacggagcugcuucaaaaggaauauaucgaucgccagggcaaaacaccucuggggcucguggaccuguuugucuucuccaccucuuuuuaccugauuagcaucuuccuucaccucguuaagauuccgacccauagacacaucauuggaaaacccugcccuaagccccaucggcugaaucacaugggcaucuguuccugcggccuguauaaacacccuggggugcccgugaaguggaagcgcugaggacuaguuauaagacugacuagcccgaugggccucccaacgggcccuccuccccuccuugcaccgagauuaauaaaaaaaaaaaaaaaaaaaaaaaaaaaaaaaaaaaaaaaaaaaaaaaaaaaaaaaaaaaaaaaaaaaaaaaaaaaaaaaaaaaaaaaaaaaaaaaaaaaa

SEQ ID NO: 39897 - RNA, 1662 nt, Artificial Sequence
  mRNA product Design i-3 (A100) comprising derived and/or modified sequence from LASV(LASV254-NIG-2011;Clade II)__AIT17674__GPCmut11 (opt5)
aggagaaagcuuaccaugggccagaucauuaccuucuuucaagaggugccccacgucaucgaagagguuaugaacauugugcugaucgcccucagccugcuugcuauucugaaggggaucuacaauguggccacaugcggacucuucggccuggucuccuuucuucugcucugugggagaucuugcagcacgaccuauaaaggaguguacgaacugcagacacuggagcucgacaugaccaaccugaauaugacaaugccucuuuccuguaccaagaacaauucucaucacuauaucaugguuggcaacgaaacagggcuggagcucacccugacgaauaccagcauuaucaaccauaaauucugcaaucuuuccgaugcgcacaagaaaaaccuguacaaucaugcucucaugucuauuaucagcacauuucaccuguccauuccgaacuucaaucaguaugaggccaugagcugugacuuuaacggaggcaagaucucugugcaguacaaucugucccacagcuaugccgucgaugcugccaaccauugcggcaccauugcuaacggggugcuccaaacauucaugcggauggccuggggaggcucuuacaucgcgcuggacuccgggaagggaaauugggauuguaucaugaccagcuaccaguaucuuauuauccagaacacgacaugggaagaccacugccaguuuucucgccccuccccuauuggcuaccuggggcuccugagccaaagaacccgggauaucuauauuucccgcagacuucugggaacauucaccuggacccucucugacagcgagggcaaugaaacacccggcggguacugucugacgcgguggaugcugaucgaggccgagcucaaaugcuuuggaaacaccgcuguugccaaguguaaugaaaaacaugaugaggaguucugcgacaugcugcgccuuuuugauuucaacaagcaggcuaucagacggcugaaaacagaagcccaggcgaauauucagcucaucaacaaggccgugaaugcucugauuaacgaccaacuuaucaugaagaaucaucugcgcgauauuaugggcaucccuuauugcaacuacuccaaauauuguuaccucaaucacaccgucacagggaagaccagccugcccagaugcugucuggugucuaacggauccuaccucaaugaaacgcacuucagcgacgacaucgagcagcaggccgauaacaugauuacagagcugcuucaaaaagaauauauggaccggcagggcaagaccccucuggggcucguggaucuguuugucuucucuaccagcuuuuaccugaucuccauuuuccuucaccucguuaaaaucccgacacaucgccacgugauuggaaagcccugcccuaaaccccauagacugaaccacaugggcaucuguucuugcggccuguauaagcacccuggggugcccgucaaguggaaacggugaggacuaguuauaagacugacuagcccgaugggccucccaacgggcccuccuccccuccuugcaccgagauuaauaaaaaaaaaaaaaaaaaaaaaaaaaaaaaaaaaaaaaaaaaaaaaaaaaaaaaaaaaaaaaaaaaaaaaaaaaaaaaaaaaaaaaaaaaaaaaaaaaaaa

SEQ ID NO: 39898 - RNA, 1662 nt, Artificial Sequence
  mRNA product Design i-3 (A100) comprising derived and/or modified sequence from LASV(Nig08-A19;Clade III)__ADU56618__GPCmut11 (opt5)
aggagaaagcuuaccaugggccagaucgugaccuucuuucaagaggucccccacguuauugaagaggugaugaacaucgugcugauugcccucagcauccuggcuauucuuaaggggcuguacaauaucgccacaugcggacucaucggccuggucacguuccuucugcucuccgggagaucuuguagcaugaccuauaaaggaguguacgaacugcagacacuggagcucaacaugaauacccugaacaugacaaugccucuuuccugcaccaagaauaacucucaucacuauauuaugguuggcaaugaaacagggcuggagcucacccugacgaacaccagccuucugcaucacaaauuuuguaaucucuccgacgcgcauaagaaaaaccuguacgaucacacacugaugucuaucauuagcaccuuccaccucuccaucccgaauuuuaaccaguaugaggcuaugagcugcgacuucaauggaggcaagauuacagugcaguacaaccugucucauuccuaugccaucgaugccgcuaaucacuguggcaccgucgccaacggggugcuucaaacguuuaugcggauggcuuggggaggcagcuacauugcccuggacucugggcgcggaaagugggauugcaucaugacauccuaccaguaucucaucauucagaacaccacaugggaagaccauugucaguucagcagacccucuccuaucggcuaccuggggcuucugucccaacggacccgcgauauuuauaucagcagacggcuccugggaaccuuuacauggacgcuguccgacucugagggcaaugaaacccccggcggguacugccucacacgcuggaugcugauugaggcggagcuuaaauguuucggaaacaccgccguugcuaagugcaaugaaaaacacgaugaggaauuuugugacaugcugagacucuucgauuuuaacaagcaggccauccggcgccugaaagcugaggcccagaugagcauccagcuuauuaauaaggcggugaacgcccugaucaaugaccaacucauuaugaagaaccaccugagagauaucaugggcauuccuuauugcaauuacuccaaauauugcuaccugaaccauacaagcaccgggcggacgucucucccccgcuguugccuggucuccaauggaagcuaccuuaacgaaacacacuucucugacgacaucgagcagcaggcugauaauaugaucaccgagaugcugcaaaaggaauaucucgacagacagggcaaaaccccucuggggcugguggaucuuuucguguuuagcacauccuucuaccucauuucuaucuuucugcaucuggucaagauuccgacccaccggcauaucguuggaaaacccuguccuaagccccaccgccucaaccacaugggcauuugcagcuguggccuguauaaacagccuggggugcccgugagauggaagcggugaggacuaguuauaagacugacuagcccgaugggccucccaacgggcccuccuccccuccuugcaccgagauuaauaaaaaaaaaaaaaaaaaaaaaaaaaaaaaaaaaaaaaaaaaaaaaaaaaaaaaaaaaaaaaaaaaaaaaaaaaaaaaaaaaaaaaaaaaaaaaaaaaaaa

SEQ ID NO: 39899 - RNA, 1665 nt, Artificial Sequence
  mRNA product Design i-3 (A100) comprising derived and/or modified sequence from LASV(G1180-SLE-2010;Clade IV)__AIT17168__GPCmut11 (opt5)
aggagaaagcuuaccaugggccagaucgugaccuucuuucaagaggucccccacguuauugaagaggugaugaacaucgugcugauugcccucagcauccuggcuguccuuaaggggcuguacaauuucgccacaugcggacucgugggccugcuuacguuucugcuccugugugggagauccugcaccgcgucucgguauaaaggaguuuacgaacugcagacacucgagcugaacauggaaacccuuaauaugacaaugccucugagcuguaccaagaacaauucccaucacuauauuauggugggcaacgagacagggcucgagcugacccuuacgaauaccucuaucaucaaccauaaauucugcaaucugagcgacgcucacaagaaaaaccucuacgaucaugcccugauguccauuaucucuacauuucaccugagcauuccgaauuucaaccaguaugaagccauguccugugacuuuaauggaggcaagaucagcguccaguacaaccucucucacuccuaugcuggcgaugccgcuaaucauugcgggaccguggccaacggaguucugcaaacauucaugcgcauggcguggggcgggagcuacauugcccuugacucuggacacggcuccugggauuguaucaugaccagcuaccaguaucugauuauccagaacacgacaugggaggaccauugccaguuuucuagacccuccccuaucggguaccucggacugcuuagccaacggacccgcgauauuuauaucuccagacggcugcucggcacauucaccuggacccugucugacagcgaaggcaaggauacacccgggggauacugucugacgcgcuggaugcucauugaggcugagcugaaaugcuuuggcaauaccgccguggcuaaguguaacgaaaaacacgacgaggaguucugcgauaugcuuagacuguuugacuucaauaagcaggccauccagcggcucaaagcggaagcccagauguccauucaacugaucaacaaggcugucaaugcccuuaucaacgaucagcugauuaugaagaaucaccuccgcgacaucauggggauuccuuauugcaacuacagcaaauauuguuaccugaaucauacaaccacaggaaagaccucucugcccaaaugcugucucguguccaacggcagcuaccugaaugaaacgcacuucucugacgauaucgagcagcaagcugacaacaugauuacagagaugcuucagaaggaauauauggagagacaggggaaaaccccucugggacucguggaucuguuugucuucagcaccuccuuuuaccugaucucuaucuuccuucaucucguuaagauuccgacacaccggcauaucgugggcaaaagcugccccaagccucaccgccugaaucacaugggcauuuguuccugcgggcuguauaagcagcccggagugccugucaaauggaagagaugaggacuaguuauaagacugacuagcccgaugggccucccaacgggcccuccuccccuccuugcaccgagauuaauaaaaaaaaaaaaaaaaaaaaaaaaaaaaaaaaaaaaaaaaaaaaaaaaaaaaaaaaaaaaaaaaaaaaaaaaaaaaaaaaaaaaaaaaaaaaaaaaaaaa

SEQ ID NO: 39900 - RNA, 1665 nt, Artificial Sequence
  mRNA product Design i-3 (A100) comprising derived and/or modified sequence from LASV(G1442-SLE-2011;Clade IV)__AIT17180__GPCmut11 (opt5)
aggagaaagcuuaccaugggccagaucgugaccuucuuucaagaggucccccacguuauugaagaggugaugaacaucgugcugauugcccucagcauccuggcuguccuuaaggggcuguacaauguggccacaugcggacucauuggccugguuacguuccuucugcucugugggagauccugcaccacaacccuguauaaaggaguguacgaacugcagacacucgagcugaacauggaaacccuuaauaugacaaugccucugucuuguaccaagaacaauagccaucacuauauccgggucggcaacgagacggggcucgagcugacccuuacaaauaccuccaucauuaaccauaaauuuugcaaucugucugacgcgcacaagaaaaaccucuacgaucaugcucugaugagcaucauuuccacauuccaccugucuaucccgaauuuuaaccaguaugaagccaugagcugugacuucaauggaggcaagauuuccgugcaguacaaccucagccacucuuaugccggcgaugcugccaaucauugcgggaccguugcuaacggagugcugcaaacguuuaugcgcauggccuggggcggguccuacaucgcgcuugacagcggaagaggcaacugggauuguauuaugacaucuuaccaguaucugaucauccagaauaccacaugggacgaucacugccaguucucccggcccagcccuauuggguaccucggacugcuuucucaacgcaccagagacgucuauaucucccggcgccugcucggcaccuuuacauggacgcugagcgauuccgagggcaaggacacccccgggggauacugucugacaagauggaugcucauugaagccgagcugaaaugcuucggcaacaccgcuguggccaaguguaaugagaaacaugaugaagaguuuugcgacaugcuucggcuguucgauuuuaacaagcaggcuauccagcgccucaaagccgaagcgcagaugucuauucaacugaucaauaaggccgugaacgcucuuaucaaugaccagcugauuaugaagaaccaccucagagacaucauggggauuccuuauugcaauuacagcaaauauuguuaccugaacaauacagccaccggaaagacgucccugcccaaaugcugucucaucagcaacggcucuuaccugaaugagacacacuucuccgaugacauugaacaggaggcugauaacaugaucaccgagaugcuucaaaaggaauauauggagcggcaggggaaaaccccucugggacucgucgaccuguucguuuuuagcacaucuuucuaccugaucagcauuuuucuucaucucgugaagaucccgacccaccgccauauugugggcaaauccugccccaagccucacagacugaaucauaugggcaucuguucuugcgggcuguauaagcagcccggagucccugugcgguggaaacgcugaggacuaguuauaagacugacuagcccgaugggccucccaacgggcccuccuccccuccuugcaccgagauuaauaaaaaaaaaaaaaaaaaaaaaaaaaaaaaaaaaaaaaaaaaaaaaaaaaaaaaaaaaaaaaaaaaaaaaaaaaaaaaaaaaaaaaaaaaaaaaaaaaaaa

SEQ ID NO: 39901 - RNA, 1665 nt, Artificial Sequence
  mRNA product Design i-3 (A100) comprising derived and/or modified sequence from LASV(G3010-SLE-2013;Clade IV)__AIT17344__GPCmut11 (opt5)
aggagaaagcuuaccaugggccagaucgugaccuucuuucaagaggucccccacguuauugaagaggugaugaacaucgugcugauugcccucagcauccuggcuguccuuaaggggcuguacaauuucgccacaugcggacucgugggccugguuacguuucuucugcucugugggagauccugcaccacaucucuguauaaaggaguguacgaacugcagacccucgagcugaacauggaaacacuuaauaugaccaugccucugagcuguacaaagaacaauucccaucacuauauuauggucggcaacgagaccgggcucgagcugacgcuuaccaauacaucuaucaucaaccauaaauucugcaaucugagcgacgcgcacaagaaaaaccucuacaaucaugcucugauguccauuaucucuaccuuucaccugagcauuccgaacuucaaucaguaugaagccauguccugugauuuuaacggaggcaagaucagcgugcaguacaaucucucucacuccuaugccggcgacgcugccagccauugcgggacaguugcuaacggagugcugcaaaccuucaugcggauggccuggggcgggucuuacauugcgcuugauuccggauacggcaagugggacuguaucaugacgagcuaucaguaccugauuauccagaacacaaccugggaggaucacugccaguuuucucgccccuccccuaucggguaucucggacugcuuagccaaagaacacgggacauuuacaucucccgcagacugcucggcaccuucaccuggacacugucugauagcgaaggcaaagacacgcccgggggauauugucugacccgguggaugcucauugaggccgagcugaagugcuuuggcaauacagcugucgccaaauguaacgaaaagcaugaugaggaguucugcgacaugcuucgccuguuugauuucaauaaacaggcuauccagagacucaagaccgaagcccagauguccauucaacugaucaacaaggcggugaaugcccuuaucaacgaccagcugauuaugaaaaaucaccuccgggauaucauggggauuccuuacugcaacuauagcaaguacuguuaccugaaucacacaaccacgggaaaaacaucucugcccaagugcugucucguguccaacggcagcuaucugaaugaaacccauuucucugacgacaucgagcagcaagcugauaacaugauuaccgagaugcuucagaaagaauacauggagcgccaggggaagacaccucugggacucgucgaccuguuuguuuucagcaccuccuuuuaucugaucucuaucuuccuucaccucgugaaaauuccgacacauagacacaucgugggcaagagcugccccaagccucaucggcugaaucacaugggcauuuguuccugcgggcuguacaaacagcccggagucccugugcgcuggaagagaugaggacuaguuauaagacugacuagcccgaugggccucccaacgggcccuccuccccuccuugcaccgagauuaauaaaaaaaaaaaaaaaaaaaaaaaaaaaaaaaaaaaaaaaaaaaaaaaaaaaaaaaaaaaaaaaaaaaaaaaaaaaaaaaaaaaaaaaaaaaaaaaaaaaa

SEQ ID NO: 39902 - RNA, 1665 nt, Artificial Sequence
  mRNA product Design i-3 (A100) comprising derived and/or modified sequence from LASV(G502-SLE-2009;Clade IV)__AIT17126__GPCmut11 (opt5)
aggagaaagcuuaccaugggccagaucgugaccuucuuucaagaggucccccacguuauugaagaggugaugaacaucgugcugauugcccucagcauccuggcuguccuuaaggggcuguacaauuucgccacaugcggacucgugggccugcuuacguuucugcuccugugugggagauccugcaccacaggacuguauaaaggcguuuacgaacuccagacccuggagcuuaacauggaaacacugaauaugaccaugccucucucuuguacaaagaacaauagccaucacuauauuaugguggggaacgagaccggacuggagcuuacgcugaccaauacauccaucaucaaccauaaauucugcaaucucucugacgcgcacaagaaaaaccuguacgaucaugcucugaugagcauuaucuccaccuuucaccucucuauuccgaauuucaaccaguaugaagccaugagcugugacuuuaauggcggcaagaucuccguccaguacaaccugagccacucuuaugccggggaugcugccgaccauugcggaacaguggcuaauggcguucuucaaaccuucaugcggauggccuggggaggguccuacauugcgcuggauagcggccgcgggagaugggacuguaucaugacgucuuaccaguaucucauuauccagaacacaaccugggaggaucacugccaguuuucccggcccagcccuaucggauaccugggccuucugucucaacgcacaagagacauuuauaucucccggcgccuccugggcaccuucaccuggacacugagcgauuccgaagggaaggacacgcccggaggcuacugucucaccagauggaugcugauugaggccgagcuuaaaugcuuugggaacacagcuguggccaaguguaaugaaaaacaugaugaggaguucugcgacaugcugcggcucuuugauuucaacaagcaggcuauccagcgccugaaagccgaagcgcagaugucuauucaacuuaucaauaaggccgucaacgcucugaucaaugaccagcucgugaugaagaaccaccugagagacauuaugggaaucccuuauugcaauuacagccgguauuguuaccugaaccacaccacaaccggccgcacgucccuccccaaaugcugucuggugagcaaugggucuuaccuuaacgaaacacauuucuccgaugacauugagcagcaagccgauaauaugaucaccgagaugcugcagaaggaauauauggagagacagggaaaaaccccucucggccuggucgaccuguuuguuuucagcacaucuuuuuaccuuauuagcaucuuccuccaccuggugaagaucccgacccaucggcacauugugggcaaauccugccccaagccucaucgccugaaccacauggggaucuguucuugcggacucuauaaacagcccggcgucccugugaaguggaagagaugaggacuaguuauaagacugacuagcccgaugggccucccaacgggcccuccuccccuccuugcaccgagauuaauaaaaaaaaaaaaaaaaaaaaaaaaaaaaaaaaaaaaaaaaaaaaaaaaaaaaaaaaaaaaaaaaaaaaaaaaaaaaaaaaaaaaaaaaaaaaaaaaaaaa

SEQ ID NO: 39903 - RNA, 1665 nt, Artificial Sequence
  mRNA product Design i-3 (A100) comprising derived and/or modified sequence from LASV(G733-SLE-2010;Clade IV)__AIT17154__GPCmut11 (opt5)
aggagaaagcuuaccaugggccagaucgugaccuucuuucaagaggucccccacguuauugaagaggugaugaacaucgugcugauugcccucagcauccuggcuguccuuaaggggcuguacaauuucgccacaugcggaauugugggccucguuuccuuucugcuucugugugggagaucuugcacgaccagccucuauaaaggaguguacgaacugcagacacuggagcucaacauggaaacccugaauaugacaaugccucuuuccuguaccaagaacaauucucaucacuauaucauggucggcaacgagacagggcuggagcucacccugacgaauaccagcaucauuaaccauaaauucugcaaucuuuccgacgcgcacaagaaaaaccuguacgaucaugcucucaugucuaucauuagcacauuucaccuguccaucccgaauuucaaccaguaugaagccaugagcugugacuuuaauggaggcaagauuucugugcaguacaaccugucccacagcuaugccggcgaugcugccaaucauugcgggaccaucgcuaacggaguucuccaaacauucaugcggauggccuggggcgggucuuacauugcgcuggacuccggacgcgauagaugggacuguaucaugaccagcuaccaguaucuuaucauucagaacacgacaugggaggaucacugccaguuuucucggcccuccccuaucggcuaccuggggcuccugagccaacgcaccagagacauuuauaucucccggcgccuucugggaacauucaccuggacccucucugauagcgaaggcaaggacacacccggcggguacugucugacgagauggaugcugauugaggccgagcucaaaugcuuuggaaauaccgcuguggccaaguguaacgaaaaacaugaugaggaguucugcgacaugcugcggcuuuuugauuucaauaagcaggcuauccagcgccugaaagccgaagcgcagauguccauccaacucauuaacaaggccgucaaugcucugaucaacgaccagcuuauuaugaagaaucaccugagagacaucaugggcauuccuuauugcaacuacagcaaauauuguuaccucaaucacacaaccacagggaagaccucucugcccaaaugcugucugguguccaacggaagcuaccucaaugaaacgcauuucucugaugacaucgagcagcaagccgauaacaugaucacagagaugcugcagaaggaauauauggagcggcagggcaaaaccccucuugggcugguggaccucuuugucuucagcaccuccuuuuaccugauuucuaucuuccugcaccuuguuaagauuccgacacaucgccacguggugggaaaaagcugccccaagccucauagacucaaucacaugggcaucuguuccugcggccuguaugggcagcccggagucccugugaaguggaaacggugaggacuaguuauaagacugacuagcccgaugggccucccaacgggcccuccuccccuccuugcaccgagauuaauaaaaaaaaaaaaaaaaaaaaaaaaaaaaaaaaaaaaaaaaaaaaaaaaaaaaaaaaaaaaaaaaaaaaaaaaaaaaaaaaaaaaaaaaaaaaaaaaaaaa

SEQ ID NO: 39904 - RNA, 1665 nt, Artificial Sequence
  mRNA product Design i-3 (A100) comprising derived and/or modified sequence from MOPV/LASV reassortant(IGS-1;Clade IV)__AFY05576__GPCmut11 (opt5)
aggagaaagcuuaccaugggccagaucgugaccuucuuucaagaggucccccacguuauugaagaggugaugaacaucgugcugauugcccucagcguccuggcugugcuuaaggggcuguacaauuucgccacaugcggacucguuggccuggugacguuucuucugcucugugggagauccugcaccacaucucuguauaaaggagucuacgaacugcagacccucgagcugaacauggaaacacuuaauaugaccaugccucugagcuguacaaagaacaauucccaucacuauaucauggugggcaacgagaccgggcucgagcugacgcuuaccaauacaucuauuaucaaccauaaauucugcaaucugagcgacgcgcacaagaaaaaccucuacgaucaugcucugauguccaucauuucuaccuuucaccugagcaucccgaauuucaaccaguaugaagccauguccugugacuuuaauggaggcaagauuagcguucaguacaaccucucucacuccuaugccggcgaugcugccaaucauugcgggacaguggcuaacggaguccugcaaaccuucaugcggauggccuggggcgggagcuacaucgcgcuugacucuggacgcggcaacugggauuguauuaugacguccuaccaguaucugaucauucagaauacaaccugggaggaccacugccaguuuagcagacccucuccuaucggguaccucggacugcuuucccaacggacacgcgauaucuauauuagcagacggcugcucggcaccuucaccuggacacuguccgacucugaaggcgaggauacgcccgggggauacugucugacccgcuggaugcucaucgaggccgaacugaagugcuuuggcaacacagcuguggccaaauguaaugagaagcaugacgaagaguucugcgauaugcuuagacuguuugacuucaacaaacaggcuauucagcggcucaaggccgaagcgcagaugagcauccaacugauuaauaaagccgugaacgcucuuaucaaugaucagcugaucaugaagaaccaccuccgcgacauuauggggaucccuuauugcaauuacuccaaguauuguuaccugaaccacaccacaaccggaagaacgagccugcccaaaugcugucucgucucuaauggcuccuaccugaacgagacacauuucagcgacgauauugagcagcaagccgacaauaugaucaccgaaaugcuucagaaggaguauauggaacggcaggggaaaaccccucugggacucguugaucuguuuguguucucuaccagcuuuuaccugauuuccaucuuccuucaccucgugaagaucccgacacaucgccacauugucggcaaaucuugccccaagccucauagacugaaccacaugggcaucuguagcugcgggcuguauaaacagcccggagugccuguuaaguggaagcggugaggacuaguuauaagacugacuagcccgaugggccucccaacgggcccuccuccccuccuugcaccgagauuaauaaaaaaaaaaaaaaaaaaaaaaaaaaaaaaaaaaaaaaaaaaaaaaaaaaaaaaaaaaaaaaaaaaaaaaaaaaaaaaaaaaaaaaaaaaaaaaaaaaaa

SEQ ID NO: 39905 - RNA, 1665 nt, Artificial Sequence
  mRNA product Design i-3 (A100) comprising derived and/or modified sequence from LASV(LM765-SLE-2012;Clade IV)__AIT17814__GPCmut11 (opt5)
aggagaaagcuuaccaugggccagaucgugaccuucuuucaagaggucccccacguuauugaagaggugaugaacaucgugcugauugcccucagcauccuggcuguccuuaaggggcuguacaauuucgccacaugcggacucgugggccugguuacguuucuucugcucugugggagauccugcaccacaucucuguauaaaggaguguacgaacugcagacccucgagcugaacauggaaacacuuaauaugaccaugccucugagcuguacaaagaacaauucccaucacuauauuauggucggcaacgagaccgggcucgagcugacgcuuaccaauacaucuaucaucgaccauaaauucugcaaccugagcgaugcgcaccggaagaaucucuacgaccaugcucugauguccauuaucucuaccuuucaccugagcauuccgaacuucaaucaguaugaagccauguccugugauuuuaacggaggcaaaaucagcgugcaguacaaucucucucacuccuaugccaaggacgcugccgaucauugcggcacaguugcuaacggggugcugcaaaccuucaugcgcauggccuggggaggcagcuacauugcgcuugacucugggagaggacggugggauuguaucaugacguccuaccaguaucugauuauccagaauacaaccugggaggaccacugccaguuuagccgccccucuccuaucggcuaccucgggcugcuuucccaaagaacacgggauauuuauaucagccgcagacugcucggaaccuucaccuggacacuguccgacucugaaggcaaggauacgcccggcggguacugucugacccgguggaugcucauugaggccgagcugaaaugcuuuggaaacacagcugucgccaaguguaacgaaaaacaugacgaggaguucugcgauaugcuucgccuguuugacuucaauaagcaggcuauccagagacucaaagccgaagcgcagaugagcauucaacugaucaacaaggccgugaaugcucuuaucaacgaccagcugauuaugaagaaucaccuccgggauaucaugggcauuccuuauugcaacuacuccaaauauuguuaccugaaucacaccacaaccgggaagacgagccugcccaaaugcugucucgugucuaacggauccuaccugaaugaaacacauuucagcgacgauaucgagcagcaagccgacaacaugauuaccgagaugcuucagaaggaauauauggagcgccagggcaaaaccccucuggggcucgucgaucuguuuguuuucucuaccagcuuuuaccugaucuccaucuuccuucaccucgugaagauuccgacacauagacacaucgugggaaaacccugcccuaagccccaucggcugaaucacaugggcauuuguucuugcggccuguauaagcagccugggguccccgugaaauggaagcgcugaggacuaguuauaagacugacuagcccgaugggccucccaacgggcccuccuccccuccuugcaccgagauuaauaaaaaaaaaaaaaaaaaaaaaaaaaaaaaaaaaaaaaaaaaaaaaaaaaaaaaaaaaaaaaaaaaaaaaaaaaaaaaaaaaaaaaaaaaaaaaaaaaaaa

SEQ ID NO: 39906 - RNA, 1665 nt, Artificial Sequence
  mRNA product Design i-3 (A100) comprising derived and/or modified sequence from LASV(LM776-SLE-2012;Clade IV)__AIT17824__GPCmut11 (opt5)
aggagaaagcuuaccaugggccagaucgugaccuucuuucaagaggucccccacguuauugaagaggugaugaacaucgugcugauugcccucagcauccuggcuguccuuaaggggcuguacaauuucgccacaugcggacucgugggccugguuacguuucuucugcucugugggagauccugcaccacaucuguguauaaaggagucuacgaacugcagacccuggagcucaacauggaaacacugaauaugaccaugccucuuagcuguacaaagaacaauucccaucacuauauuauggugggcaacgagaccgggcuggagcucacgcugaccaauacaucuaucaucaaccauaaauucugcaaucuuagcgacgcgcacaagaaaaaccuguacgaucaugcucucauguccauuaucucuaccuuucaccugagcauuccgaauuucaaccaguaugaagccauguccugugacuuuaauggaggcaagaucagcguucaguacaaccugucucacuccuaugccggcgaugcugccaaucauugcgggacaguggcuaacggaguccuccaaaccuucaugcggauggccuggggcgggagcuacauugcgcuggacucuggacacggcaagugggauuguaucaugacguccuaccaguaucuuauuauccagaacacaaccugggaggaccauugccaguuuagccgccccucuccuaucggguaccugggacuccugucccaaagaacacgggauauuuauaucagccgcagacuucugggcaccuucaccuggacacucuccgacucugaaggcaaagauacgcccgggggauacugucugacccgguggaugcugauugaggccgagcucaagugcuuuggcaauacagcuguggccaaauguaacgaaaagcacgacgaggaguucugcgauaugcugcgccuuuuugacuucaauaaacaggcuauccagagacugaaggccgaagcgcagaugagcauucaacucaucaacaaggccgugaaugcucugaucaacgaucagcuuauuaugaaaaaucaucugcgggacaucauggggauuccuuauugcaacuacuccaaguauuguuaccucaaucacaccacaaccggaaaaacgagccugcccaagugcugucuggucucuaacggcuccuaccucaaugaaacacacuucagcgacgauaucgagcagcaagccgacaacaugauuaccgagaugcugcagaaagaauauauggagcgccaggggaagaccccucuuggacugguugaucucuuuguguucucuaccagcuuuuaccugaucuccaucuuccugcaucuugugaaaauuccgacacacagacauaucgucggcaagucuugccccaagccucaccggcucaaucacaugggcauuuguagcugcgggcuguauaaacagcccggagugccuguucgcuggaagagaugaggacuaguuauaagacugacuagcccgaugggccucccaacgggcccuccuccccuccuugcaccgagauuaauaaaaaaaaaaaaaaaaaaaaaaaaaaaaaaaaaaaaaaaaaaaaaaaaaaaaaaaaaaaaaaaaaaaaaaaaaaaaaaaaaaaaaaaaaaaaaaaaaaaa

SEQ ID NO: 39907 - RNA, 1665 nt, Artificial Sequence
  mRNA product Design i-3 (A100) comprising derived and/or modified sequence from LASV(Mad39;Clade IV)__ANH09722__GPCmut11 (opt5)
aggagaaagcuuaccaugggccagaucgugaccuucuuucaagaggucccccacguuauugaagaggugaugaacaucgugcugauugcccucagcauccuggcuguccuuaaggggcuguacaauguggccacaugcggacucauuggccugguuacguuccuucugcucugugggagauccugcaccacaacccuguauaaaggaguguacgaacugcaggcgcucgagcugaacauggaaacacuuaauaugaccaugccucugucuuguacaaagaacaauagccaucacuauauccgggucggcaacgagaccgggcucgagcugacgcuuaccaauacaucccugaucaaccauaaauuuugcaaucucucugacgcucacaagaaaaaccuguacgaucaugcccugaugagcauuaucuccaccuuccaccucucuauuccgaauuuuaaccaguaugaagccaugagcugugacuucaaugauggaaagaucuccgugcaguacaaccugagccacacauaugcuggcgacaccgccaaucauugcggcacgguugcuaacggggugcuucaaacauuuaugcgcauggccuggggaggcucuuacauugcgcuggauuccgggagaggaggcugggacuguaucaugaccagcuaccaguaucucauuauccagaacacaaccugggaggaucacugccaguucucucggcccuccccuaucggguaccugggacuucugagccaacgcaccagagacauuuauaucucucggcgccuccugggcacauuuacguggacccuguccgauagcgaaggcaaggacacacccgggggauacugucucaccagauggaugcugauugaggccgagcuuaaaugcuucggcaauacagcugucgccaaguguaacgaaaaacaugaugaggaauuuugcgacaugcugcgccucuucgauuuuaauaagcaggcuauccagcggcugaaagccgaggcgcagauguccauucaacuuaucaacaaggccgugaaugcucugaucaacgaccagcucauuaugaagaaucaccugagagacaucauggggauuccuuauugcaacuacucuaaauauuguuaccugaaucacaccgugacgggaaagacaagccuccccaaaugcugucuggucuccaacggcagcuaccuuaaugaaacccauuucucugaugacaucgagcagcaagccgauaacaugauuaccgagaugcugcagaaggaauauauggagcggcaggggaaaacaccucucggacugguugaccuguucguguuuuccaccagcuucuaccuuaucucuaucuuucuccaccuggugaagauuccgacacaucgccacgucgugggcaaacccugcccuaagccccauagacugaaucacaugggcaucuguagcugcggguucuauaagcagccuggaguucccgugcgguggaaacgcugaggacuaguuauaagacugacuagcccgaugggccucccaacgggcccuccuccccuccuugcaccgagauuaauaaaaaaaaaaaaaaaaaaaaaaaaaaaaaaaaaaaaaaaaaaaaaaaaaaaaaaaaaaaaaaaaaaaaaaaaaaaaaaaaaaaaaaaaaaaaaaaaaaaa

SEQ ID NO: 39908 - RNA, 1665 nt, Artificial Sequence
  mRNA product Design i-3 (A100) comprising derived and/or modified sequence from LASV(Z0947-SLE-2011;Clade IV)__AIT17840__GPCmut11 (opt5)
aggagaaagcuuaccaugggccagaucgugaccuucuuucaagaggucccccacguuauugaagaggugaugaacaucgugcugauugcccucagcauccuggcuguccuuaaggggcuguacaauuucgccacaugcggacucgugggccugguuacguuucuucugcucugugggagauccugcaccauuucucuguauaaaggaguguacgaacugcagacacucgagcugaacauggaaacccuuaauaugacaaugccucugagcuguaccaagaacaauucccaucacuauaucauggucggcaacgagacagggcucgagcugacccuuacgaauaccucuaucauuaaccauaaauucugcaaucugagcgacgcgcacaagaaaaaccucuacgaucaugcucugauguccaucauuucuacauuucaccugagcaucccgaauuucaaccaguaugaagccauguccugugacuuuaauggaggcaagauuagcgugcaguacaaccucucucacuccuaugccggcgaugcugccaaucauugcgggaccguugcuaacggagugcugcaaacauucaugcggauggccuggggcgggagcuacaucgcgcuugacucuggacgcgauagaugggacuguauuaugaccuccuaccaguaucugaucauccagaacacgacaugggaggaucacugccaguuuagccggcccucuccuauuggcuaccucgggcugcuuucccaacgcaccagagacaucuauauuagccggcgccugcucggaacauucaccuggacccuguccgauucugaaggcaaggacacacccggcggguacugucugacgagauggaugcucaucgaggccgagcugaaaugcuuuggaaauaccgcugucgccaaguguaacgaaaaacaugaugaggaguucugcgacaugcuucggcuguuugauuucaauaagcaggcuauucagcgccucaaagccgaagcgcagaugagcauccaacugaucaacaaggccgugaaugcucuuauuaacgaccagcugaucaugaagaaucaccucagagacauuaugggcaucccuuauugcaacuacuccaaauauuguuaccugaaucacacaaccacagggaagaccagccugcccaaaugcugucucgugucuaacggauccuaccugaaugaaacgcauuucagcgaugacauugagcagcaagccgauaacaugaucacagagaugcuucagaaggaauauauggagcggcagggcaaaaccccucuggggcucgucgaccuguuuguuuucucuaccagcuuuuaccugaucuccauuuuccuucaccucgugaagaucccgacacaucgccacauugugggaaaacccugcccuaagccccauagacugaaucacaugggcaucuguucuugcggccuguauaagcagccugggguccccgugaaauggaagcggugaggacuaguuauaagacugacuagcccgaugggccucccaacgggcccuccuccccuccuugcaccgagauuaauaaaaaaaaaaaaaaaaaaaaaaaaaaaaaaaaaaaaaaaaaaaaaaaaaaaaaaaaaaaaaaaaaaaaaaaaaaaaaaaaaaaaaaaaaaaaaaaaaaaa

SEQ ID NO: 39909 - protein, 491 aa, Artificial Sequence
  derived and/or modified protein sequence (artificial) from LASV(Josiah;Clade IV)__NP_694870__GPCmut12
MGQIVTFFQEVPHVIEEVMNIVLIALSVLAVLKGLYNFATCGLVGLVTFLLLCGRSCTTSLYKGVYELQTLELNMETLNMCMPLSCTKNNSHHYIMVGNETGLELTLTNTSIINHKFCNLSDAHKKNLYDHALMSIISTFHLSIPNFNQYEAMSCDFNGGKISVQYNLSHSYAGDAANHCGTVANGVLQTFMRMAWGGSYIALDSGRGNWDCIMTSYQYLIIQNTTWEDHCQFSRPSPIGYLGLLSQRTRDIYISRRLLGTFTWTLSDSEGKDTPGGYCLTRWMLIEAELKCFGNTAVAKCNEKHDEEFCDMLRLFDFCKQAIQRLKAEAQMSIQLINKAVNALINDQLIMKNHLRDIMGIPYCNYSKYCYLNHTTTGRTSLPKCCLVSNGSYLNETHFSDDIEQQADNMITEMLQKEYMERQGKTPLGLVDLFVFSTSFYLISIFLHLVKIPTHRHIVGKSCPKPHRLNHMGICSCGLYKQPGVPVKWKR

SEQ ID NO: 39910 - protein, 490 aa, Artificial Sequence
  derived and/or modified protein sequence (artificial) from LASV(LP;Clade I)__AAF86701__GPCmut12
MGQIITFFQEVPHVIEEVMNIVLIALSLLAILKGLYNIATCGIIGLVAFLFLCGKSCSLTLKGGYELQTLELNMETLNMCMPLSCTKNSSHHYIRVGNETGLELTLTNTSIINHKFCNLSDAHKKNLYDHALMSIISTFHLSIPNFNQYEAMSCDFNGGKISVQYNLSHSYAGDAAEHCGTVANGVLQTFMRMAWGGRYIALDSGKGNWDCIMTSYQYLIIQNTTWEDHCQFSRPSPIGYLGLLSQRTRDIYISRRLLGTFTWTLSDSEGNETPGGYCLTRWMLIEAELKCFGNTAVAKCNEKHDEEFCDMLRLFDFCKQAIRRLKAEAQMSIQLINKAVNALINDQLIMKNHLRDIMGIPYCNYSKYCYLNHTSSGRTSLPKCCLISNGSYLNETQFSDDIEQQADNMITEMLQKEYIERQGKTPLGLVDIFIFSTSFYLISIFLHLIKIPTHRHIVGKPCPKPHRLNHMGVCSCGLYKHPGVPTKWKR

SEQ ID NO: 39911 - protein, 490 aa, Artificial Sequence
  derived and/or modified protein sequence (artificial) from LASV(803213;Clade II)__AAF86703__GPCmut12
MGQIITFFQEVPHVIEEVMNIVLIALSLLAILKGIYNVATCGLFGLISFLLLCGRSCSVTYKGVYELQTLELNMANLNMCMPLSCTKNNSHHYIMVGNETGLELTLTNTSIINHKFCNLSDAHKKNLYDHALMSIISTFHLSIPNFNQYEAMSCDFNGGKISVQYNLSHSFAVDAANHCGTIANGVLQTFMRMAWGGSYIALDSGKGNWDCIMTSYQYLIIQNTTWEDHCQFSRPSPIGYLGLLSQRTRDIYISRRLLGTFTWTLSDSEGNEAPGGYCLTRWMLIEAELKCFGNTAVAKCNEKHDEEFCDMLRLFDFCKQAIKRLKTEAQMSIQLINKAVNALINDQLIMKNHLRDIMGIPYCNYSRYCYLNHTVTGKTSLPRCCLVSNGSYLNETHFSDDIEQQADNMITEMLQKEYMDRQGKTPLGLVDLFVFSTSFYLISIFLHLVKIPTHRHIVGKPCPKPHRLNHMGICSCGLYKHPGVPVKWKR

SEQ ID NO: 39912 - protein, 490 aa, Artificial Sequence
  derived and/or modified protein sequence (artificial) from LASV(GA391;Clade III)__CAA36645__GPCmut12
MGQIVTFFQEVPHVIEEVMNIVLIALSILAILKGLYNVATCGLIGLVTFLLLSGRSCSLIYKGTYELQTLELNMETLNMCMPLSCTKNNSHHYIRVGNETGLELTLTNTSILNHKFCNLSDAHKRNLYDHSLMSIISTFHLSIPNFNQYEAMSCDFNGGKITVQYNLSHSFAVDAAGHCGTLANGVLQTFMRMAWGGSYIALDSGRGNWDCIMTSYQYLIIQNTTWDDHCQFSRPSPIGYLGLLSQRTRDIYISRRLLGTFTWTLSDSEGNETPGGYCLTRWMLIEAELKCFGNTAVAKCNEKHDEEFCDMLRLFDFCKQAIRRLKTEAQMSIQLINKAVNALINDQLIMKNHLRDIMGIPYCNYSRYCYLNHTSTGKTSLPRCCLISNGSYLNETKFSDDIEQQADNMITEMLQKEYIDRQGKTPLGLVDLFVFSTSFYLISIFLHLVKIPTHRHIVGKPCPKPHRLNHMGICSCGLYKQPGVPVRWKR

SEQ ID NO: 39913 - protein, 491 aa, Artificial Sequence
  derived and/or modified protein sequence (artificial) from LASV(AV;Clade V)__CCA30314__GPCmut12
MGQIVTFFQEVPHVIEEVMNIVLIALSILAVLKGLYNIATCGLIGLITFLLLCGRSCSSNLYKGVYELQSLDLNMETLNMCMPLSCTKNNSHHYIRVGNDTGLELTLTNTSILNHKFCNLSDAHKKDLYDHALMSIISTFHLSIPNFNQYEAMSCDFNGGKISVQYNLSHSYAIDAANHCGTVANGILQTFMRMAWGGSYIALDSGRGNWDCIMTSYQYLIIQNTTWENHCQFSRPSPIGYLGLLSQRTRDIYISRRLLGTFTWTLSDSEGNATPGGYCLTRWMLIEAELKCFGNTAVAKCNEKHDEEFCDMLRLFDFCKQAISRLKSEAQMSIQLINKAVNALINDQLIMKNHLRDIMGIPYCNYSKYCYLNHTITGKTSLPKCCLVSNGSYLNETHFSDDIEQQADNMITEMLQKEYMERQGKTPLGLVDLFVFSTSFYLISIFLRLVKIPTHRHIVGKPCPKPHRLNHMGICSCGLYKQPGVPVRWKR

SEQ ID NO: 39914 - protein, 490 aa, Artificial Sequence
  derived and/or modified protein sequence (artificial) from LASV(Togo/2016/7082;Clade VI)__AMR44577__GPCmut12
MGQIITFFQEVPHVIEEVMNIVLIALSLLAILKGVYNVATCGIIGLVTFLFLCGRSCSLIYKGSYELQTLELNMETLNMCMPLSCTKNSSHHYIRVGNETGLELTLTNTSIINHKFCNLSDAHKRNLYDHALMSILSTFHLSIPNFNQYEAMSCDFNGGKISVQYNLSHAYAVDAAEHCGTVANGVLQTFMRMAWGGSYIALDSGRGNWDCIMTSYQYLIIQNTTWEDHCQFSRPSPIGYLGLLSQRTRDIYISRRLLGTFTWTLSDSEGNETPGGYCLTRWMLIEAELKCFGNTAVAKCNEKHDEEFCDMLRLFDFCKQAIQRLKSEAQMSIQLINKAVNALINDQLIMKNHLRDMMGIPYCNYSKYCYLNHTSSGRTSLPKCCLVSNGSYLNETHFSDDIEQQADNMITEMLQKEYIDRQGKTPLGLVDLFVFSTSFYLISIFLHLIKIPTHRHIVGKPCPKPHRLNHMGICSCGLYKQPGVPTRWKR

SEQ ID NO: 39915 - protein, 490 aa, Artificial Sequence
  derived and/or modified protein sequence (artificial) from LASV(KAK-428;Clade n.d. (VII))__ANH09740__GPCmut12
MGQIVTFFQEVPHVIEEVMNIVLIALSLLAILKGLYNFATCGVIGLITFLLLCGRSCSATYKGQYELQTLELNMESLNMCMPLSCTKNNSHHYIRAGNNTGLELTLTNTSIISHKFCNLSDAHKKNLYDHTLMSIITTFHLSIPNFNQYEAMSCDFNGGKISIQYNLSHSYAGDAAQHCGTVANGVLQTFMRMAWGGSYLALDSGRRGWDCIISSYQYLIIQNTTWDDHCQFSRPSPIGYLGFVSQKTRDIYISRRLLGTFTWTLSDSEGHDMPGGYCLTRWMLIEADLKCFGNTAVAKCNEKHDEEFCDMWRLFDFCKQAIQRLKAEAQMNIQLINKAVNALINDQLMMKNHLRDIMGIPYCNYSKFCYLNNTTTGRTSLPRCCLISNGSYLNETHFSDDIEQQADNMITEMLQKEYMDRQGKTPLGLVDLFVFSTSFYLITIFLHLVKIPTHRHIVGKPCPKPHRLNHMGICSCGLYKQPGVPVRWKR

SEQ ID NO: 39916 - protein, 490 aa, Artificial Sequence; identical to SEQ ID NO: 39910
  derived and/or modified protein sequence (artificial) from LASV(Pinneo-NIG-1969;Clade I)__AIT17836__GPCmut12

SEQ ID NO: 39917 - protein, 490 aa, Artificial Sequence
  derived and/or modified protein sequence (artificial) from LASV(ISTH0009-NIG-2011;Clade II)__AIT17404__GPCmut12
MGQIITFFQEVPHVIEEVMNIVLIALSLLAILKGIYNVATCGLFGLVSFLLLCGRSCSTTYKGVYELQTLELDMASLNMCMPLSCTKNNSHHYIMVGNETGLELTLTNTSIINHKFCNLSDAHKKNLYDHALMSIISTFHLSIPNFNQYEAMSCDFNGGKISVQYNLSHAYAVDAANHCGTIANGVLQTFMRMAWGGSYIALDSGKGSWDCIMTSYQYLIIQNTTWEDHCQFSRPSPIGYLGLLSQRTRDIYISRRLLGTFTWTLSDSEGNETPGGYCLTRWMLIEAELKCFGNTAVAKCNEKHDEEFCDMLRLFDFCKQAIRRLKTEAQMSIQLINKAVNALINDQLIMKNHLRDIMGIPYCNYSKYCYLNHTVTGKTSLPRCCLVSNGSYLNETHFSDDIEQQADNMITELLQKEYMDRQGKTPLGLVDLFVFSTSFYLISIFLHLIKIPTHRHITGKPCPKPHRLNHMGICSCGLYKHPGVPVKWKR

SEQ ID NO: 39918 - protein, 490 aa, Artificial Sequence
  derived and/or modified protein sequence (artificial) from LASV(ISTH2010-NIG-2012;Clade II)__AIT17482__GPCmut12
MGQIITFFQEVPHVIEEVMNIVLIALSLLAILKGIYNVATCGLFGLVSFLLLCGRSCSTTYKGVYELQTLELDMASLNMCMPLSCTKNNSHHYIMVGNETGLELTLTNTSIINHKFCNLSDAHKKNLYDHALMSIISTFHLSIPNFNQYEAMSCDFNGGKISVQYNLSHAYAVDAANHCGTIANGVLQTFMRMAWGGSYIALDSGKGSWDCIMTSYQYLIIQNITWEDHCQFSRPSPIGYLGLLSQRTRDIYISRRLLGTFTWTLSDSEGNETPGGYCLTRWMLIEAELKCFGNTAVAKCNEKHDEEFCDMLRLFDFCKQAIRRLKTEAQMSIQLINKAVNALINDQLIMKNHLRDIMGIPYCNYSKYCYLNHTVTGKTSLPRCCLVSNGSYLNETHFSDDIEQQADNMITELLQKEYIDRQGKTPLGLVDLFVFSTSFYLISIFLHLVKIPTHRHVVGKPCPKPHRLNHMGICSCGLYKHPGVPVKWKR

SEQ ID NO: 39919 - protein, 490 aa, Artificial Sequence
  derived and/or modified protein sequence (artificial) from LASV(Lassa virus/H.sapiens-wt/NGA/2015/ISTH_0543;Clade II)__AVO03639__GPCmut12
MGQIITFFQEVPHVIEEVMNIVLIALSLLAILKGIYNVATCGLFGLVSFLLLCGRSCSTTYKGVYELQTLELDMANLNMCMPLSCTKNNSHHYIMVGNETGLELTLTNTSIINHKFCNLSDAHKKNLYDHALMSIISTFHLSIPNFNQYEAMSCDFNGGKISVQYNLSHTYAVDAANHCGTIANGVLQTFMRMAWGGSYIALDSGKGSWDCIMTSYQYLVIQNTTWEDHCQFSRPSPIGYLGLLSQRTRDIYISRRLLGTFTWTLSDSEGNETPGGYCLTRWMLIEAELKCFGNTAVAKCNEKHDEEFCDMLRLFDFCKQAIRRLKTEAQMSIQLINKAVNALINDQLIMKNHLRDIMGIPYCNYSKYCYLNHTVTGKTSLPRCCLVSNGSYLNETHFSDDIEQQADNMITELLQKEYIDRQGKTPLGLVDLFVFSTSFYLISIFLHLVKIPTHRHITGKPCPKPHRLNHMGICSCGLYKHPGVPVKWKR

SEQ ID NO: 39920 - protein, 490 aa, Artificial Sequence
  derived and/or modified protein sequence (artificial) from LASV(Lassa virus/H.sapiens-wt/NGA/2016/ISTH_0009;Clade II)__AVO03571__GPCmut12
MGQIITFFQEVPHVIEEVMNIVLIALSLLAILKGIYNVATCGLLGLVSFLLLCGRSCSTTYKGVYELQTLELDMASLNMCMPLSCTKNNSHHYIMVGNETGLELTLTNTSIINHKFCNLSDAHKKNLYDHALMSIISTFHLSIPNFNQYEAMSCDFNGGRISVQYNLSHSYAVDAANHCGTIANGVLQTFMRMAWGGSYIALDSGKGSWDCIMTSYQYLIIQNTTWEDHCQFSRPSPIGYLGLLSQRTRDIYISRRLLGTFTWTLSDSEGNETPGGYCLTRWMLIEAELKCFGNTAVAKCNEKHDEEFCDMLRLFDFCKQAIRRLKTEAQMSIQLINKAVNALINDQLIMKNHLRDIMGIPYCNYSKYCYLNHTVTGKTSLPRCCLVSNGSYLNETHFSDDIEQQADNMITELLQKEYIDRQGKTPLGLVDLFVFSTSFYLISIFLHLVKIPTHRHITGKPCPKPHRLNHMGICSCGLYNHPGVPVKWKR

SEQ ID NO: 39921 - protein, 490 aa, Artificial Sequence
  derived and/or modified protein sequence (artificial) from LASV(Lassa virus/H.sapiens-wt/NGA/2016/ISTH_0017;Clade II)__AVO03567__GPCmut12
MGQIITFFQEVPHVIEEVMNIVLIALSLLAILKGIYNVATCGLFGLVSFLLLCGRSCSTTYKGVYELQTLELDMASLNMCMPLSCTKNNSHHYIMVGNETGLELTLTNTSIINHKFCNLSDAHKKNLYDHALMSIISTFHLSIPNFNQYEAMSCDFNGGKISVQYNLSHTYAIDAANHCGTIANGVLQTFMRMAWGGSYIALDSGKGSWDCIMTSYQYLIIQNTTWEDHCQFSRPSPIGYLGLLSQRTRDIYISRRLLGTFTWTLSDSEGNETPGGYCLTRWMLIEAELKCFGNTAVAKCNEKHDEEFCDMLRLFDFCKQAIRRLKTEAQMSIQLINKAVNALINDQLIMKNHLRDIMGIPYCNYSKYCYLNHTVTGKTSLPRCCLVSNGSYLNETHFSDDIEQQADNMITELLQKEYMDRQGKTPLGLVDLFVFSTSFYLISIFLHLVRIPTHRHVIGKPCPKPHRLNHMGICSCGLYKHPGVPVKWKR

SEQ ID NO: 39922 - protein, 490 aa, Artificial Sequence
  derived and/or modified protein sequence (artificial) from LASV(Lassa virus/H.sapiens-wt/NGA/2018/ISTH_0959;Clade II)__AVV65099__GPCmut12
MGQIITFFQEVPHVIEEVMNIVLIALSLLAILKGIYNVVTCGLFGLVSFLLLCGRSCSTTYKGVYELQTLELDMASLNMCMPLSCTKNNSHHYIMVGNETGLELTLTNTSIINHKFCNLSDAHKKNLYDHALMSIISTFHLSIPNFNQYEAMSCDFNGGKISVQYNLSHAYAIDAANHCGTIANGVLQTFMRMAWGGSYIALDSGKGSWDCIMTSYQYLIIQNTTWEDHCQFSRPSPIGYLGLLSQRTRDIYISRRLLGTFTWTLSDSEGNETPGGYCLTRWMLIEAELKCFGNTAVAKCNEKHDEEFCDMLRLFDFCKQAIRRLKTEAQMSIQLINKAVNALINDQLIMKNHLRDIMGIPYCNYSKYCYLNHTVTGKTSLPRCCLVSNGSYLNETHFSDDIEQQADNMITELLQKEYIDRQGKTPLGLVDLFVFSTSFYLISIFLHLVKIPTHRHVIGKPCPKPHRLNHMGICSCGLYKHPGVPVKWKR

SEQ ID NO: 39923 - protein, 490 aa, Artificial Sequence
  derived and/or modified protein sequence (artificial) from LASV(LASV003-NIG-2008;Clade II)__AIT17580__GPCmut12
MGQIITFFQEVPHVIEEVMNIVLIALSLLAILKGIYNVATCGLFGLVSFLLLCGRSCSTTYKGVYELQTLELDMASLNMCMPLSCTKNNSHHYIMVGNETGLELTLTNTSIINHKFCNLSDAHKKNLYDHALMSIISTFHLSIPNFNQYEAMSCDFNGGKISVQYNLSHTYAVDAANHCGTIANGVLQTFMRMAWGGSYIALDSGKGSWDCIMTSYQYLIIQNTTWEDHCQFSRPSPIGYLGLLSQRTRDIYISRRLLGTFTWTLSDSESNETPGGYCLTRWMLIEAELKCFGNTAVAKCNEKHDEEFCDMLRLFDFCKQAIRRLKAEAQMSIQLINKAVNALINDQLIMKNHLRDIMGIPYCNYSKYCYLNHTVTGRTSLPRCCLVSNGSYLNETHFSDDIEQQADNMITELLQKEYMDRQGKTPLGLVDLFVFSTSFYLISIFLHLVKIPTHRHVIGKPCPKPHRLNHMGICSCGLYKHPGVPVKWKR

SEQ ID NO: 39924 - protein, 490 aa, Artificial Sequence
  derived and/or modified protein sequence (artificial) from LASV(LASV035-NIG-2009;Clade II)__AIT17588__GPCmut12
MGQIITFFQEVPHVIEEVMNIVLIALSLLAILKGIYNVATCGLFGLVSFLLLCGRSCSTTYKGVYELQTLELDMASLNMCMPLSCTKNNSHHYIMVGNETGLELTLTNTSIINHKFCNLSDAHKKNLYDHALMSIISTFHLSIPNFNQYEAMSCDFNGGKISVQYNLSHAYAVDAANHCGTIANGVLQTFMRMAWGGSYIALDSGKGSWDCIMTSYQYLIIQNTTWEDHCQFSRPSPIGYLGLLSQRTRDIYISRRLLGTFTWTLSDSEGNETPGGYCLTRWMLIEAELKCFGNTAVAKCNEKHDEEFCDMLRLFDFCKQAIRRLKAEAQMSIQLINKAVNALINDQLIMKNHLRDIMGIPYCNYSKYCYLNHTVTGKTSLPRCCLVSNGSYLNETHFSDDIEQQADNMITELLQKEYIDRQGKTPLGLVDLFVFSTSFYLISIFLHLVKIPTHRHVIGKPCPKPHRLNHMGICSCGLYKHPGVPVKWKR

SEQ ID NO: 39925 - protein, 490 aa, Artificial Sequence
  derived and/or modified protein sequence (artificial) from LASV(LASV1000-NIG-2009;Clade II)__AIT17782__GPCmut12
MGQIITFFQEVPHVIEEVMNIVLIALSLLAILKGIYNVATCGLFGLVSFLLLCGRSCSTTYKGVYELQTLELDMASLNMCMPLSCTKNNSHHYIMVGNETGLELTLTNTSIINHKFCNLSDAHKKNLYDHALMSIISTFHLSIPNFNQYEAMSCDFNGGKISVQYNLSHTYAVDAANHCGTIANGVLQTFMRMAWGGSYIALDSGKGSWDCIMTSYQYLIIQNTTWEDHCQFSRPSPIGYLGLLSQRTRDIYISRRLLGTFTWTLSDSEGNETPGGYCLTRWMLIEAELKCFGNTAVAKCNEKHDEEFCDMLRLFDFCKQAIKRLKTEAQMSIQLINKAVNALINDQLIMKNHLRDIMGIPYCNYSKYCYLNHTVTGKTSLPRCCLVSNGSYLNETHFSDDIEQQADNMITELLQKEYIDRQGKTPLGLVDLFVFSTSFYLISIFLHLVKIPTHRHVVGKPCPKPHRLNHMGICSCGLYKHPGVPVKWKR

SEQ ID NO: 39926 - protein, 490 aa, Artificial Sequence
  derived and/or modified protein sequence (artificial) from LASV(LASV221-NIG-2010;Clade II)__AIT17624__GPCmut12
MGQIITFFQEVPHVIEEVMNIVLIALSLLAILKGIYNVATCGLFGLVSFLLLCGRSCSTTYKGVYELQTLELDMASLNMCMPLSCTKNNSHHYIMVGNETGLELTLTNTSIINHKFCNLSDAHKKNLYDHALMSIISTFHLSIPNFNQYEAMSCDFNGGKISVQYNLSHTYAIDAANHCGTIANGVLQTFMRMAWGGSYIALDSGKGSWDCIMTSYQYLIIQNTTWEDHCQFSRPSPIGYLGLLSQRTRDIYISRRLLGTFTWTLSDSEGNETPGGYCLTRWMLIEAELKCFGNTAVAKCNEKHDEEFCDMLRLFDFCKQAIRRLKTEAQMSIQLINKAVNALINDQLIMKNHLRDIMGIPYCNYSKYCYLNHTVTGKTSLPRCCLVSNGSYLNETHFSDDIEQQADNMITEMLQKEYMDRQGKTPLGLVDLFVFSTSFYLISIFLHLVKIPTHRHVIGKPCPKPHRLNHMGICSCGLYKHPGVPVKWKR

SEQ ID NO: 39927 - protein, 490 aa, Artificial Sequence
  derived and/or modified protein sequence (artificial) from LASV(LASV237-NIG-2010;Clade II)__AIT17638__GPCmut12
MGQIITFFQEVPHVIEEVMNIVLIALSLLAILKGIYNVATCGLFGLVSFLLLCGRSCSTTYKGVYELQTLELDMASLNMCMPLSCTKNNSHHYIMVGNETGLELTLTNTSIINHKFCNLSDAHKKDLYDHALMSIISTFHLSIPNFNQYEAMSCDFNGGKISVQYNLSHTYAVDAANHCGTIANGVLQTFMRMAWGGSYIALDSGKGSWDCIMTSYQYLIIQNTTWEDHCQFSRPSPIGYLGLLSQRTRDIYISRRLLGTFTWTLSDSEGNETPGGYCLTRWMLIEAELKCFGNTAVAKCNEKHDEEFCDMLRLFDFCKQAIRRLKTEAQMSIQLINKAVNALINDQLIMKNHLRDIMGIPYCNYSKYCYLNHTVTGKTSLPRCCLVSNGSYLNETHFSDDIEQQADNMITELLQKEYMDRQGKTPLGLVDLFVFSTSFYLISIFLHLIKIPTHRHITGKPCPKPHRLNHMGICSCGLYKHPGVPVKWKR

SEQ ID NO: 39928 - protein, 490 aa, Artificial Sequence
  derived and/or modified protein sequence (artificial) from LASV(LASV253-NIG-2011;Clade II)__AIT17670__GPCmut12
MGQIITFFQEVPHVIEEVMNIVLIALSLLAILKGIYNVATCGLFGLVSFLLLCGRSCSTTYKGVYELQTLELDMASLNMCMPLSCTKNNSHHYIMVGNETGLELTLTNTSIINHKFCNLSDAHKKNLYDHALMSIISTFHLSIPNFNQYEAMSCDFNGGKISVQYNLSHTYAVDAANHCGTIANGVLQTFMRMAWGGSYIALDSGKGSWDCIMTSYQYLIIQNTTWEDHCQFSRPSPIGYLGLLSQRTRDIYISRRLLGTFTWTLSDSEGNETPGGYCLTRWMLIEAELKCFGNTAVAKCNEKHDEEFCDMLRLFDFCKQAIRRLKAEAQMSIQLINKAVNALINDQLIMKNHLRDIMGIPYCNYSKYCYLNHTVTGRTSLPRCCLVSNGSYLNETHFSDDIEQQADNMITELLQKEYIDRQGKTPLGLVDLFVFSTSFYLISIFLHLVKIPTHRHIIGKPCPKPHRLNHMGICSCGLYKHPGVPVKWKR

SEQ ID NO: 39929 - protein, 490 aa, Artificial Sequence
  derived and/or modified protein sequence (artificial) from LASV(LASV254-NIG-2011;Clade II)__AIT17674__GPCmut12
MGQIITFFQEVPHVIEEVMNIVLIALSLLAILKGIYNVATCGLFGLVSFLLLCGRSCSTTYKGVYELQTLELDMTNLNMCMPLSCTKNNSHHYIMVGNETGLELTLTNTSIINHKFCNLSDAHKKNLYNHALMSIISTFHLSIPNFNQYEAMSCDFNGGKISVQYNLSHSYAVDAANHCGTIANGVLQTFMRMAWGGSYIALDSGKGNWDCIMTSYQYLIIQNTTWEDHCQFSRPSPIGYLGLLSQRTRDIYISRRLLGTFTWTLSDSEGNETPGGYCLTRWMLIEAELKCFGNTAVAKCNEKHDEEFCDMLRLFDFCKQAIRRLKTEAQANIQLINKAVNALINDQLIMKNHLRDIMGIPYCNYSKYCYLNHTVTGKTSLPRCCLVSNGSYLNETHFSDDIEQQADNMITELLQKEYMDRQGKTPLGLVDLFVFSTSFYLISIFLHLVKIPTHRHVIGKPCPKPHRLNHMGICSCGLYKHPGVPVKWKR

SEQ ID NO: 39930 - protein, 490 aa, Artificial Sequence
  derived and/or modified protein sequence (artificial) from LASV(Nig08-A19;Clade III)__ADU56618__GPCmut12
MGQIVTFFQEVPHVIEEVMNIVLIALSILAILKGLYNIATCGLIGLVTFLLLSGRSCSMTYKGVYELQTLELNMNTLNMCMPLSCTKNNSHHYIMVGNETGLELTLTNTSLLHHKFCNLSDAHKKNLYDHTLMSIISTFHLSIPNFNQYEAMSCDFNGGKITVQYNLSHSYAIDAANHCGTVANGVLQTFMRMAWGGSYIALDSGRGKWDCIMTSYQYLIIQNTTWEDHCQFSRPSPIGYLGLLSQRTRDIYISRRLLGTFTWTLSDSEGNETPGGYCLTRWMLIEAELKCFGNTAVAKCNEKHDEEFCDMLRLFDFCKQAIRRLKAEAQMSIQLINKAVNALINDQLIMKNHLRDIMGIPYCNYSKYCYLNHTSTGRTSLPRCCLVSNGSYLNETHFSDDIEQQADNMITEMLQKEYLDRQGKTPLGLVDLFVFSTSFYLISIFLHLVKIPTHRHIVGKPCPKPHRLNHMGICSCGLYKQPGVPVRWKR

SEQ ID NO: 39931 - protein, 491 aa, Artificial Sequence
  derived and/or modified protein sequence (artificial) from LASV(G1180-SLE-2010;Clade IV)__AIT17168__GPCmut12
MGQIVTFFQEVPHVIEEVMNIVLIALSILAVLKGLYNFATCGLVGLLTFLLLCGRSCTASRYKGVYELQTLELNMETLNMCMPLSCTKNNSHHYIMVGNETGLELTLTNTSIINHKFCNLSDAHKKNLYDHALMSIISTFHLSIPNFNQYEAMSCDFNGGKISVQYNLSHSYAGDAANHCGTVANGVLQTFMRMAWGGSYIALDSGHGSWDCIMTSYQYLIIQNTTWEDHCQFSRPSPIGYLGLLSQRTRDIYISRRLLGTFTWTLSDSEGKDTPGGYCLTRWMLIEAELKCFGNTAVAKCNEKHDEEFCDMLRLFDFCKQAIQRLKAEAQMSIQLINKAVNALINDQLIMKNHLRDIMGIPYCNYSKYCYLNHTTTGKTSLPKCCLVSNGSYLNETHFSDDIEQQADNMITEMLQKEYMERQGKTPLGLVDLFVFSTSFYLISIFLHLVKIPTHRHIVGKSCPKPHRLNHMGICSCGLYKQPGVPVKWKR

SEQ ID NO: 39932 - protein, 491 aa, Artificial Sequence
  derived and/or modified protein sequence (artificial) from LASV(G1442-SLE-2011;Clade IV)__AIT17180__GPCmut12
MGQIVTFFQEVPHVIEEVMNIVLIALSILAVLKGLYNVATCGLIGLVTFLLLCGRSCTTTLYKGVYELQTLELNMETLNMCMPLSCTKNNSHHYIRVGNETGLELTLTNTSIINHKFCNLSDAHKKNLYDHALMSIISTFHLSIPNFNQYEAMSCDFNGGKISVQYNLSHSYAGDAANHCGTVANGVLQTFMRMAWGGSYIALDSGRGNWDCIMTSYQYLIIQNTTWDDHCQFSRPSPIGYLGLLSQRTRDVYISRRLLGTFTWTLSDSEGKDTPGGYCLTRWMLIEAELKCFGNTAVAKCNEKHDEEFCDMLRLFDFCKQAIQRLKAEAQMSIQLINKAVNALINDQLIMKNHLRDIMGIPYCNYSKYCYLNNTATGKTSLPKCCLISNGSYLNETHFSDDIEQEADNMITEMLQKEYMERQGKTPLGLVDLFVFSTSFYLISIFLHLVKIPTHRHIVGKSCPKPHRLNHMGICSCGLYKQPGVPVRWKR

SEQ ID NO: 39933 - protein, 491 aa, Artificial Sequence
  derived and/or modified protein sequence (artificial) from LASV(G3010-SLE-2013;Clade IV)__AIT17344__GPCmut12
MGQIVTFFQEVPHVIEEVMNIVLIALSILAVLKGLYNFATCGLVGLVTFLLLCGRSCTTSLYKGVYELQTLELNMETLNMCMPLSCTKNNSHHYIMVGNETGLELTLTNTSIINHKFCNLSDAHKKNLYNHALMSIISTFHLSIPNFNQYEAMSCDFNGGKISVQYNLSHSYAGDAASHCGTVANGVLQTFMRMAWGGSYIALDSGYGKWDCIMTSYQYLIIQNTTWEDHCQFSRPSPIGYLGLLSQRTRDIYISRRLLGTFTWTLSDSEGKDTPGGYCLTRWMLIEAELKCFGNTAVAKCNEKHDEEFCDMLRLFDFCKQAIQRLKTEAQMSIQLINKAVNALINDQLIMKNHLRDIMGIPYCNYSKYCYLNHTTTGKTSLPKCCLVSNGSYLNETHFSDDIEQQADNMITEMLQKEYMERQGKTPLGLVDLFVFSTSFYLISIFLHLVKIPTHRHIVGKSCPKPHRLNHMGICSCGLYKQPGVPVRWKR

SEQ ID NO: 39934 - protein, 491 aa, Artificial Sequence
  derived and/or modified protein sequence (artificial) from LASV(G502-SLE-2009;Clade IV)__AIT17126__GPCmut12
MGQIVTFFQEVPHVIEEVMNIVLIALSILAVLKGLYNFATCGLVGLLTFLLLCGRSCTTGLYKGVYELQTLELNMETLNMCMPLSCTKNNSHHYIMVGNETGLELTLTNTSIINHKFCNLSDAHKKNLYDHALMSIISTFHLSIPNFNQYEAMSCDFNGGKISVQYNLSHSYAGDAADHCGTVANGVLQTFMRMAWGGSYIALDSGRGRWDCIMTSYQYLIIQNTTWEDHCQFSRPSPIGYLGLLSQRTRDIYISRRLLGTFTWTLSDSEGKDTPGGYCLTRWMLIEAELKCFGNTAVAKCNEKHDEEFCDMLRLFDFCKQAIQRLKAEAQMSIQLINKAVNALINDQLVMKNHLRDIMGIPYCNYSRYCYLNHTTTGRTSLPKCCLVSNGSYLNETHFSDDIEQQADNMITEMLQKEYMERQGKTPLGLVDLFVFSTSFYLISIFLHLVKIPTHRHIVGKSCPKPHRLNHMGICSCGLYKQPGVPVKWKR

SEQ ID NO: 39935 - protein, 491 aa, Artificial Sequence
  derived and/or modified protein sequence (artificial) from LASV(G733-SLE-2010;Clade IV)__AIT17154__GPCmut12
MGQIVTFFQEVPHVIEEVMNIVLIALSILAVLKGLYNFATCGIVGLVSFLLLCGRSCTTSLYKGVYELQTLELNMETLNMCMPLSCTKNNSHHYIMVGNETGLELTLTNTSIINHKFCNLSDAHKKNLYDHALMSIISTFHLSIPNFNQYEAMSCDFNGGKISVQYNLSHSYAGDAANHCGTIANGVLQTFMRMAWGGSYIALDSGRDRWDCIMTSYQYLIIQNTTWEDHCQFSRPSPIGYLGLLSQRTRDIYISRRLLGTFTWTLSDSEGKDTPGGYCLTRWMLIEAELKCFGNTAVAKCNEKHDEEFCDMLRLFDFCKQAIQRLKAEAQMSIQLINKAVNALINDQLIMKNHLRDIMGIPYCNYSKYCYLNHTTTGKTSLPKCCLVSNGSYLNETHFSDDIEQQADNMITEMLQKEYMERQGKTPLGLVDLFVFSTSFYLISIFLHLVKIPTHRHVVGKSCPKPHRLNHMGICSCGLYGQPGVPVKWKR

SEQ ID NO: 39936 - protein, 491 aa, Artificial Sequence
  derived and/or modified protein sequence (artificial) from MOPV/LASV reassortant(IGS-1;Clade IV)__AFY05576__GPCmut12
MGQIVTFFQEVPHVIEEVMNIVLIALSVLAVLKGLYNFATCGLVGLVTFLLLCGRSCTTSLYKGVYELQTLELNMETLNMCMPLSCTKNNSHHYIMVGNETGLELTLTNTSIINHKFCNLSDAHKKNLYDHALMSIISTFHLSIPNFNQYEAMSCDFNGGKISVQYNLSHSYAGDAANHCGTVANGVLQTFMRMAWGGSYIALDSGRGNWDCIMTSYQYLIIQNTTWEDHCQFSRPSPIGYLGLLSQRTRDIYISRRLLGTFTWTLSDSEGEDTPGGYCLTRWMLIEAELKCFGNTAVAKCNEKHDEEFCDMLRLFDFCKQAIQRLKAEAQMSIQLINKAVNALINDQLIMKNHLRDIMGIPYCNYSKYCYLNHTTTGRTSLPKCCLVSNGSYLNETHFSDDIEQQADNMITEMLQKEYMERQGKTPLGLVDLFVFSTSFYLISIFLHLVKIPTHRHIVGKSCPKPHRLNHMGICSCGLYKQPGVPVKWKR

SEQ ID NO: 39937 - protein, 491 aa, Artificial Sequence
  derived and/or modified protein sequence (artificial) from LASV(LM765-SLE-2012;Clade IV)__AIT17814__GPCmut12
MGQIVTFFQEVPHVIEEVMNIVLIALSILAVLKGLYNFATCGLVGLVTFLLLCGRSCTTSLYKGVYELQTLELNMETLNMCMPLSCTKNNSHHYIMVGNETGLELTLTNTSIIDHKFCNLSDAHRKNLYDHALMSIISTFHLSIPNFNQYEAMSCDFNGGKISVQYNLSHSYAKDAADHCGTVANGVLQTFMRMAWGGSYIALDSGRGRWDCIMTSYQYLIIQNTTWEDHCQFSRPSPIGYLGLLSQRTRDIYISRRLLGTFTWTLSDSEGKDTPGGYCLTRWMLIEAELKCFGNTAVAKCNEKHDEEFCDMLRLFDFCKQAIQRLKAEAQMSIQLINKAVNALINDQLIMKNHLRDIMGIPYCNYSKYCYLNHTTTGKTSLPKCCLVSNGSYLNETHFSDDIEQQADNMITEMLQKEYMERQGKTPLGLVDLFVFSTSFYLISIFLHLVKIPTHRHIVGKPCPKPHRLNHMGICSCGLYKQPGVPVKWKR

SEQ ID NO: 39938 - protein, 491 aa, Artificial Sequence
  derived and/or modified protein sequence (artificial) from LASV(LM776-SLE-2012;Clade IV)__AIT17824__GPCmut12
MGQIVTFFQEVPHVIEEVMNIVLIALSILAVLKGLYNFATCGLVGLVTFLLLCGRSCTTSVYKGVYELQTLELNMETLNMCMPLSCTKNNSHHYIMVGNETGLELTLTNTSIINHKFCNLSDAHKKNLYDHALMSIISTFHLSIPNFNQYEAMSCDFNGGKISVQYNLSHSYAGDAANHCGTVANGVLQTFMRMAWGGSYIALDSGHGKWDCIMTSYQYLIIQNTTWEDHCQFSRPSPIGYLGLLSQRTRDIYISRRLLGTFTWTLSDSEGKDTPGGYCLTRWMLIEAELKCFGNTAVAKCNEKHDEEFCDMLRLFDFCKQAIQRLKAEAQMSIQLINKAVNALINDQLIMKNHLRDIMGIPYCNYSKYCYLNHTTTGKTSLPKCCLVSNGSYLNETHFSDDIEQQADNMITEMLQKEYMERQGKTPLGLVDLFVFSTSFYLISIFLHLVKIPTHRHIVGKSCPKPHRLNHMGICSCGLYKQPGVPVRWKR

SEQ ID NO: 39939 - protein, 491 aa, Artificial Sequence
  derived and/or modified protein sequence (artificial) from LASV(Mad39;Clade IV)__ANH09722__GPCmut12
MGQIVTFFQEVPHVIEEVMNIVLIALSILAVLKGLYNVATCGLIGLVTFLLLCGRSCTTTLYKGVYELQALELNMETLNMCMPLSCTKNNSHHYIRVGNETGLELTLTNTSLINHKFCNLSDAHKKNLYDHALMSIISTFHLSIPNFNQYEAMSCDFNDGKISVQYNLSHTYAGDTANHCGTVANGVLQTFMRMAWGGSYIALDSGRGGWDCIMTSYQYLIIQNTTWEDHCQFSRPSPIGYLGLLSQRTRDIYISRRLLGTFTWTLSDSEGKDTPGGYCLTRWMLIEAELKCFGNTAVAKCNEKHDEEFCDMLRLFDFCKQAIQRLKAEAQMSIQLINKAVNALINDQLIMKNHLRDIMGIPYCNYSKYCYLNHTVTGKTSLPKCCLVSNGSYLNETHFSDDIEQQADNMITEMLQKEYMERQGKTPLGLVDLFVFSTSFYLISIFLHLVKIPTHRHVVGKPCPKPHRLNHMGICSCGFYKQPGVPVRWKR

SEQ ID NO: 39940 - protein, 491 aa, Artificial Sequence
  derived and/or modified protein sequence (artificial) from LASV(Z0947-SLE-2011;Clade IV)__AIT17840__GPCmut12
MGQIVTFFQEVPHVIEEVMNIVLIALSILAVLKGLYNFATCGLVGLVTFLLLCGRSCTISLYKGVYELQTLELNMETLNMCMPLSCTKNNSHHYIMVGNETGLELTLTNTSIINHKFCNLSDAHKKNLYDHALMSIISTFHLSIPNFNQYEAMSCDFNGGKISVQYNLSHSYAGDAANHCGTVANGVLQTFMRMAWGGSYIALDSGRDRWDCIMTSYQYLIIQNTTWEDHCQFSRPSPIGYLGLLSQRTRDIYISRRLLGTFTWTLSDSEGKDTPGGYCLTRWMLIEAELKCFGNTAVAKCNEKHDEEFCDMLRLFDFCKQAIQRLKAEAQMSIQLINKAVNALINDQLIMKNHLRDIMGIPYCNYSKYCYLNHTTTGKTSLPKCCLVSNGSYLNETHFSDDIEQQADNMITEMLQKEYMERQGKTPLGLVDLFVFSTSFYLISIFLHLVKIPTHRHIVGKPCPKPHRLNHMGICSCGLYKQPGVPVKWKR

SEQ ID NO: 39941 - RNA, 1476 nt, Artificial Sequence
  derived and/or modified CDS sequence (opt1) from LASV(Josiah;Clade IV)__NP_694870__GPCmut12
augggccagaucgugaccuucuuccaggaggucccccacgugaucgaggaggugaugaacaucguccugaucgcccucagcgugcuggccgugcugaaggggcucuacaacuucgcgaccugcggccuggucgggcuggugacguuccuccugcugugcggccgcuccugcaccaccagccucuacaaggggguguacgagcugcagacccuggagcucaacauggagacgcugaacaugugcaugccgcuguccugcaccaagaacaacagccaccacuacaucauggucggcaacgagaccggccucgagcugacgcugaccaacaccuccaucaucaaccacaaguucugcaaccucagcgacgcccacaagaagaaccuguacgaccacgcccugauguccaucaucagcaccuuccaccucuccauccccaacuucaaccaguacgaggccaugagcugcgacuucaacgggggcaagaucuccgugcaguacaaccugagccacuccuacgccggggacgcggccaaccacugcggcacgguggccaacgggguccugcagaccuucaugcggauggccuggggcggcagcuacaucgcgcucgacuccgggcgcggcaacugggacugcaucaugaccagcuaccaguaccugaucauccagaacaccacgugggaggaccacugccaguucucccggcccagccccaucggguaccugggccuccugucccagcgcacccgggacaucuacaucagccgccggcugcucggcaccuucaccuggacgcugagcgacuccgaggggaaggacaccccgggcggguacugccugacccgcuggaugcucaucgaggccgagcugaagugcuucggcaacaccgccguggccaagugcaacgagaagcacgacgaggaguucugcgacaugcugcggcuguucgacuucugcaagcaggccauccagcgccugaaggcggaggcccagaugagcauccagcugaucaacaaggccgugaacgcccucaucaacgaccagcugaucaugaagaaccaccuccgggacaucauggggauccccuacugcaacuacuccaaguacugcuaccucaaccacacgaccaccggccgcaccagccugcccaagugcugccuggucuccaacggcagcuaccucaacgagacgcacuucuccgacgacaucgagcagcaggccgacaacaugaucaccgagaugcugcagaaggaguacauggagcggcaggggaagacgccccugggccucguggaccuguucguguucagcaccuccuucuaccugaucagcaucuuccugcaccucgucaagaucccgacccaccgccacaucguggggaaguccugccccaagccccaccggcugaaccacaugggcaucugcagcugcgggcuguacaagcagcccggcgugccggucaaguggaagcgcuga

SEQ ID NO: 39942 - RNA, 1473 nt, Artificial Sequence
  derived and/or modified CDS sequence (opt1) from LASV(LP;Clade I)__AAF86701__GPCmut12
augggccagaucaucaccuucuuccaggaggugccccacgucaucgaggaggugaugaacaucgugcugaucgcccucagccugcuggccauccucaaggggcuguacaacaucgcgaccugcggcaucaucgggcuggucgccuuccucuuccugugcggcaaguccugcagccugacgcucaagggcggguacgagcugcagacccuggagcucaacauggagacccugaacaugugcaugccgcuguccugcacgaagaacagcucccaccacuacauccgcgugggcaacgagaccgggcucgagcugacccugaccaacacgagcaucaucaaccacaaguucugcaaccucuccgacgcccacaagaagaaccuguacgaccacgcccugaugagcaucaucuccaccuuccaccucagcauccccaacuucaaccaguacgaggccauguccugcgacuucaacggcgggaagaucagcgugcaguacaaccugucccacagcuacgcgggcgacgccgccgagcacugcgggaccgucgccaacggcgugcugcagaccuucaugcggauggcguggggcgggcgcuacaucgcccucgacuccggcaaggggaacugggacugcaucaugacgagcuaccaguaccugaucauccagaacaccaccugggaggaccacugccaguucucccggcccagccccaucggcuaccugggccuccugucccagcgcacccgggacaucuacaucagccgccggcugcucgggacguucaccuggacccugagcgacuccgagggcaacgagacccccgggggcuacugccugacgcgcuggaugcucaucgaggccgagcugaagugcuucgggaacaccgccguggccaagugcaacgagaagcacgacgaggaguucugcgacaugcugcggcuguucgacuucugcaagcaggcgauccgccggcugaaggccgaggcccagaugagcauccagcugaucaacaaggccgucaacgcccucaucaacgaccagcugaucaugaagaaccaccuccgcgacaucaugggcauccccuacugcaacuacuccaaguacugcuaccucaaccacaccagcuccggccggaccagccugcccaagugcugccugaucuccaacgggagcuaccucaacgagacgcaguucuccgacgacaucgagcagcaggcggacaacaugaucaccgagaugcugcagaaggaguacaucgagcgccagggcaagaccccgcuggggcucguggacaucuucaucuucagcaccuccuucuaccugaucagcaucuuccugcaccugaucaagaucccgacgcaccggcacaucgugggcaagcccugccccaagccccaccgccucaaccacaugggggucugcuccugcggccuguacaagcacccgggcgugcccaccaaguggaagcgguga

SEQ ID NO: 39943 - RNA, 1473 nt, Artificial Sequence
  derived and/or modified CDS sequence (opt1) from LASV(803213;Clade II)__AAF86703__GPCmut12
augggccagaucaucaccuucuuccaggaggugccccacgucaucgaggaggugaugaacaucgugcugaucgcccucagccugcuggccauccucaaggggaucuacaacgucgcgaccugcggccuguucgggcugaucuccuuccuccugcugugcggccgcagcugcuccgugacguacaaggggguguacgagcuccagacccuggagcugaacauggccaaccucaacaugugcaugccgcugagcugcaccaagaacaacucccaccacuacaucauggucggcaacgagacgggccuggagcucacccugaccaacaccagcaucaucaaccacaaguucugcaaccuguccgacgcccacaagaagaaccucuacgaccacgcccugaugagcaucaucuccacguuccaccugagcauccccaacuucaaccaguacgaggccauguccugcgacuucaacgggggcaagaucagcgugcaguacaaccucucccacagcuucgcgguggacgccgccaaccacugcgggaccaucgccaacggcguccugcagaccuucaugcggauggcguggggcggguccuacaucgcccuggacagcggcaaggggaacugggacugcaucaugaccuccuaccaguaccucaucauccagaacacgaccugggaggaccacugccaguucagccgccccucccccaucggcuaccuggggcugcucagccagcggacccgcgacaucuacaucagccggcgccugcugggcaccuucacguggacccucuccgacagcgagggcaacgaggcccccgggggcuacugccugacccgguggaugcugaucgaggccgagcucaagugcuucgggaacaccgccguggcgaagugcaacgagaagcacgacgaggaguucugcgacaugcugcgccuguucgacuucugcaagcaggccaucaagcggcucaagacggaggcccagauguccauccagcugaucaacaaggccgugaacgcccugaucaacgaccagcucaucaugaagaaccaccuccgcgacaucaugggcauccccuacugcaacuacagccgguacugcuaccugaaccacaccgucaccgggaagaccucccugccccgcugcugccuggugagcaacggcuccuaccugaacgagacgcacuucagcgacgacaucgagcagcaggcggacaacaugaucaccgagaugcuccagaaggaguacauggaccggcagggcaagaccccgcuggggcugguggaccucuucgucuucuccaccagcuucuaccugaucuccaucuuccugcaccuggugaagaucccgacgcaccgccacaucgugggcaagcccugccccaagccccaccggcucaaccacauggggaucugcagcugcggccuguacaagcacccggggguccccgugaaguggaagcgcuga

SEQ ID NO: 39944 - RNA, 1473 nt, Artificial Sequence
  derived and/or modified CDS sequence (opt1) from LASV(GA391;Clade III)__CAA36645__GPCmut12
augggccagaucgugaccuucuuccaggaggucccccacgugaucgaggaggugaugaacaucguccugaucgcccucagcauccuggccauccugaaggggcucuacaacguggcgaccugcggccugaucgggcuggugacguuccuccugcuguccggccgcagcugcucccucaucuacaaggggaccuacgagcugcagacccuggagcucaacauggagacccugaacaugugcaugccgcugagcugcaccaagaacaacucccaccacuacauccgggucggcaacgagaccggccucgagcugacccugacgaacaccagcauccucaaccacaaguucugcaaccuguccgacgcccacaagcgcaaccuguacgaccacagccucauguccaucaucagcaccuuccaccuguccauccccaacuucaaccaguacgaggccaugagcugcgacuucaacgggggcaagaucaccgugcaguacaaccugucccacagcuucgccguggacgccgcggggcacugcggcacgcucgccaacgggguccugcagaccuucaugcggauggccuggggcggcuccuacaucgcccuggacagcgggcgcggcaacugggacugcaucaugaccuccuaccaguaccucaucauccagaacaccacgugggacgaccacugccaguucagccggcccucccccaucggguaccugggccugcucagccagcgcacccgggacaucuacaucagccgccggcugcugggcaccuucaccuggacgcucuccgacagcgaggggaacgagaccccgggcggguacugccugacccgcuggaugcugaucgaggcggagcucaagugcuucggcaacaccgccguggccaagugcaacgagaagcacgacgaggaguucugcgacaugcugcggcuguucgacuucugcaagcaggccauccgccggcucaagacggaggcccagauguccauccagcugaucaacaaggcggugaacgcccugaucaacgaccagcucaucaugaagaaccaccuccgcgacaucauggggauccccuacugcaacuacagccgguacugcuaccugaaccacaccuccaccggcaagaccagccugccccgcugcugccugaucuccaacggcagcuaccugaacgagacgaaguucuccgacgacaucgagcagcaggccgacaacaugaucaccgagaugcuccagaaggaguacaucgaccggcaggggaagacgccccugggccuggucgaccuguucguguucagcaccuccuucuaccucaucagcaucuuccugcaccuggugaagaucccgacccaccgccacaucgucgggaagcccugccccaagccccaccggcucaaccacaugggcaucugcuccugcgggcuguacaagcagccgggcgugcccgugcgcuggaagcgguga

SEQ ID NO: 39945 - RNA, 1476 nt, Artificial Sequence
  derived and/or modified CDS sequence (opt1) from LASV(AV;Clade V)__CCA30314__GPCmut12
augggccagaucgugaccuucuuccaggaggucccccacgugaucgaggaggugaugaacaucguccugaucgcccucagcauccuggccgugcugaaggggcucuacaacaucgcgaccugcggccugaucgggcugaucacguuccuccugcugugcggccgcuccugcagcuccaaccucuacaaggggguguacgagcugcagagccuggaccucaacauggagacccugaacaugugcaugccgcuguccugcaccaagaacaacagccaccacuacauccgggucggcaacgacacgggccucgagcugacccugaccaacaccuccauccucaaccacaaguucugcaaccugagcgacgcccacaagaaggaccuguacgaccacgcccucauguccaucaucagcacguuccaccuguccauccccaacuucaaccaguacgaggccaugagcugcgacuucaacgggggcaagaucuccgugcaguacaaccugagccacuccuacgccaucgacgcggccaaccacugcgggaccguggccaacggcauccuccagaccuucaugcgcauggccuggggcgggagcuacaucgcgcuggacuccggccgggggaacugggacugcaucaugaccagcuaccaguaccugaucauccagaacacgaccugggagaaccacugccaguucucccgccccagccccaucggcuaccucgggcugcugagccagcggacccgcgacaucuacaucucccggcgccuccugggcaccuucacguggacccugagcgacuccgagggcaacgccacccccgggggcuacugccucacccgguggaugcugaucgaggccgagcugaagugcuucgggaacacggccgucgccaagugcaacgagaagcacgacgaggaguucugcgacaugcuccgccuguucgacuucugcaagcaggcgaucagccggcugaaguccgaggcccagaugagcauccagcucaucaacaaggccgugaacgcccugaucaacgaccagcugaucaugaagaaccaccuccgcgacaucaugggcauccccuacugcaacuacuccaaguacugcuaccugaaccacaccaucaccgggaagaccagccugcccaagugcugccucguguccaacggcagcuaccugaacgagacgcacuucuccgacgacaucgagcagcaggccgacaacaugaucaccgagaugcugcagaaggaguacauggagcggcagggcaagaccccgcucgggcuggucgaccuguucguguucagcaccuccuucuaccugaucagcaucuuccuccgccuggugaagaucccgacgcaccggcacaucgucggcaagcccugccccaagccccaccgccugaaccacauggggaucugcuccugcggccucuacaagcagccgggggugcccgugcgguggaagcgcuga

SEQ ID NO: 39946 - RNA, 1473 nt, Artificial Sequence
  derived and/or modified CDS sequence (opt1) from LASV(Togo/2016/7082;Clade VI)__AMR44577__GPCmut12
augggccagaucaucaccuucuuccaggaggugccccacgucaucgaggaggugaugaacaucgugcugaucgcccucagccugcuggccauccucaagggggucuacaacguggcgaccugcggcaucaucgggcuggugacguuccuguuccucugcggccgcuccugcagccugaucuacaagggguccuacgagcugcagacccucgagcugaacauggagacccugaacaugugcaugccgcucagcugcacgaagaacuccagccaccacuacauccgggucggcaacgagaccggccuggagcugacccucaccaacacguccaucaucaaccacaaguucugcaaccugagcgacgcccacaagcgcaaccuguacgaccacgcccucauguccauccugagcaccuuccaccuguccauccccaacuucaaccaguacgaggccaugagcugcgacuucaacgggggcaagaucuccgugcaguacaaccucagccacgccuacgcgguggacgccgccgagcacugcgggaccgucgccaacggcgugcugcagaccuucaugcggauggcguggggcggguccuacaucgcccuggacagcggccgcgggaacugggacugcaucaugacguccuaccaguaccucaucauccagaacaccaccugggaggaccacugccaguucagccggcccucccccaucggcuaccuggggcugcucagccagcgcacccgggacaucuacaucagccgccggcugcugggcacguucaccuggacccucuccgacagcgagggcaacgagacccccgggggcuacugccugacgcgcuggaugcugaucgaggccgagcucaagugcuucgggaacaccgccguggccaagugcaacgagaagcacgacgaggaguucugcgacaugcugcggcuguucgacuucugcaagcaggcgauccagcgccucaaguccgaggcccagaugagcauccagcugaucaacaaggccgucaacgcccugaucaacgaccagcucaucaugaagaaccaccuccgggacaugaugggcauccccuacugcaacuacuccaaguacugcuaccugaaccacaccagcuccgggcgcaccagccugcccaagugcugccugguguccaacggcagcuaccugaacgagacgcacuucuccgacgacaucgagcagcaggccgacaacaugaucaccgagaugcuccagaaggaguacaucgaccggcagggcaagaccccgcuggggcugguggaccucuucgucuucagcaccuccuucuaccugaucagcaucuuccugcaccugaucaagaucccgacgcaccgccacaucgugggcaagcccugccccaagccccaccggcucaaccacauggggaucugcuccugcggccuguacaagcagccgggggugcccacccgcuggaagcgguga

SEQ ID NO: 39947 - RNA, 1473 nt, Artificial Sequence
  derived and/or modified CDS sequence (opt1) from LASV(KAK-428;Clade n.d. (VII))__ANH09740__GPCmut12
augggccagaucgugaccuucuuccaggaggucccccacgugaucgaggaggugaugaacaucguccugaucgcccucagccugcuggccauccucaaggggcuguacaacuucgcgaccugcggcgugaucgggcugaucacguuccuccugcugugcggccgcuccugcagcgccaccuacaaggggcaguacgagcuccagacccuggagcugaacauggagucccucaacaugugcaugccgcugagcugcacgaagaacaacucccaccacuacauccgggccggcaacaacaccggccuggagcucacccugaccaacacgagcaucaucucccacaaguucugcaaccugagcgacgcccacaagaagaaccucuacgaccacacccugauguccaucaucaccaccuuccaccugagcauccccaacuucaaccaguacgaggccauguccugcgacuucaacgggggcaagaucagcauccaguacaaccucucccacagcuacgcgggggacgccgcccagcacugcggcacgguggccaacgggguccugcagaccuucaugcgcauggcguggggcggcuccuaccuggcccucgacagcgggcggcgcggcugggacugcaucaucuccagcuaccaguaccugaucauccagaacaccaccugggacgaccacugccaguucucccggcccagccccaucggguaccugggcuucgugagccagaagacgcgcgacaucuacaucucccggcgccuccugggcaccuucaccuggacccugagcgacuccgaggggcacgacaugccgggcggguacugccucacgcgguggaugcugaucgaggccgaccugaagugcuucggcaacaccgccguggccaagugcaacgagaagcacgacgaggaguucugcgacauguggcgccucuucgacuucugcaagcaggcgauccagcggcugaaggccgaggcccagaugaacauccagcugaucaacaaggccgucaacgcccucaucaacgaccagcugaugaugaagaaccaccuccgcgacaucauggggauccccuacugcaacuacagcaaguucugcuaccugaacaacaccaccacgggccggaccucccugccccgcugcugccugaucagcaacggcuccuaccucaacgagacccacuucagcgacgacaucgagcagcaggcggacaacaugaucaccgagaugcugcagaaggaguacauggaccggcaggggaagacgccccugggccucguggaccuguucguguucuccaccagcuucuaccugaucaccaucuuccuccaccuggucaagaucccgacccaccgccacaucguggggaagcccugccccaagccccaccggcugaaccacaugggcaucugcuccugcgggcuguacaagcagccgggcgugcccguccgcuggaagcgguga

SEQ ID NO: 39948 - RNA, 1473 nt, Artificial Sequence; identical to SEQ ID NO: 39942
  derived and/or modified CDS sequence (opt1) from LASV(Pinneo-NIG-1969;Clade I)__AIT17836__GPCmut12

SEQ ID NO: 39949 - RNA, 1473 nt, Artificial Sequence
  derived and/or modified CDS sequence (opt1) from LASV(ISTH0009-NIG-2011;Clade II)__AIT17404__GPCmut12
augggccagaucaucaccuucuuccaggaggugccccacgucaucgaggaggugaugaacaucgugcugaucgcccucagccugcuggccauccucaaggggaucuacaacgucgcgaccugcggccuguucgggcugguguccuuccuccugcugugcggccgcagcugcuccacgaccuacaaggggguguacgagcuccagacccuggagcuggacauggccagccucaacaugugcaugccgcuguccugcacgaagaacaacagccaccacuacaucauggucggcaacgagaccggccuggagcucacccugaccaacacguccaucaucaaccacaaguucugcaaccugagcgacgcccacaagaagaaccucuacgaccacgcccugauguccaucaucagcaccuuccaccuguccauccccaacuucaaccaguacgaggccaugagcugcgacuucaacgggggcaagaucuccgugcaguacaaccucagccacgcguacgccguggacgccgccaaccacugcgggaccaucgcgaacggcguccugcagaccuucaugcggauggccuggggcggguccuacaucgcccuggacagcggcaagggguccugggacugcaucaugacgagcuaccaguaccucaucauccagaacaccaccugggaggaccacugccaguucucccgccccagccccaucggcuaccuggggcugcucagccagcggacccgcgacaucuacaucucccggcgccugcugggcacguucaccuggacccucagcgacuccgagggcaacgagacccccgggggcuacugccugacgcgguggaugcugaucgaggccgagcucaagugcuucgggaacaccgccguggcgaagugcaacgagaagcacgacgaggaguucugcgacaugcugcgccuguucgacuucugcaagcaggccauccggcgccucaagaccgaggcccagaugagcauccagcugaucaacaaggccgugaacgcccugaucaacgaccagcucaucaugaagaaccaccuccgggacaucaugggcaucccguacugcaacuacuccaaguacugcuaccugaaccacaccgucacggggaagaccagccugccccgcugcugccugguguccaacggcagcuaccugaacgagacccacuucuccgacgacaucgagcagcaggcggacaacaugaucaccgagcuccugcagaaggaguacauggaccggcagggcaagacgccccuggggcucguggaccuguucgucuucagcaccuccuucuaccugaucagcaucuuccugcaccucaucaagaucccgacccaccgccacaucaccggcaagcccugccccaagccccaccggcugaaccacauggggaucugcuccugcggccuguacaagcacccgggggugcccgugaaguggaagcgcuga

SEQ ID NO: 39950 - RNA, 1473 nt, Artificial Sequence
  derived and/or modified CDS sequence (opt1) from LASV(ISTH2010-NIG-2012;Clade II)__AIT17482__GPCmut12
augggccagaucaucaccuucuuccaggaggugccccacgucaucgaggaggugaugaacaucgugcugaucgcccucagccugcuggccauccucaaggggaucuacaacgucgcgaccugcggccuguucgggcugguguccuuccuccugcugugcggccgcagcugcuccacgaccuacaaggggguguacgagcuccagacccuggagcuggacauggccagccucaacaugugcaugccgcuguccugcacgaagaacaacagccaccacuacaucauggucggcaacgagaccggccuggagcucacccugaccaacacguccaucaucaaccacaaguucugcaaccugagcgacgcccacaagaagaaccucuacgaccacgcccugauguccaucaucagcaccuuccaccuguccauccccaacuucaaccaguacgaggccaugagcugcgacuucaacgggggcaagaucuccgugcaguacaaccucagccacgcguacgccguggacgccgccaaccacugcgggaccaucgcgaacggcguccugcagaccuucaugcggauggccuggggcggguccuacaucgcccuggacagcggcaagggguccugggacugcaucaugacgagcuaccaguaccucaucauccagaacaucaccugggaggaccacugccaguucucccgccccagccccaucggcuaccuggggcugcucagccagcggacccgcgacaucuacaucucccggcgccugcugggcaccuucacguggacccucagcgacuccgagggcaacgagacccccgggggcuacugccugacccgguggaugcugaucgaggccgagcucaagugcuucgggaacacggccguggcgaagugcaacgagaagcacgacgaggaguucugcgacaugcugcgccuguucgacuucugcaagcaggccauccggcgccucaagaccgaggcccagaugagcauccagcugaucaacaaggccgugaacgcccugaucaacgaccagcucaucaugaagaaccaccuccgggacaucaugggcauccccuacugcaacuacuccaaguacugcuaccugaaccacaccgucaccgggaagacgagccugccccgcugcugccugguguccaacggcagcuaccugaacgagacccacuucuccgacgacaucgagcagcaggcggacaacaugaucaccgagcuccugcagaaggaguacaucgaccggcagggcaagaccccgcuggggcucguggaccuguucgucuucagcacguccuucuaccugaucagcaucuuccugcaccucgugaagaucccgacccaccgccacguggucggcaagcccugccccaagccccaccggcugaaccacauggggaucugcuccugcggccuguacaagcacccgggggugcccgugaaguggaagcgcuga

SEQ ID NO: 39951 - RNA, 1473 nt, Artificial Sequence
  derived and/or modified CDS sequence (opt1) from LASV(Lassa virus/H.sapiens-wt/NGA/2015/ISTH_0543;Clade II)__AVO03639__GPCmut12
augggccagaucaucaccuucuuccaggaggugccccacgucaucgaggaggugaugaacaucgugcugaucgcccucagccugcuggccauccucaaggggaucuacaacgucgcgaccugcggccuguucgggcugguguccuuccuccugcugugcggccgcagcugcuccacgaccuacaaggggguguacgagcuccagacccuggagcuggacauggccaaccucaacaugugcaugccgcugagcugcacgaagaacaacucccaccacuacaucauggucggcaacgagaccggccuggagcucacccugaccaacacgagcaucaucaaccacaaguucugcaaccuguccgacgcccacaagaagaaccucuacgaccacgcccugaugagcaucaucuccaccuuccaccugagcauccccaacuucaaccaguacgaggccauguccugcgacuucaacgggggcaagaucagcgugcaguacaaccucucccacaccuacgcgguggacgccgccaaccacugcgggaccaucgccaacggcguccugcagacguucaugcggauggcguggggcgggagcuacaucgcccuggacuccggcaaggggagcugggacugcaucaugaccuccuaccaguaccucgugauccagaacaccaccugggaggaccacugccaguucagccgccccucccccaucggcuaccuggggcugcucagccagcggacgcgcgacaucuacaucagccggcgccugcugggcaccuucaccuggacccucuccgacagcgagggcaacgagacgcccgggggcuacugccugacccgguggaugcugaucgaggccgagcucaagugcuucgggaacaccgccguggccaagugcaacgagaagcacgacgaggaguucugcgacaugcugcgccuguucgacuucugcaagcaggcgauccggcgccucaagaccgaggcccagauguccauccagcugaucaacaaggccgucaacgcccugaucaacgaccagcucaucaugaagaaccaccuccgggacaucaugggcauccccuacugcaacuacagcaaguacugcuaccugaaccacacggugaccgggaagaccucccugccccgcugcugccuggugagcaacggcuccuaccugaacgagacccacuucagcgacgacaucgagcagcaggccgacaacaugaucacggagcuccugcagaaggaguacaucgaccggcagggcaagaccccgcuggggcucgucgaccuguucguguucuccaccagcuucuaccugaucuccaucuuccugcaccucgugaagaucccgacccaccgccacaucacgggcaagcccugccccaagccccaccggcugaaccacauggggaucugcagcugcggccuguacaagcacccggggguccccgugaaguggaagcgcuga

SEQ ID NO: 39952 - RNA, 1473 nt, Artificial Sequence
  derived and/or modified CDS sequence (opt1) from LASV(Lassa virus/H.sapiens-wt/NGA/2016/ISTH_0009;Clade II)__AVO03571__GPCmut12
augggccagaucaucaccuucuuccaggaggugccccacgucaucgaggaggugaugaacaucgugcugaucgcccucagccugcuggccauccucaaggggaucuacaacgucgcgaccugcggccugcuggggcucguguccuuccugcugcucugcggccgcagcugcuccacgaccuacaaggggguguacgagcugcagacccuggagcucgacauggccagccugaacaugugcaugccgcuguccugcacgaagaacaacagccaccacuacaucauggucggcaacgagaccggccucgagcugacccugaccaacacguccaucaucaaccacaaguucugcaaccucagcgacgcccacaagaagaaccuguacgaccacgcccugauguccaucaucagcaccuuccaccucuccauccccaacuucaaccaguacgaggccaugagcugcgacuucaacgggggccggaucuccgugcaguacaaccugagccacuccuacgcgguggacgccgccaaccacugcgggaccaucgccaacggcguccugcagaccuucaugcgcauggcguggggcgggagcuacaucgcccucgacuccggcaaggggagcugggacugcaucaugacguccuaccaguaccugaucauccagaacaccaccugggaggaccacugccaguucagccggcccagccccaucggcuaccuggggcuccugucccagcgcacccgggacaucuacaucagccgccggcugcucggcacguucaccuggacccuguccgacagcgagggcaacgagacccccgggggcuacugccugacgcgcuggaugcucaucgaggccgagcugaagugcuucgggaacaccgccguggccaagugcaacgagaagcacgacgaggaguucugcgacaugcugcggcuguucgacuucugcaagcaggcgauccgccggcugaagaccgaggcccagauguccauccagcugaucaacaaggccgugaacgcccucaucaacgaccagcugaucaugaagaaccaccuccgcgacaucaugggcaucccguacugcaacuacagcaaguacugcuaccucaaccacaccgucacggggaagaccucccugccccggugcugccuggugagcaacggcuccuaccucaacgagacccacuucagcgacgacaucgagcagcaggccgacaacaugaucaccgagcugcugcagaaggaguacaucgaccgccagggcaagacgccccucgggcugguggaccuguucgucuucuccaccagcuucuaccugaucuccaucuuccuccaccuggugaagaucccgacccaccggcacaucaccggcaagcccugccccaagccccaccgccugaaccacauggggaucugcagcugcggccucuacaaccacccgggggugcccgucaaguggaagcgguga

SEQ ID NO: 39953 - RNA, 1473 nt, Artificial Sequence
  derived and/or modified CDS sequence (opt1) from LASV(Lassa virus/H.sapiens-wt/NGA/2016/ISTH_0017;Clade II)__AVO03567__GPCmut12
augggccagaucaucaccuucuuccaggaggugccccacgucaucgaggaggugaugaacaucgugcugaucgcccucagccugcuggccauccucaaggggaucuacaacgucgcgaccugcggccuguucgggcugguguccuuccuccugcugugcggccgcagcugcuccacgaccuacaaggggguguacgagcuccagacccuggagcuggacauggccagccucaacaugugcaugccgcuguccugcacgaagaacaacagccaccacuacaucauggucggcaacgagaccggccuggagcucacccugaccaacacguccaucaucaaccacaaguucugcaaccugagcgacgcccacaagaagaaccucuacgaccacgcccugauguccaucaucagcaccuuccaccuguccauccccaacuucaaccaguacgaggccaugagcugcgacuucaacgggggcaagaucuccgugcaguacaaccucagccacaccuacgcgaucgacgccgccaaccacugcgggaccaucgccaacggcgugcugcagacguucaugcggauggcguggggcggguccuacaucgcccuggacagcggcaagggguccugggacugcaucaugaccagcuaccaguaccucaucauccagaacaccaccugggaggaccacugccaguucucccgccccagccccaucggcuaccuggggcugcucagccagcggacgcgcgacaucuacaucucccggcgccugcugggcaccuucaccuggacccucagcgacuccgagggcaacgagacgcccgggggcuacugccugacccgguggaugcugaucgaggccgagcucaagugcuucgggaacaccgccgucgccaagugcaacgagaagcacgacgaggaguucugcgacaugcugcgccuguucgacuucugcaagcaggcgauccggcgccucaagaccgaggcccagaugagcauccagcugaucaacaaggccgugaacgcccugaucaacgaccagcucaucaugaagaaccaccuccgggacaucaugggcauccccuacugcaacuacuccaaguacugcuaccugaaccacacggugaccgggaagaccagccugccccgcugcugccuggucuccaacggcagcuaccugaacgagacccacuucuccgacgacaucgagcagcaggccgacaacaugaucacggagcuccugcagaaggaguacauggaccggcagggcaagaccccgcuggggcucguggaccuguucguguucagcaccuccuucuaccugaucagcaucuuccugcaccucguccgcaucccgacccaccggcacgugaucggcaagcccugccccaagccccaccgccugaaccacauggggaucugcuccugcggccuguacaagcacccgggggugcccgucaaguggaagcgguga

SEQ ID NO: 39954 - RNA, 1473 nt, Artificial Sequence
  derived and/or modified CDS sequence (opt1) from LASV(Lassa virus/H.sapiens-wt/NGA/2018/ISTH_0959;Clade II)__AVV65099__GPCmut12
augggccagaucaucaccuucuuccaggaggugccccacgucaucgaggaggugaugaacaucgugcugaucgcccucagccugcuggccauccucaaggggaucuacaacgucgugaccugcggccuguucgggcugguguccuuccuccugcugugcggccgcagcugcuccacgaccuacaagggggucuacgagcuccagacccuggagcuggacauggcgagccucaacaugugcaugccgcuguccugcacgaagaacaacagccaccacuacaucauggugggcaacgagaccggccuggagcucacccugaccaacacguccaucaucaaccacaaguucugcaaccugagcgacgcccacaagaagaaccucuacgaccacgcccugauguccaucaucagcaccuuccaccuguccauccccaacuucaaccaguacgaggccaugagcugcgacuucaacgggggcaagaucuccgugcaguacaaccucagccacgccuacgcgaucgacgccgccaaccacugcgggaccaucgccaacggcguccugcagaccuucaugcggauggcguggggcggguccuacaucgcccuggacagcggcaagggguccugggacugcaucaugacgagcuaccaguaccucaucauccagaacaccaccugggaggaccacugccaguucucccgccccagccccaucggcuaccuggggcugcucagccagcggacccgcgacaucuacaucucccggcgccugcugggcacguucaccuggacccucagcgacuccgagggcaacgagacccccgggggcuacugccugacgcgguggaugcugaucgaggccgagcucaagugcuucgggaacaccgccguggccaagugcaacgagaagcacgacgaggaguucugcgacaugcugcgccuguucgacuucugcaagcaggcgauccggcgccucaagaccgaggcccagaugagcauccagcugaucaacaaggccgugaacgcccugaucaacgaccagcucaucaugaagaaccaccuccgggacaucaugggcaucccguacugcaacuacuccaaguacugcuaccugaaccacaccgucacggggaagaccagccugccccgcugcugccugguguccaacggcagcuaccugaacgagacccacuucuccgacgacaucgagcagcaggccgacaacaugaucaccgagcuccugcagaaggaguacaucgaccggcagggcaagacgccccuggggcucguggaccuguucgucuucagcaccuccuucuaccugaucagcaucuuccugcaccucgugaagaucccgacccaccgccacgugaucggcaagcccugccccaagccccaccggcugaaccacauggggaucugcuccugcggccuguacaagcacccggggguccccgugaaguggaagcgcuga

SEQ ID NO: 39955 - RNA, 1473 nt, Artificial Sequence
  derived and/or modified CDS sequence (opt1) from LASV(LASV003-NIG-2008;Clade II)__AIT17580__GPCmut12
augggccagaucaucaccuucuuccaggaggugccccacgucaucgaggaggugaugaacaucgugcugaucgcccucagccugcuggccauccucaaggggaucuacaacgucgcgaccugcggccuguucgggcugguguccuuccuccugcugugcggccgcagcugcuccacgaccuacaaggggguguacgagcuccagacccuggagcuggacauggccagccucaacaugugcaugccgcuguccugcacgaagaacaacagccaccacuacaucauggucggcaacgagaccggccuggagcucacccugaccaacacguccaucaucaaccacaaguucugcaaccugagcgacgcccacaagaagaaccucuacgaccacgcccugauguccaucaucagcaccuuccaccuguccauccccaacuucaaccaguacgaggccaugagcugcgacuucaacgggggcaagaucuccgugcaguacaaccucagccacaccuacgcgguggacgccgccaaccacugcgggaccaucgccaacggcguccugcagacguucaugcggauggcguggggcggguccuacaucgcccuggacagcggcaagggguccugggacugcaucaugaccagcuaccaguaccucaucauccagaacaccaccugggaggaccacugccaguucucccgccccagccccaucggcuaccuggggcugcucagccagcggacgcgcgacaucuacaucucccggcgccugcugggcaccuucaccuggacccucagcgacuccgagagcaacgagacgccgggcggguacugccugacccgguggaugcugaucgaggccgagcucaagugcuucggcaacaccgccguggccaagugcaacgagaagcacgacgaggaguucugcgacaugcugcgccuguucgacuucugcaagcaggcgauccggcgccucaaggccgaggcccagauguccauccagcugaucaacaaggccgugaacgcccugaucaacgaccagcucaucaugaagaaccaccuccgggacaucauggggauccccuacugcaacuacagcaaguacugcuaccugaaccacaccgucacgggccgcaccucccugccccggugcugccuggugagcaacggguccuaccugaacgagacccacuucagcgacgacaucgagcagcaggcggacaacaugaucaccgagcuccugcagaaggaguacauggaccgccagggcaagacgccccugggccucguggaccuguucgucuucuccaccagcuucuaccugaucuccaucuuccugcaccucgugaagaucccgacccaccggcacgugaucgggaagcccugccccaagccccaccgccugaaccacaugggcaucugcagcugcgggcuguacaagcacccgggcguccccgugaaguggaagcgguga

SEQ ID NO: 39956 - RNA, 1473 nt, Artificial Sequence
  derived and/or modified CDS sequence (opt1) from LASV(LASV035-NIG-2009;Clade II)__AIT17588__GPCmut12
augggccagaucaucaccuucuuccaggaggugccccacgucaucgaggaggugaugaacaucgugcugaucgcccucagccugcuggccauccucaaggggaucuacaacgucgcgaccugcggccuguucgggcugguguccuuccuccugcugugcggccgcagcugcuccacgaccuacaaggggguguacgagcuccagacccuggagcuggacauggccagccucaacaugugcaugccgcuguccugcacgaagaacaacagccaccacuacaucauggucggcaacgagaccggccuggagcucacccugaccaacacguccaucaucaaccacaaguucugcaaccugagcgacgcccacaagaagaaccucuacgaccacgcccugauguccaucaucagcaccuuccaccuguccauccccaacuucaaccaguacgaggccaugagcugcgacuucaacgggggcaagaucuccgugcaguacaaccucagccacgcguacgccguggacgccgccaaccacugcgggaccaucgcgaacggcguccugcagaccuucaugcggauggccuggggcggguccuacaucgcccuggacagcggcaagggguccugggacugcaucaugacgagcuaccaguaccucaucauccagaacaccaccugggaggaccacugccaguucucccgccccagccccaucggcuaccuggggcugcucagccagcggacccgcgacaucuacaucucccggcgccugcugggcacguucaccuggacccucagcgacuccgagggcaacgagacccccgggggcuacugccugacgcgguggaugcugaucgaggccgagcucaagugcuucgggaacaccgccguggcgaagugcaacgagaagcacgacgaggaguucugcgacaugcugcgccuguucgacuucugcaagcaggccauccggcgccucaaggccgaggcccagaugagcauccagcugaucaacaaggccgugaacgcgcugaucaacgaccagcucaucaugaagaaccaccuccgggacaucaugggcauccccuacugcaacuacuccaaguacugcuaccugaaccacaccgucaccgggaagacgagccugccccgcugcugccugguguccaacggcagcuaccugaacgagacccacuucuccgacgacaucgagcagcaggccgacaacaugaucaccgagcuccugcagaaggaguacaucgaccggcagggcaagaccccgcuggggcucguggaccuguucgucuucagcacguccuucuaccugaucagcaucuuccugcaccucgugaagaucccgacccaccgccacgugaucggcaagcccugccccaagccccaccggcugaaccacauggggaucugcuccugcggccuguacaagcacccggggguccccgugaaguggaagcgcuga

SEQ ID NO: 39957 - RNA, 1473 nt, Artificial Sequence
  derived and/or modified CDS sequence (opt1) from LASV(LASV1000-NIG-2009;Clade II)__AIT17782__GPCmut12
augggccagaucaucaccuucuuccaggaggugccccacgucaucgaggaggugaugaacaucgugcugaucgcccucagccugcuggccauccucaaggggaucuacaacgucgcgaccugcggccuguucgggcugguguccuuccuccugcugugcggccgcagcugcuccacgaccuacaaggggguguacgagcuccagacccuggagcuggacauggccagccucaacaugugcaugccgcuguccugcacgaagaacaacagccaccacuacaucauggucggcaacgagaccggccuggagcucacccugaccaacacguccaucaucaaccacaaguucugcaaccugagcgacgcccacaagaagaaccucuacgaccacgcccugauguccaucaucagcaccuuccaccuguccauccccaacuucaaccaguacgaggccaugagcugcgacuucaacgggggcaagaucuccgugcaguacaaccucagccacaccuacgcgguggacgccgccaaccacugcgggaccaucgccaacggcguccugcagacguucaugcggauggcguggggcggguccuacaucgcccuggacagcggcaagggguccugggacugcaucaugaccagcuaccaguaccucaucauccagaacaccaccugggaggaccacugccaguucucccgccccagccccaucggcuaccuggggcugcucagccagcggacgcgcgacaucuacaucucccggcgccugcugggcaccuucaccuggacccucagcgacuccgagggcaacgagacgcccgggggcuacugccugacccgguggaugcugaucgaggccgagcucaagugcuucgggaacaccgccguggccaagugcaacgagaagcacgacgaggaguucugcgacaugcugcgccuguucgacuucugcaagcaggcgaucaagcggcucaagaccgaggcccagaugagcauccagcugaucaacaaggccgugaacgcccugaucaacgaccagcucaucaugaagaaccaccuccgcgacaucaugggcauccccuacugcaacuacuccaaguacugcuaccugaaccacacggucaccgggaagaccagccugccccggugcugccugguguccaacggcagcuaccugaacgagacccacuucuccgacgacaucgagcagcaggccgacaacaugaucacggagcuccugcagaaggaguacaucgaccgccagggcaagaccccgcuggggcucguggaccuguucgucuucagcaccuccuucuaccugaucagcaucuuccugcaccucgugaagaucccgacccaccggcacguggucggcaagcccugccccaagccccaccgccugaaccacauggggaucugcuccugcggccuguacaagcacccgggggugcccgugaaguggaagcgguga

SEQ ID NO: 39958 - RNA, 1473 nt, Artificial Sequence
  derived and/or modified CDS sequence (opt1) from LASV(LASV221-NIG-2010;Clade II)__AIT17624__GPCmut12
augggccagaucaucaccuucuuccaggaggugccccacgucaucgaggaggugaugaacaucgugcugaucgcccucagccugcuggccauccucaaggggaucuacaacgucgcgaccugcggccuguucgggcugguguccuuccuccugcugugcggccgcagcugcuccacgaccuacaaggggguguacgagcuccagacccuggagcuggacauggccagccucaacaugugcaugccgcuguccugcacgaagaacaacagccaccacuacaucauggucggcaacgagaccggccuggagcucacccugaccaacacguccaucaucaaccacaaguucugcaaccugagcgacgcccacaagaagaaccucuacgaccacgcccugauguccaucaucagcaccuuccaccuguccauccccaacuucaaccaguacgaggccaugagcugcgacuucaacgggggcaagaucuccgugcaguacaaccucagccacaccuacgcgaucgacgccgccaaccacugcgggaccaucgccaacggcgugcugcagacguucaugcggauggcguggggcggguccuacaucgcccuggacagcggcaagggguccugggacugcaucaugaccagcuaccaguaccucaucauccagaacaccaccugggaggaccacugccaguucucccgccccagccccaucggcuaccuggggcugcucagccagcggacgcgcgacaucuacaucucccggcgccugcugggcaccuucaccuggacccucagcgacuccgagggcaacgagacgcccgggggcuacugccugacccgguggaugcugaucgaggccgagcucaagugcuucgggaacaccgccgucgccaagugcaacgagaagcacgacgaggaguucugcgacaugcugcgccuguucgacuucugcaagcaggcgauccggcgccucaagaccgaggcccagaugagcauccagcugaucaacaaggccgugaacgcccugaucaacgaccagcucaucaugaagaaccaccuccgggacaucaugggcauccccuacugcaacuacuccaaguacugcuaccugaaccacacggugaccgggaagaccagccugccccgcugcugccuggucuccaacggcagcuaccugaacgagacccacuucuccgacgacaucgagcagcaggccgacaacaugaucacggagaugcuccagaaggaguacauggaccggcagggcaagaccccgcuggggcugguggaccucuucguguucagcaccuccuucuaccugaucagcaucuuccugcaccuggucaagaucccgacccaccgccacgugaucggcaagcccugccccaagccccaccggcucaaccacauggggaucugcuccugcggccuguacaagcacccgggggugcccgucaaguggaagcgcuga

SEQ ID NO: 39959 - RNA, 1473 nt, Artificial Sequence
  derived and/or modified CDS sequence (opt1) from LASV(LASV237-NIG-2010;Clade II)__AIT17638__GPCmut12
augggccagaucaucaccuucuuccaggaggugccccacgucaucgaggaggugaugaacaucgugcugaucgcccucagccugcuggccauccucaaggggaucuacaacgucgcgaccugcggccuguucgggcugguguccuuccuccugcugugcggccgcagcugcuccacgaccuacaaggggguguacgagcuccagacccuggagcuggacauggccagccucaacaugugcaugccgcuguccugcacgaagaacaacagccaccacuacaucauggucggcaacgagaccggccuggagcucacccugaccaacacguccaucaucaaccacaaguucugcaaccugagcgacgcccacaagaaggaccucuacgaccacgcccugauguccaucaucagcaccuuccaccuguccauccccaacuucaaccaguacgaggccaugagcugcgacuucaacgggggcaagaucuccgugcaguacaaccucagccacaccuacgcgguggacgccgccaaccacugcgggaccaucgccaacggcguccugcagacguucaugcggauggcguggggcggguccuacaucgcccuggacagcggcaagggguccugggacugcaucaugaccagcuaccaguaccucaucauccagaacaccaccugggaggaccacugccaguucucccgccccagccccaucggcuaccuggggcugcucagccagcggacgcgcgacaucuacaucucccggcgccugcugggcaccuucaccuggacccucagcgacuccgagggcaacgagacgcccgggggcuacugccugacccgguggaugcugaucgaggccgagcucaagugcuucgggaacaccgccguggccaagugcaacgagaagcacgacgaggaguucugcgacaugcugcgccuguucgacuucugcaagcaggcgauccggcgccucaagaccgaggcccagaugagcauccagcugaucaacaaggccgugaacgcccugaucaacgaccagcucaucaugaagaaccaccuccgggacaucaugggcauccccuacugcaacuacuccaaguacugcuaccugaaccacacggucaccgggaagaccagccugccccgcugcugccugguguccaacggcagcuaccugaacgagacccacuucuccgacgacaucgagcagcaggccgacaacaugaucacggagcuccugcagaaggaguacauggaccggcagggcaagaccccgcuggggcucguggaccuguucgucuucagcaccuccuucuaccugaucagcaucuuccugcaccucaucaagaucccgacccaccgccacaucacgggcaagcccugccccaagccccaccggcugaaccacauggggaucugcuccugcggccuguacaagcacccgggggugcccgugaaguggaagcgcuga

SEQ ID NO: 39960 - RNA, 1473 nt, Artificial Sequence
  derived and/or modified CDS sequence (opt1) from LASV(LASV253-NIG-2011;Clade II)__AIT17670__GPCmut12
augggccagaucaucaccuucuuccaggaggugccccacgucaucgaggaggugaugaacaucgugcugaucgcccucagccugcuggccauccucaaggggaucuacaacgucgcgaccugcggccuguucgggcugguguccuuccuccugcugugcggccgcagcugcuccacgaccuacaaggggguguacgagcuccagacccuggagcuggacauggccagccucaacaugugcaugccgcuguccugcacgaagaacaacagccaccacuacaucauggucggcaacgagaccggccuggagcucacccugaccaacacguccaucaucaaccacaaguucugcaaccugagcgacgcccacaagaagaaccucuacgaccacgcccugauguccaucaucagcaccuuccaccuguccauccccaacuucaaccaguacgaggccaugagcugcgacuucaacgggggcaagaucuccgugcaguacaaccucagccacaccuacgcgguggacgccgccaaccacugcgggaccaucgccaacggcguccugcagacguucaugcggauggcguggggcggguccuacaucgcccuggacagcggcaagggguccugggacugcaucaugaccagcuaccaguaccucaucauccagaacaccaccugggaggaccacugccaguucucccgccccagccccaucggcuaccuggggcugcucagccagcggacgcgcgacaucuacaucucccggcgccugcugggcaccuucaccuggacccucagcgacuccgagggcaacgagacgcccgggggcuacugccugacccgguggaugcugaucgaggccgagcucaagugcuucgggaacaccgccguggccaagugcaacgagaagcacgacgaggaguucugcgacaugcugcgccuguucgacuucugcaagcaggcgauccggcgccucaaggccgaggcccagaugagcauccagcugaucaacaaggccgugaacgcccugaucaacgaccagcucaucaugaagaaccaccuccgggacaucaugggcaucccguacugcaacuacuccaaguacugcuaccugaaccacaccgucacggggcgcaccagccugccccggugcugccugguguccaacggcagcuaccugaacgagacccacuucuccgacgacaucgagcagcaggcggacaacaugaucaccgagcuccugcagaaggaguacaucgaccgccagggcaagacgccccuggggcucguggaccuguucgucuucagcaccuccuucuaccugaucagcaucuuccugcaccucgugaagaucccgacccaccggcacaucaucggcaagcccugccccaagccccaccgccugaaccacauggggaucugcuccugcggccuguacaagcacccgggggugcccgucaaguggaagcgguga

SEQ ID NO: 39961 - RNA, 1473 nt, Artificial Sequence
  derived and/or modified CDS sequence (opt1) from LASV(LASV254-NIG-2011;Clade II)__AIT17674__GPCmut12
augggccagaucaucaccuucuuccaggaggugccccacgucaucgaggaggugaugaacaucgugcugaucgcccucagccugcuggccauccucaaggggaucuacaacgucgcgaccugcggccuguucgggcugguguccuuccuccugcugugcggccgcagcugcuccacgaccuacaaggggguguacgagcuccagacccuggagcuggacaugaccaaccucaacaugugcaugccgcugagcugcaccaagaacaacucccaccacuacaucauggucggcaacgagaccggccuggagcucacccugacgaacaccagcaucaucaaccacaaguucugcaaccuguccgacgcccacaagaagaaccucuacaaccacgcccugaugagcaucaucuccaccuuccaccugagcauccccaacuucaaccaguacgaggccauguccugcgacuucaacgggggcaagaucagcgugcaguacaaccucucccacagcuacgccguggacgcggccaaccacugcgggaccaucgccaacggcguccugcagacguucaugcggauggccuggggcggguccuacaucgcgcuggacagcggcaaggggaacugggacugcaucaugaccuccuaccaguaccucaucauccagaacaccaccugggaggaccacugccaguucagccgccccucccccaucggcuaccuggggcugcucagccagcggacgcgcgacaucuacaucagccggcgccugcugggcaccuucaccuggacccucuccgacagcgagggcaacgagacgcccgggggcuacugccugacccgguggaugcugaucgaggccgagcucaagugcuucgggaacaccgccguggccaagugcaacgagaagcacgacgaggaguucugcgacaugcugcgccuguucgacuucugcaagcaggccauccggcgccucaagaccgaggcgcaggccaacauccagcugaucaacaaggccgugaacgcccugaucaacgaccagcucaucaugaagaaccaccuccgggacaucaugggcauccccuacugcaacuacuccaaguacugcuaccugaaccacacggucaccgggaagaccagccugccccgcugcugccugguguccaacggcagcuaccugaacgagacccacuucuccgacgacaucgagcagcaggccgacaacaugaucacggagcuccugcagaaggaguacauggaccggcagggcaagaccccgcuggggcucguggaccuguucgucuucagcaccuccuucuaccugaucagcaucuuccugcaccucgugaagaucccgacccaccgccacgugaucggcaagcccugccccaagccccaccggcugaaccacauggggaucugcuccugcggccuguacaagcacccggggguccccgugaaguggaagcgcuga

SEQ ID NO: 39962 - RNA, 1473 nt, Artificial Sequence
  derived and/or modified CDS sequence (opt1) from LASV(Nig08-A19;Clade III)__ADU56618__GPCmut12
augggccagaucgugaccuucuuccaggaggucccccacgugaucgaggaggugaugaacaucguccugaucgcccucagcauccuggccauccugaaggggcucuacaacaucgcgaccugcggccugaucgggcuggugacguuccuccugcuguccggccgcagcugcuccaugaccuacaaggggguguacgagcuccagacccuggagcugaacaugaacacccucaacaugugcaugccgcugagcugcaccaagaacaacucccaccacuacaucauggucggcaacgagaccggccuggagcucacccugacgaacaccagccugcuccaccacaaguucugcaaccuguccgacgcccacaagaagaaccuguacgaccacacccucaugagcaucaucuccaccuuccaccugagcauccccaacuucaaccaguacgaggccauguccugcgacuucaacgggggcaagaucacggugcaguacaaccugagccacuccuacgccaucgacgccgcgaaccacugcgggaccguggccaacggcguccuccagaccuucaugcggauggccuggggcgggagcuacaucgcccuggacuccggccgcgggaagugggacugcaucaugaccagcuaccaguaccugaucauccagaacacgaccugggaggaccacugccaguucucccggcccagccccaucggcuaccucgggcugcugucccagcgcacccgggacaucuacaucagccgccggcuccugggcaccuucacguggacccugagcgacuccgagggcaacgagacccccgggggcuacugccucacccgcuggaugcugaucgaggcggagcugaagugcuucgggaacacggccguggccaagugcaacgagaagcacgacgaggaguucugcgacaugcuccggcuguucgacuucugcaagcaggccauccgccggcugaaggccgaggcgcagaugagcauccagcucaucaacaaggccgugaacgcccugaucaacgaccagcugaucaugaagaaccaccuccgcgacaucaugggcauccccuacugcaacuacuccaaguacugcuaccugaaccacaccagcaccgggcggaccucccugccccgcugcugccucgucagcaacggcuccuaccugaacgagacgcacuucagcgacgacaucgagcagcaggccgacaacaugaucaccgagaugcugcagaaggaguaccucgaccggcagggcaagaccccgcuggggcugguggaccuguucguguucuccaccagcuucuaccucaucuccaucuuccugcaccuggucaagaucccgacgcaccgccacaucgugggcaagcccugccccaagccccaccggcucaaccacauggggaucugcagcugcggccuguacaagcagccgggggugcccguccgcuggaagcgguga

SEQ ID NO: 39963 - RNA, 1476 nt, Artificial Sequence
  derived and/or modified CDS sequence (opt1) from LASV(G1180-SLE-2010;Clade IV)__AIT17168__GPCmut12
augggccagaucgugaccuucuuccaggaggucccccacgugaucgaggaggugaugaacaucguccugaucgcccucagcauccuggccgugcugaaggggcucuacaacuucgcgaccugcggccugguggggcugcucaccuuccugcugcucugcggccgcuccugcaccgccagccgguacaagggggucuacgagcugcagacccuggagcucaacauggagacccugaacaugugcaugccgcuguccugcaccaagaacaacagccaccacuacaucauggugggcaacgagaccggccucgagcugacccugacgaacaccuccaucaucaaccacaaguucugcaaccucagcgacgcccacaagaagaaccuguacgaccacgcccugauguccaucaucagcaccuuccaccucuccauccccaacuucaaccaguacgaggccaugagcugcgacuucaacgggggcaagaucuccgugcaguacaaccugagccacuccuacgcgggggacgccgccaaccacugcggcaccgucgccaacggggugcugcagacguucaugcgcauggcguggggcggcagcuacaucgcccucgacuccgggcacggcagcugggacugcaucaugaccuccuaccaguaccugaucauccagaacaccaccugggaggaccacugccaguucagccggcccucccccaucggguaccugggccuccugagccagcgcacgcgggacaucuacaucagccgccggcugcucggcaccuucaccuggacccuguccgacagcgaggggaaggacacgccgggcggguacugccugacccgcuggaugcucaucgaggccgagcugaagugcuucggcaacaccgccguggccaagugcaacgagaagcacgacgaggaguucugcgacaugcugcggcuguucgacuucugcaagcaggcgauccagcgccugaaggccgaggcccagauguccauccagcugaucaacaaggccgucaacgcccucaucaacgaccagcugaucaugaagaaccaccuccgggacaucauggggauccccuacugcaacuacagcaaguacugcuaccucaaccacaccacgaccggcaagaccucccugcccaagugcugccuggugagcaacggcuccuaccucaacgagacccacuucagcgacgacaucgagcagcaggcggacaacaugaucacggagaugcugcagaaggaguacauggagcgccaggggaagacgccccugggccucguggaccuguucgucuucuccaccagcuucuaccugaucuccaucuuccugcaccucgugaagaucccgacccaccggcacaucgugggcaagagcugccccaagccccaccgccugaaccacauggggaucugcuccugcgggcuguacaagcagcccggcgucccggugaaguggaagcgguga

SEQ ID NO: 39964 - RNA, 1476 nt, Artificial Sequence
  derived and/or modified CDS sequence (opt1) from LASV(G1442-SLE-2011;Clade IV)__AIT17180__GPCmut12
augggccagaucgugaccuucuuccaggaggucccccacgugaucgaggaggugaugaacaucguccugaucgcccucagcauccuggccgugcugaaggggcucuacaacguggcgaccugcggccugaucgggcuggucacguuccuccugcugugcggccgcuccugcaccaccacccucuacaaggggguguacgagcugcagacgcuggagcucaacauggagacccugaacaugugcaugccgcugagcugcaccaagaacaacucccaccacuacauccgggugggcaacgagacgggccucgagcugacccugaccaacaccagcaucaucaaccacaaguucugcaaccucuccgacgcccacaagaagaaccuguacgaccacgcccugaugagcaucaucuccacguuccaccucagcauccccaacuucaaccaguacgaggccauguccugcgacuucaacgggggcaagaucagcguccaguacaaccugucccacagcuacgccggggacgcggccaaccacugcggcaccguggccaacggggugcugcagaccuucaugcgcauggccuggggcggcuccuacaucgcgcucgacagcgggcggggcaacugggacugcaucaugaccuccuaccaguaccugaucauccagaacacgaccugggacgaccacugccaguucagccgccccucccccaucggguaccugggccuccugagccagcggacccgcgacgucuacaucucccggcgccugcucggcaccuucacguggacccugagcgacagcgaggggaaggacaccccgggcggguacugccugacccgguggaugcucaucgaggccgagcugaagugcuucggcaacacggccguggccaagugcaacgagaagcacgacgaggaguucugcgacaugcugcgccucuucgacuucugcaagcaggccauccagcggcugaaggcggaggcccagauguccauccagcugaucaacaaggccgugaacgcccucaucaacgaccagcugaucaugaagaaccaccuccgcgacaucauggggauccccuacugcaacuacagcaaguacugcuaccugaacaacaccgccaccggcaagaccucccugcccaagugcugccugaucagcaacggcuccuaccucaacgagacgcacuucagcgacgacaucgagcaggaggcggacaacaugaucaccgagaugcugcagaaggaguacauggagcggcaggggaagacgccccugggccucgucgaccuguucguguucuccaccagcuucuaccugaucuccaucuuccugcaccucgugaagaucccgacccaccgccacaucgucggcaagagcugccccaagccccaccggcugaaccacauggggaucugcuccugcgggcuguacaagcagcccggcgugccggugcgcuggaagcgguga

SEQ ID NO: 39965 - RNA, 1476 nt, Artificial Sequence
  derived and/or modified CDS sequence (opt1) from LASV(G3010-SLE-2013;Clade IV)__AIT17344__GPCmut12
augggccagaucgugaccuucuuccaggaggucccccacgugaucgaggaggugaugaacaucguccugaucgcccucagcauccuggccgugcugaaggggcucuacaacuucgcgaccugcggccugguggggcuggucacguuccuccugcugugcggccgcuccugcaccaccagccucuacaaggggguguacgagcugcagacccuggagcucaacauggagacgcugaacaugugcaugccgcuguccugcaccaagaacaacagccaccacuacaucauggugggcaacgagaccggccucgagcugacgcugaccaacaccuccaucaucaaccacaaguucugcaaccucagcgacgcccacaagaagaaccuguacaaccacgcccugauguccaucaucagcaccuuccaccucuccauccccaacuucaaccaguacgaggccaugagcugcgacuucaacgggggcaagaucuccguccaguacaaccugagccacuccuacgccggggacgcggccagccacugcggcacgguggccaacggggugcugcagaccuucaugcggauggccuggggcggcuccuacaucgcgcucgacagcggguacggcaagugggacugcaucaugaccuccuaccaguaccugaucauccagaacaccacgugggaggaccacugccaguucagccgccccucccccaucggguaccugggccuccugagccagcggacccgcgacaucuacaucagccggcgccugcucggcaccuucaccuggacgcuguccgacagcgaggggaaggacaccccgggcggguacugccugacccgguggaugcucaucgaggccgagcugaagugcuucggcaacaccgccgucgccaagugcaacgagaagcacgacgaggaguucugcgacaugcugcgccucuucgacuucugcaagcaggccauccagcggcugaagacggaggcgcagauguccauccagcugaucaacaaggccgugaacgcccucaucaacgaccagcugaucaugaagaaccaccuccgcgacaucauggggauccccuacugcaacuacagcaaguacugcuaccugaaccacaccaccaccggcaagacgucccugcccaagugcugccuggugagcaacggcuccuaccucaacgagacccacuucagcgacgacaucgagcagcaggccgacaacaugaucaccgagaugcugcagaaggaguacauggagcggcaggggaagacgccccugggccucgucgaccuguucguguucuccaccagcuucuaccugaucuccaucuuccugcaccucgugaagaucccgacccaccgccacaucgucggcaagagcugccccaagccccaccggcugaaccacauggggaucugcuccugcgggcuguacaagcagcccggcgugccggugcgcuggaagcgguga

SEQ ID NO: 39966 - RNA, 1476 nt, Artificial Sequence
  derived and/or modified CDS sequence (opt1) from LASV(G502-SLE-2009;Clade IV)__AIT17126__GPCmut12
augggccagaucgugaccuucuuccaggaggucccccacgugaucgaggaggugaugaacaucguccugaucgcccucagcauccuggccgugcugaaggggcucuacaacuucgcgaccugcggccugguggggcugcucacguuccugcugcucugcggccgcuccugcaccaccgggcuguacaagggcgucuacgagcugcagacccucgagcugaacauggagacgcugaacaugugcaugccgcucagcugcaccaagaacaacucccaccacuacaucauggugggcaacgagaccgggcuggagcugacgcucaccaacaccagcaucaucaaccacaaguucugcaaccuguccgacgcccacaagaagaaccuguacgaccacgcccucaugagcaucaucuccaccuuccaccugagcauccccaacuucaaccaguacgaggccauguccugcgacuucaacggcgggaagaucagcgugcaguacaaccugucccacagcuacgccggcgacgcggccgaccacugcgggacggucgccaacggcgugcuccagaccuucaugcggauggccuggggcggguccuacaucgcgcuggacagcggccgcgggcggugggacugcaucaugaccuccuaccaguaccugaucauccagaacaccacgugggaggaccacugccaguucagccgccccucccccaucggcuaccucggccugcugagccagcggacccgcgacaucuacaucucccggcgccuccuggggaccuucaccuggacgcugagcgacagcgagggcaaggacacccccgggggcuacugccucacccgguggaugcugaucgaggccgagcugaagugcuucgggaacaccgccguggccaagugcaacgagaagcacgacgaggaguucugcgacaugcuccgccuguucgacuucugcaagcaggccauccagcggcugaaggcggaggcccagauguccauccagcucaucaacaaggccgucaacgcccugaucaacgaccagcuggugaugaagaaccaccuccgcgacaucaugggcauccccuacugcaacuacagccgguacugcuaccugaaccacacgaccaccggccgcaccucccugcccaagugcugccucgugagcaacggguccuaccugaacgagacgcacuucagcgacgacaucgagcagcaggccgacaacaugaucaccgagaugcugcagaaggaguacauggagcggcagggcaagaccccgcucgggcuggucgaccuguucguguucuccaccagcuucuaccugaucuccaucuuccuccaccuggugaagaucccgacgcaccgccacaucgucggcaagagcugccccaagccccaccggcugaaccacauggggaucugcuccugcggccucuacaagcagcccggcgugccggugaaguggaagcgcuga

SEQ ID NO: 39967 - RNA, 1476 nt, Artificial Sequence
  derived and/or modified CDS sequence (opt1) from LASV(G733-SLE-2010;Clade IV)__AIT17154__GPCmut12
augggccagaucgugaccuucuuccaggaggucccccacgugaucgaggaggugaugaacaucguccugaucgcccucagcauccuggccgugcugaaggggcucuacaacuucgcgaccugcggcaucguggggcuggucuccuuccugcuccugugcggccgcagcugcacgaccucccuguacaaggggguguacgagcuccagacccuggagcugaacauggagacccucaacaugugcaugccgcugagcugcaccaagaacaacucccaccacuacaucauggugggcaacgagaccggccuggagcucacccugacgaacaccagcaucaucaaccacaaguucugcaaccuguccgacgcccacaagaagaaccucuacgaccacgcccugaugagcaucaucuccaccuuccaccugagcauccccaacuucaaccaguacgaggccauguccugcgacuucaacgggggcaagaucagcguccaguacaaccucucccacagcuacgccggggacgcggccaaccacugcggcaccaucgccaacggggugcugcagacguucaugcggauggccuggggcggcuccuacaucgcgcuggacagcgggcgcgaccggugggacugcaucaugaccuccuaccaguaccucaucauccagaacaccaccugggaggaccacugccaguucagccgccccucccccaucggcuaccuggggcugcucagccagcggacgcgcgacaucuacaucagccggcgccugcugggcaccuucaccuggacccucuccgacagcgagggcaaggacacgcccgggggcuacugccugacccgguggaugcugaucgaggccgagcucaagugcuucgggaacaccgccguggccaagugcaacgagaagcacgacgaggaguucugcgacaugcugcgccuguucgacuucugcaagcaggccauccagcggcucaaggcggaggcccagauguccauccagcugaucaacaaggccgucaacgcccugaucaacgaccagcucaucaugaagaaccaccuccgcgacaucaugggcauccccuacugcaacuacagcaaguacugcuaccugaaccacaccacgaccgggaagaccucccugcccaagugcugccuggugagcaacggcuccuaccugaacgagacccacuucagcgacgacaucgagcagcaggccgacaacaugaucacggagaugcuccagaaggaguacauggagcggcagggcaagaccccgcuggggcugguggaccucuucgucuucuccaccagcuucuaccugaucuccaucuuccugcaccuggugaagaucccgacccaccgccacguggucggcaagagcugccccaagccccaccggcucaaccacauggggaucugcuccugcggccuguacgggcagcccggcgugccggugaaguggaagcgcuga

SEQ ID NO: 39968 - RNA, 1476 nt, Artificial Sequence
  derived and/or modified CDS sequence (opt1) from MOPV/LASV reassortant(IGS-1;Clade IV)__AFY05576__GPCmut12
augggccagaucgugaccuucuuccaggaggucccccacgugaucgaggaggugaugaacaucguccugaucgcccucagcgugcuggccgugcugaaggggcucuacaacuucgcgaccugcggccuggucgggcuggugacguuccuccugcugugcggccgcuccugcaccaccagccucuacaaggggguguacgagcugcagacccuggagcucaacauggagacgcugaacaugugcaugccgcuguccugcaccaagaacaacagccaccacuacaucauggucggcaacgagaccggccucgagcugacgcugaccaacaccuccaucaucaaccacaaguucugcaaccucagcgacgcccacaagaagaaccuguacgaccacgcccugauguccaucaucagcaccuuccaccucuccauccccaacuucaaccaguacgaggccaugagcugcgacuucaacgggggcaagaucuccgugcaguacaaccugagccacuccuacgccggggacgcggccaaccacugcggcacgguggccaacgggguccugcagaccuucaugcggauggccuggggcggcagcuacaucgcgcucgacuccgggcgcggcaacugggacugcaucaugaccagcuaccaguaccugaucauccagaacaccacgugggaggaccacugccaguucucccggcccagccccaucggguaccugggccuccugucccagcgcacccgggacaucuacaucagccgccggcugcucggcaccuucaccuggacgcugagcgacuccgagggggaggacaccccgggcggguacugccugacccgcuggaugcucaucgaggccgagcugaagugcuucggcaacaccgccguggccaagugcaacgagaagcacgacgaggaguucugcgacaugcugcggcuguucgacuucugcaagcaggccauccagcgccugaaggcggaggcccagaugagcauccagcugaucaacaaggccgugaacgcccucaucaacgaccagcugaucaugaagaaccaccuccgggacaucauggggauccccuacugcaacuacuccaaguacugcuaccucaaccacacgaccaccggccgcaccagccugcccaagugcugccuggucuccaacggcagcuaccucaacgagacgcacuucuccgacgacaucgagcagcaggccgacaacaugaucaccgagaugcugcagaaggaguacauggagcggcaggggaagacgccccugggccucguggaccuguucguguucagcaccuccuucuaccugaucagcaucuuccugcaccucgucaagaucccgacccaccgccacaucguggggaaguccugccccaagccccaccggcugaaccacaugggcaucugcagcugcgggcuguacaagcagcccggcgugccggucaaguggaagcgcuga

SEQ ID NO: 39969 - RNA, 1476 nt, Artificial Sequence
  derived and/or modified CDS sequence (opt1) from LASV(LM765-SLE-2012;Clade IV)__AIT17814__GPCmut12
augggccagaucgugaccuucuuccaggaggucccccacgugaucgaggaggugaugaacaucguccugaucgcccucagcauccuggccgugcugaaggggcucuacaacuucgcgaccugcggccugguggggcuggucacguuccuccugcugugcggccgcuccugcaccaccagccucuacaaggggguguacgagcugcagacccuggagcucaacauggagacgcugaacaugugcaugccgcuguccugcaccaagaacaacagccaccacuacaucauggugggcaacgagaccggccucgagcugacgcugaccaacaccuccaucaucgaccacaaguucugcaaccucagcgacgcccaccggaagaaccuguacgaccacgcccugauguccaucaucagcaccuuccaccucuccauccccaacuucaaccaguacgaggccaugagcugcgacuucaacgggggcaagaucuccguccaguacaaccugagccacuccuacgccaaggacgcggccgaccacugcgggacgguggccaacggcgugcugcagaccuucaugcgcauggccuggggcgggagcuacaucgcgcucgacuccggccgggggcgcugggacugcaucaugaccagcuaccaguaccugaucauccagaacaccacgugggaggaccacugccaguucucccggcccagccccaucggcuaccuggggcuccugucccagcgcacccgggacaucuacaucagccgccggcugcucggcaccuucaccuggacgcugagcgacuccgagggcaaggacacccccgggggcuacugccugacccgcuggaugcucaucgaggccgagcugaagugcuucgggaacaccgccgucgccaagugcaacgagaagcacgacgaggaguucugcgacaugcugcggcuguucgacuucugcaagcaggccauccagcgccugaaggcggaggcccagaugagcauccagcugaucaacaaggccgugaacgcccucaucaacgaccagcugaucaugaagaaccaccuccgggacaucaugggcauccccuacugcaacuacuccaaguacugcuaccucaaccacacgaccaccgggaagaccagccugcccaagugcugccugguguccaacggcagcuaccucaacgagacgcacuucuccgacgacaucgagcagcaggccgacaacaugaucaccgagaugcugcagaaggaguacauggagcgccagggcaagaccccgcuggggcucgucgaccuguucguguucagcaccuccuucuaccugaucagcaucuuccugcaccucgugaagaucccgacgcaccggcacaucgucggcaagcccugccccaagccccaccgccugaaccacauggggaucugcuccugcggccuguacaagcagccgggggugcccgugaaguggaagcgguga

SEQ ID NO: 39970 - RNA, 1476 nt, Artificial Sequence
  derived and/or modified CDS sequence (opt1) from LASV(LM776-SLE-2012;Clade IV)__AIT17824__GPCmut12
augggccagaucgugaccuucuuccaggaggucccccacgugaucgaggaggugaugaacaucguccugaucgcccucagcauccuggccgugcugaaggggcucuacaacuucgcgaccugcggccugguggggcuggucacguuccuccugcugugcggccgcuccugcaccaccagcguguacaaggggguguacgagcuccagacccuggagcugaacauggagacgcucaacaugugcaugccgcuguccugcaccaagaacaacagccaccacuacaucauggucggcaacgagaccggccuggagcucacgcugaccaacaccuccaucaucaaccacaaguucugcaaccugagcgacgcccacaagaagaaccucuacgaccacgcccugauguccaucaucagcaccuuccaccuguccauccccaacuucaaccaguacgaggccaugagcugcgacuucaacgggggcaagaucuccgugcaguacaaccucagccacuccuacgccggggacgcggccaaccacugcggcacgguggccaacgggguccugcagaccuucaugcggauggccuggggcggcagcuacaucgcgcuggacuccgggcacggcaagugggacugcaucaugaccagcuaccaguaccucaucauccagaacaccacgugggaggaccacugccaguucucccgccccagccccaucggguaccugggccugcucucccagcggacccgcgacaucuacaucagccggcgccugcugggcaccuucaccuggacgcucagcgacuccgaggggaaggacaccccgggcggguacugccugacccgguggaugcugaucgaggccgagcucaagugcuucggcaacaccgccguggccaagugcaacgagaagcacgacgaggaguucugcgacaugcugcgccuguucgacuucugcaagcaggccauccagcggcucaaggcggaggcccagaugagcauccagcugaucaacaaggccgugaacgcccugaucaacgaccagcucaucaugaagaaccaccuccgcgacaucauggggauccccuacugcaacuacuccaaguacugcuaccugaaccacacgaccaccggcaagaccagccugcccaagugcugccuggucuccaacggcagcuaccugaacgagacgcacuucuccgacgacaucgagcagcaggccgacaacaugaucaccgagaugcuccagaaggaguacauggagcggcaggggaagacgccccugggccugguggaccucuucguguucagcaccuccuucuaccugaucagcaucuuccugcaccuggucaagaucccgacccaccgccacaucguggggaaguccugccccaagccccaccggcucaaccacaugggcaucugcagcugcgggcuguacaagcagcccggcgugccgguccgcuggaagcgguga

SEQ ID NO: 39971 - RNA, 1476 nt, Artificial Sequence
  derived and/or modified CDS sequence (opt1) from LASV(Mad39;Clade IV)__ANH09722__GPCmut12
augggccagaucgugaccuucuuccaggaggucccccacgugaucgaggaggugaugaacaucguccugaucgcccucagcauccuggccgugcugaaggggcucuacaacguggcgaccugcggccugaucgggcuggucacguuccuccugcugugcggccgcuccugcaccaccacccucuacaaggggguguacgagcugcaggcccuggagcucaacauggagacgcugaacaugugcaugccgcugagcugcaccaagaacaacucccaccacuacauccgggugggcaacgagaccggccucgagcugacgcugaccaacaccagccucaucaaccacaaguucugcaaccuguccgacgcccacaagaagaaccuguacgaccacgcccucaugagcaucaucuccaccuuccaccugagcauccccaacuucaaccaguacgaggccauguccugcgacuucaacgacgggaagaucagcguccaguacaaccugucccacacguacgcgggcgacaccgccaaccacugcgggaccguggccaacggcgugcuccagaccuucaugcgcauggccuggggcgggagcuacaucgcgcuggacuccggccgcgggggcugggacugcaucaugacgagcuaccaguaccugaucauccagaacaccaccugggaggaccacugccaguucucccggcccagccccaucggguaccucggccugcugucccagcggacccgcgacaucuacaucagccggcgccuccugggcacguucaccuggacccuguccgacagcgaggggaaggacaccccgggcggguacugccucacgcgguggaugcugaucgaggccgagcugaagugcuucggcaacaccgccgucgccaagugcaacgagaagcacgacgaggaguucugcgacaugcuccgccuguucgacuucugcaagcaggccauccagcggcugaaggcggaggcccagaugagcauccagcucaucaacaaggccgugaacgcccugaucaacgaccagcugaucaugaagaaccaccuccgcgacaucauggggauccccuacugcaacuacuccaaguacugcuaccugaaccacaccgugaccggcaagacgagccugcccaagugcugccucgucuccaacggcagcuaccugaacgagacccacuucuccgacgacaucgagcagcaggccgacaacaugaucaccgagaugcugcagaaggaguacauggagcggcaggggaagacgccccucggccugguggaccuguucguguucagcaccuccuucuaccugaucagcaucuuccuccaccuggucaagaucccgacccaccgccacgugguggggaagcccugccccaagccccaccggcugaaccacaugggcaucugcuccugcggguucuacaagcagccgggcguccccgugcgcuggaagcgguga

SEQ ID NO: 39972 - RNA, 1476 nt, Artificial Sequence
  derived and/or modified CDS sequence (opt1) from LASV(Z0947-SLE-2011;Clade IV)__AIT17840__GPCmut12
augggccagaucgugaccuucuuccaggaggucccccacgugaucgaggaggugaugaacaucguccugaucgcccucagcauccuggccgugcugaaggggcucuacaacuucgcgaccugcggccugguggggcuggucacguuccuccugcugugcggccgcuccugcaccaucagccucuacaaggggguguacgagcugcagacccuggagcucaacauggagacccugaacaugugcaugccgcuguccugcaccaagaacaacagccaccacuacaucauggugggcaacgagaccggccucgagcugacccugacgaacaccuccaucaucaaccacaaguucugcaaccucagcgacgcccacaagaagaaccuguacgaccacgcccugauguccaucaucagcaccuuccaccucuccauccccaacuucaaccaguacgaggccaugagcugcgacuucaacgggggcaagaucuccguccaguacaaccugagccacuccuacgccggggacgcggccaaccacugcggcaccguggccaacggggugcugcagacguucaugcggauggccuggggcggcagcuacaucgcgcucgacuccgggcgcgaccggugggacugcaucaugaccagcuaccaguaccugaucauccagaacaccaccugggaggaccacugccaguucucccgccccagccccaucggcuaccuggggcuccugucccagcggacgcgcgacaucuacaucagccggcgccugcucggcaccuucaccuggacccugagcgacuccgagggcaaggacacgcccgggggcuacugccugacccgguggaugcucaucgaggccgagcugaagugcuucgggaacaccgccgucgccaagugcaacgagaagcacgacgaggaguucugcgacaugcugcgccucuucgacuucugcaagcaggccauccagcggcugaaggcggaggcccagaugagcauccagcugaucaacaaggccgugaacgcccucaucaacgaccagcugaucaugaagaaccaccuccgcgacaucaugggcauccccuacugcaacuacuccaaguacugcuaccugaaccacaccacgaccgggaagaccagccugcccaagugcugccugguguccaacggcagcuaccucaacgagacccacuucuccgacgacaucgagcagcaggccgacaacaugaucacggagaugcugcagaaggaguacauggagcggcagggcaagaccccgcuggggcucgucgaccuguucguguucagcaccuccuucuaccugaucagcaucuuccugcaccucgugaagaucccgacccaccgccacaucgucggcaagcccugccccaagccccaccggcugaaccacauggggaucugcuccugcggccuguacaagcagccgggggugcccgugaaguggaagcgcuga

SEQ ID NO: 39973 - RNA, 1476 nt, Artificial Sequence
  derived and/or modified CDS sequence (opt1) from LASV(Josiah;Clade IV)__NP_694870__GPCmut12
augggccagaucgugaccuucuuccaggaggucccccacgugaucgaggaggugaugaacaucguccugaucgcccucagcgugcuggccgugcugaaggggcucuacaacuucgcgaccugcggccuggucgggcuggugaccuuccuccugcugugcggccgcuccugcaccaccagccucuacaaggggguguacgagcugcagacccuggagcucaacauggagacgcugaacaugugcaugccgcuguccugcaccaagaacaacagccaccacuacaucauggucggcaacgagaccggccucgagcugacccugacgaacaccuccaucaucaaccacaaguucugcaaccucagcgacgcccacaagaagaaccuguacgaccacgcccugauguccaucaucagcaccuuccaccucuccauccccaacuucaaccaguacgaggccaugagcugcgacuucaacgggggcaagaucuccgugcaguacaaccugagccacuccuacgccggggacgcggccaaccacugcggcaccguggccaacgggguccugcagacguucaugcggauggccuggggcggcagcuacaucgcgcucgacuccgggcgcggcaacugggacugcaucaugaccagcuaccaguaccugaucauccagaacaccaccugggaggaccacugccaguucucccggcccagccccaucggguaccugggccuccugucccagcgcacgcgggacaucuacaucagccgccggcugcucggcaccuucaccuggacccugagcgacuccgaggggaaggacacgccgggcggguacugccugacccgcuggaugcucaucgaggccgagcugaagugcuucggcaacaccgccguggccaagugcaacgagaagcacgacgaggaguucugcgacaugcugcggcuguucgacuucugcaagcaggccauccagcgccugaaggcggaggcccagaugagcauccagcugaucaacaaggccgugaacgcccucaucaacgaccagcugaucaugaagaaccaccuccgggacaucauggggauccccuacugcaacuacuccaaguacugcuaccucaaccacaccacgaccggccgcaccagccugcccaagugcugccuggucuccaacggcagcuaccucaacgagacccacuucuccgacgacaucgagcagcaggccgacaacaugaucacggagaugcugcagaaggaguacauggagcggcaggggaagacgccccugggccugguggaccucuucguguucagcaccuccuucuaccugaucagcaucuuccugcaccucgucaagaucccgacccaccgccacaucguggggaaguccugccccaagccccaccggcugaaccacaugggcaucugcagcugcgggcuguacaagcagcccggcgugccggucaaguggaagcgcuga

SEQ ID NO: 39974 - RNA, 1473 nt, Artificial Sequence
  derived and/or modified CDS sequence (opt1) from LASV(LP;Clade I)__AAF86701__GPCmut12
augggccagaucaucaccuucuuccaggaggugccccacgucaucgaggaggugaugaacaucgugcugaucgcccucagccugcuggccauccucaaggggcuguacaacaucgcgaccugcggcaucaucgggcuggucgccuuccucuuccugugcggcaaguccugcagccugacgcucaagggcggguacgagcugcagacccuggagcucaacauggagacccugaacaugugcaugccgcuguccugcaccaagaacagcucccaccacuacauccgcgugggcaacgagacggggcucgagcugacccugaccaacaccagcaucaucaaccacaaguucugcaaccucuccgacgcccacaagaagaaccuguacgaccacgcccugaugagcaucaucuccacguuccaccucagcauccccaacuucaaccaguacgaggccauguccugcgacuucaacggcgggaagaucagcgugcaguacaaccugucccacagcuacgcgggcgacgccgccgagcacugcgggaccgucgccaacggcgugcugcagaccuucaugcggauggcguggggcgggcgcuacaucgcccucgacuccggcaaggggaacugggacugcaucaugaccagcuaccaguaccugaucauccagaacacgaccugggaggaccacugccaguucucccggcccagccccaucggcuaccugggccuccugucccagcgcacccgggacaucuacaucagccgccggcugcucgggaccuucacguggacccugagcgacuccgagggcaacgagacccccgggggcuacugccugacccgcuggaugcucaucgaggccgagcugaagugcuucgggaacacggccguggccaagugcaacgagaagcacgacgaggaguucugcgacaugcugcggcuguucgacuucugcaagcaggcgauccgccggcugaaggccgaggcccagaugagcauccagcugaucaacaaggccgucaacgcccucaucaacgaccagcugaucaugaagaaccaccuccgcgacaucaugggcauccccuacugcaacuacuccaaguacugcuaccucaaccacaccagcuccggccggaccagccugcccaagugcugccugaucuccaacgggagcuaccucaacgagacccaguucuccgacgacaucgagcagcaggcggacaacaugaucacggagaugcugcagaaggaguacaucgagcgccagggcaagaccccgcuggggcugguggacaucuucaucuucagcaccuccuucuaccucaucagcaucuuccugcaccugaucaagaucccgacccaccggcacaucgugggcaagcccugccccaagccccaccgccucaaccacaugggggucugcuccugcggccuguacaagcacccgggcgugcccacgaaguggaagcgguga

SEQ ID NO: 39975 - RNA, 1473 nt, Artificial Sequence
  derived and/or modified CDS sequence (opt1) from LASV(803213;Clade II)__AAF86703__GPCmut12
augggccagaucaucaccuucuuccaggaggugccccacgucaucgaggaggugaugaacaucgugcugaucgcccucagccugcuggccauccucaaggggaucuacaacgucgcgaccugcggccuguucgggcugaucuccuuccuccugcugugcggccgcagcugcuccgugacguacaaggggguguacgagcuccagacccuggagcugaacauggccaaccucaacaugugcaugccgcugagcugcaccaagaacaacucccaccacuacaucauggucggcaacgagaccggccuggagcucacgcugaccaacaccagcaucaucaaccacaaguucugcaaccuguccgacgcccacaagaagaaccucuacgaccacgcccugaugagcaucaucuccaccuuccaccugagcauccccaacuucaaccaguacgaggccauguccugcgacuucaacgggggcaagaucagcgugcaguacaaccucucccacagcuucgcgguggacgccgccaaccacugcgggacgaucgccaacggcguccugcagaccuucaugcggauggcguggggcggguccuacaucgcccuggacagcggcaaggggaacugggacugcaucaugaccuccuaccaguaccucaucauccagaacaccacgugggaggaccacugccaguucagccgccccucccccaucggcuaccuggggcugcucagccagcggacccgcgacaucuacaucagccggcgccugcugggcaccuucaccuggacgcucuccgacagcgagggcaacgaggcccccgggggcuacugccugacccgguggaugcugaucgaggccgagcucaagugcuucgggaacaccgccguggcgaagugcaacgagaagcacgacgaggaguucugcgacaugcugcgccuguucgacuucugcaagcaggccaucaagcggcucaagaccgaggcccagauguccauccagcugaucaacaaggccgugaacgcccugaucaacgaccagcucaucaugaagaaccaccuccgcgacaucaugggcauccccuacugcaacuacagccgguacugcuaccugaaccacacggucaccgggaagaccucccugccccgcugcugccuggugagcaacggcuccuaccugaacgagacccacuucagcgacgacaucgagcagcaggcggacaacaugaucacggagaugcuccagaaggaguacauggaccggcagggcaagaccccgcuggggcugguggaccuguucgucuucuccaccagcuucuaccucaucuccaucuuccugcaccuggugaagaucccgacccaccgccacaucgugggcaagcccugccccaagccccaccggcucaaccacauggggaucugcagcugcggccuguacaagcacccggggguccccgugaaguggaagcgcuga

SEQ ID NO: 39976 - RNA, 1473 nt, Artificial Sequence
  derived and/or modified CDS sequence (opt1) from LASV(GA391;Clade III)__CAA36645__GPCmut12
augggccagaucgugaccuucuuccaggaggucccccacgugaucgaggaggugaugaacaucguccugaucgcccucagcauccuggccauccugaaggggcucuacaacguggcgaccugcggccugaucgggcuggugaccuuccuccugcuguccggccgcagcugcucccucaucuacaaggggaccuacgagcugcagacccuggagcucaacauggagacccugaacaugugcaugccgcugagcugcacgaagaacaacucccaccacuacauccgggucggcaacgagaccggccucgagcugacccugaccaacacgagcauccucaaccacaaguucugcaaccuguccgacgcccacaagcgcaaccuguacgaccacagccucauguccaucaucagcaccuuccaccuguccauccccaacuucaaccaguacgaggccaugagcugcgacuucaacgggggcaagaucaccgugcaguacaaccugucccacagcuucgccguggacgccgcggggcacugcggcacccucgccaacgggguccugcagacguucaugcggauggccuggggcggcuccuacaucgcccuggacagcgggcgcggcaacugggacugcaucaugaccuccuaccaguaccucaucauccagaacaccaccugggacgaccacugccaguucagccggcccucccccaucggguaccugggccugcucagccagcgcacgcgggacaucuacaucagccgccggcugcugggcaccuucaccuggacccucuccgacagcgaggggaacgagacgccgggcggguacugccugacccgcuggaugcugaucgaggcggagcucaagugcuucggcaacaccgccguggccaagugcaacgagaagcacgacgaggaguucugcgacaugcugcggcuguucgacuucugcaagcaggccauccgccggcucaagaccgaggcccagauguccauccagcugaucaacaaggcggugaacgcccugaucaacgaccagcucaucaugaagaaccaccuccgcgacaucauggggauccccuacugcaacuacagccgguacugcuaccugaaccacacguccaccggcaagaccagccugccccgcugcugccugaucuccaacggcagcuaccugaacgagaccaaguucuccgacgacaucgagcagcaggccgacaacaugaucacggagaugcugcagaaggaguacaucgaccggcaggggaagacgccccucggccuggucgaccuguucguguucagcaccuccuucuaccucaucagcaucuuccugcaccuggugaagaucccgacccaccgccacaucgucgggaagcccugccccaagccccaccggcucaaccacaugggcaucugcuccugcgggcuguacaagcagccgggcgugcccgugcgcuggaagcgguga

SEQ ID NO: 39977 - RNA, 1476 nt, Artificial Sequence
  derived and/or modified CDS sequence (opt1) from LASV(AV;Clade V)__CCA30314__GPCmut12
augggccagaucgugaccuucuuccaggaggucccccacgugaucgaggaggugaugaacaucguccugaucgcccucagcauccuggccgugcugaaggggcucuacaacaucgcgaccugcggccugaucgggcugaucacguuccuccugcugugcggccgcuccugcagcuccaaccucuacaaggggguguacgagcugcagagccuggaccucaacauggagacccugaacaugugcaugccgcuguccugcaccaagaacaacagccaccacuacauccgggucggcaacgacaccggccucgagcugacgcugaccaacaccuccauccucaaccacaaguucugcaaccugagcgacgcccacaagaaggaccuguacgaccacgcccucauguccaucaucagcaccuuccaccuguccauccccaacuucaaccaguacgaggccaugagcugcgacuucaacgggggcaagaucuccgugcaguacaaccugagccacuccuacgccaucgacgcggccaaccacugcgggacgguggccaacggcauccuccagaccuucaugcgcauggccuggggcgggagcuacaucgcgcuggacuccggccgggggaacugggacugcaucaugaccagcuaccaguaccugaucauccagaacaccacgugggagaaccacugccaguucucccgccccagccccaucggcuaccucgggcugcugagccagcggacccgcgacaucuacaucucccggcgccuccugggcaccuucaccuggacgcugagcgacuccgagggcaacgccacccccgggggcuacugccucacccgguggaugcugaucgaggccgagcugaagugcuucgggaacaccgccgucgccaagugcaacgagaagcacgacgaggaguucugcgacaugcuccgccuguucgacuucugcaagcaggcgaucagccggcugaaguccgaggcccagaugagcauccagcucaucaacaaggccgugaacgcccugaucaacgaccagcugaucaugaagaaccaccuccgcgacaucaugggcauccccuacugcaacuacuccaaguacugcuaccugaaccacacgaucaccgggaagaccagccugcccaagugcugccucguguccaacggcagcuaccugaacgagacccacuucuccgacgacaucgagcagcaggccgacaacaugaucacggagaugcugcagaaggaguacauggagcggcagggcaagaccccgcuggggcucgucgaccuguucguguucagcaccuccuucuaccugaucagcaucuuccuccgccuggugaagaucccgacccaccggcacaucgucggcaagcccugccccaagccccaccgccugaaccacauggggaucugcuccugcggccucuacaagcagccgggggugcccgugcgguggaagcgcuga

SEQ ID NO: 39978 - RNA, 1473 nt, Artificial Sequence
  derived and/or modified CDS sequence (opt1) from LASV(Togo/2016/7082;Clade VI)__AMR44577__GPCmut12
augggccagaucaucaccuucuuccaggaggugccccacgucaucgaggaggugaugaacaucgugcugaucgcccucagccugcuggccauccucaagggggucuacaacguggcgaccugcggcaucaucgggcuggugacguuccuguuccucugcggccgcuccugcagccugaucuacaagggguccuacgagcugcagacccucgagcugaacauggagacccugaacaugugcaugccgcucagcugcaccaagaacuccagccaccacuacauccgggucggcaacgagacgggccuggagcugacccucaccaacaccuccaucaucaaccacaaguucugcaaccugagcgacgcccacaagcgcaaccuguacgaccacgcccucauguccauccugagcacguuccaccuguccauccccaacuucaaccaguacgaggccaugagcugcgacuucaacgggggcaagaucuccgugcaguacaaccucagccacgccuacgcgguggacgccgccgagcacugcgggaccgucgccaacggcgugcugcagaccuucaugcggauggcguggggcggguccuacaucgcccuggacagcggccgcgggaacugggacugcaucaugaccuccuaccaguaccucaucauccagaacacgaccugggaggaccacugccaguucagccggcccucccccaucggcuaccuggggcugcucagccagcgcacccgggacaucuacaucagccgccggcugcugggcaccuucacguggacccucuccgacagcgagggcaacgagacccccgggggcuacugccugacccgcuggaugcugaucgaggccgagcucaagugcuucgggaacacggccguggccaagugcaacgagaagcacgacgaggaguucugcgacaugcugcggcuguucgacuucugcaagcaggcgauccagcgccucaaguccgaggcccagaugagcauccagcugaucaacaaggccgucaacgcccugaucaacgaccagcucaucaugaagaaccaccuccgggacaugaugggcauccccuacugcaacuacuccaaguacugcuaccugaaccacaccagcuccgggcgcaccagccugcccaagugcugccugguguccaacggcagcuaccugaacgagacccacuucuccgacgacaucgagcagcaggccgacaacaugaucacggagaugcuccagaaggaguacaucgaccggcagggcaagaccccgcuggggcugguggaccuguucgucuucagcaccuccuucuaccucaucagcaucuuccugcaccugaucaagaucccgacccaccgccacaucgugggcaagcccugccccaagccccaccggcucaaccacauggggaucugcuccugcggccuguacaagcagccgggggugcccacgcgcuggaagcgguga

SEQ ID NO: 39979 - RNA, 1473 nt, Artificial Sequence
  derived and/or modified CDS sequence (opt1) from LASV(KAK-428;Clade n.d. (VII))__ANH09740__GPCmut12
augggccagaucgugaccuucuuccaggaggucccccacgugaucgaggaggugaugaacaucguccugaucgcccucagccugcuggccauccucaaggggcuguacaacuucgcgaccugcggcgugaucgggcugaucacguuccuccugcugugcggccgcuccugcagcgccaccuacaaggggcaguacgagcuccagacccuggagcugaacauggagucccucaacaugugcaugccgcugagcugcaccaagaacaacucccaccacuacauccgggccggcaacaacacgggccuggagcucacccugaccaacaccagcaucaucucccacaaguucugcaaccugagcgacgcccacaagaagaaccucuacgaccacacgcugauguccaucaucaccaccuuccaccugagcauccccaacuucaaccaguacgaggccauguccugcgacuucaacgggggcaagaucagcauccaguacaaccucucccacagcuacgcgggggacgccgcccagcacugcggcaccguggccaacgggguccugcagacguucaugcgcauggcguggggcggcuccuaccuggcccucgacagcgggcggcgcggcugggacugcaucaucuccagcuaccaguaccugaucauccagaacaccaccugggacgaccacugccaguucucccggcccagccccaucggguaccugggcuucgugagccagaagacccgcgacaucuacaucucccggcgccuccugggcacguucaccuggacccugagcgacuccgaggggcacgacaugccgggcggguacugccucacccgguggaugcugaucgaggccgaccugaagugcuucggcaacacggccguggccaagugcaacgagaagcacgacgaggaguucugcgacauguggcgccucuucgacuucugcaagcaggcgauccagcggcugaaggccgaggcccagaugaacauccagcugaucaacaaggccgucaacgcccucaucaacgaccagcugaugaugaagaaccaccuccgcgacaucauggggauccccuacugcaacuacagcaaguucugcuaccugaacaacaccaccaccggccggacgucccugccccgcugcugccugaucagcaacggcuccuaccucaacgagacccacuucagcgacgacaucgagcagcaggcggacaacaugaucaccgagaugcugcagaaggaguacauggaccggcaggggaagacgccccugggccucguggaccuguucguguucuccaccagcuucuaccugaucaccaucuuccugcaccucgucaagaucccgacccaccgccacaucguggggaagcccugccccaagccccaccggcugaaccacaugggcaucugcuccugcgggcuguacaagcagccgggcgugcccguccgcuggaagcgguga

SEQ ID NO: 39980 - RNA, 1473 nt, Artificial Sequence; identical to SEQ ID NO: 39974
  derived and/or modified CDS sequence (opt1) from LASV(Pinneo-NIG-1969;Clade I)__AIT17836__GPCmut12

SEQ ID NO: 39981 - RNA, 1473 nt, Artificial Sequence
  derived and/or modified CDS sequence (opt1) from LASV(ISTH0009-NIG-2011;Clade II)__AIT17404__GPCmut12
augggccagaucaucaccuucuuccaggaggugccccacgucaucgaggaggugaugaacaucgugcugaucgcccucagccugcuggccauccucaaggggaucuacaacgucgcgaccugcggccuguucgggcugguguccuuccuccugcugugcggccgcagcugcuccacgaccuacaaggggguguacgagcuccagacccuggagcuggacauggccagccucaacaugugcaugccgcuguccugcaccaagaacaacagccaccacuacaucauggucggcaacgagacgggccuggagcucacccugaccaacaccuccaucaucaaccacaaguucugcaaccugagcgacgcccacaagaagaaccucuacgaccacgcccugauguccaucaucagcacguuccaccuguccauccccaacuucaaccaguacgaggccaugagcugcgacuucaacgggggcaagaucuccgugcaguacaaccucagccacgcguacgccguggacgccgccaaccacugcgggaccaucgcgaacggcguccugcagaccuucaugcggauggccuggggcggguccuacaucgcccuggacagcggcaagggguccugggacugcaucaugaccagcuaccaguaccucaucauccagaacacgaccugggaggaccacugccaguucucccgccccagccccaucggcuaccuggggcugcucagccagcggacccgcgacaucuacaucucccggcgccugcugggcaccuucacguggacccucagcgacuccgagggcaacgagacccccgggggcuacugccugacccgguggaugcugaucgaggccgagcucaagugcuucgggaacacggccguggcgaagugcaacgagaagcacgacgaggaguucugcgacaugcugcgccuguucgacuucugcaagcaggccauccggcgccucaagaccgaggcccagaugagcauccagcugaucaacaaggccgugaacgcccugaucaacgaccagcucaucaugaagaaccaccuccgggacaucaugggcauccccuacugcaacuacuccaaguacugcuaccugaaccacaccgucaccgggaagacgagccugccccgcugcugccugguguccaacggcagcuaccugaacgagacccacuucuccgacgacaucgagcagcaggcggacaacaugaucaccgagcuccugcagaaggaguacauggaccggcagggcaagaccccgcuggggcugguggaccucuucgucuucagcacguccuucuaccugaucagcaucuuccugcaccucaucaagaucccgacccaccgccacaucaccggcaagcccugccccaagccccaccggcugaaccacauggggaucugcuccugcggccuguacaagcacccgggggugcccgugaaguggaagcgcuga

SEQ ID NO: 39982 - RNA, 1473 nt, Artificial Sequence
  derived and/or modified CDS sequence (opt1) from LASV(ISTH2010-NIG-2012;Clade II)__AIT17482__GPCmut12
augggccagaucaucaccuucuuccaggaggugccccacgucaucgaggaggugaugaacaucgugcugaucgcccucagccugcuggccauccucaaggggaucuacaacgucgcgaccugcggccuguucgggcugguguccuuccuccugcugugcggccgcagcugcuccacgaccuacaaggggguguacgagcuccagacccuggagcuggacauggccagccucaacaugugcaugccgcuguccugcaccaagaacaacagccaccacuacaucauggucggcaacgagacgggccuggagcucacccugaccaacaccuccaucaucaaccacaaguucugcaaccugagcgacgcccacaagaagaaccucuacgaccacgcccugauguccaucaucagcacguuccaccuguccauccccaacuucaaccaguacgaggccaugagcugcgacuucaacgggggcaagaucuccgugcaguacaaccucagccacgcguacgccguggacgccgccaaccacugcgggaccaucgcgaacggcguccugcagaccuucaugcggauggccuggggcggguccuacaucgcccuggacagcggcaagggguccugggacugcaucaugaccagcuaccaguaccucaucauccagaacaucacgugggaggaccacugccaguucucccgccccagccccaucggcuaccuggggcugcucagccagcggacccgcgacaucuacaucucccggcgccugcugggcaccuucaccuggacgcucagcgacuccgagggcaacgagacccccgggggcuacugccugacccgguggaugcugaucgaggccgagcucaagugcuucgggaacaccgccguggcgaagugcaacgagaagcacgacgaggaguucugcgacaugcugcgccuguucgacuucugcaagcaggccauccggcgccucaagacggaggcccagaugagcauccagcugaucaacaaggccgugaacgcccugaucaacgaccagcucaucaugaagaaccaccuccgggacaucaugggcauccccuacugcaacuacuccaaguacugcuaccugaaccacaccgucaccgggaagaccagccugccccgcugcugccugguguccaacggcagcuaccugaacgagacgcacuucuccgacgacaucgagcagcaggcggacaacaugaucaccgagcuccugcagaaggaguacaucgaccggcagggcaagaccccgcuggggcugguggaccucuucgucuucagcaccuccuucuaccugaucagcaucuuccugcaccucgugaagaucccgacgcaccgccacguggucggcaagcccugccccaagccccaccggcugaaccacauggggaucugcuccugcggccuguacaagcacccgggggugcccgugaaguggaagcgcuga

SEQ ID NO: 39983 - RNA, 1473 nt, Artificial Sequence
  derived and/or modified CDS sequence (opt1) from LASV(Lassa virus/H.sapiens-wt/NGA/2015/ISTH_0543;Clade II)__AVO03639__GPCmut12
augggccagaucaucaccuucuuccaggaggugccccacgucaucgaggaggugaugaacaucgugcugaucgcccucagccugcuggccauccucaaggggaucuacaacgucgcgaccugcggccuguucgggcugguguccuuccuccugcugugcggccgcagcugcuccacgaccuacaaggggguguacgagcuccagacccuggagcuggacauggccaaccucaacaugugcaugccgcugagcugcaccaagaacaacucccaccacuacaucauggucggcaacgagacgggccuggagcucacccugaccaacaccagcaucaucaaccacaaguucugcaaccuguccgacgcccacaagaagaaccucuacgaccacgcccugaugagcaucaucuccacguuccaccugagcauccccaacuucaaccaguacgaggccauguccugcgacuucaacgggggcaagaucagcgugcaguacaaccucucccacaccuacgcgguggacgccgccaaccacugcgggaccaucgccaacggcguccugcagaccuucaugcggauggcguggggcgggagcuacaucgcccuggacuccggcaaggggagcugggacugcaucaugacguccuaccaguaccucgugauccagaacaccaccugggaggaccacugccaguucagccgccccucccccaucggcuaccuggggcugcucagccagcggacccgcgacaucuacaucagccggcgccugcugggcacguucaccuggacccucuccgacagcgagggcaacgagacccccgggggcuacugccugacgcgguggaugcugaucgaggccgagcucaagugcuucgggaacaccgccguggccaagugcaacgagaagcacgacgaggaguucugcgacaugcugcgccuguucgacuucugcaagcaggcgauccggcgccucaagaccgaggcccagauguccauccagcugaucaacaaggccgucaacgcccugaucaacgaccagcucaucaugaagaaccaccuccgggacaucaugggcaucccguacugcaacuacagcaaguacugcuaccugaaccacaccgugacggggaagaccucccugccccgcugcugccuggugagcaacggcuccuaccugaacgagacccacuucagcgacgacaucgagcagcaggccgacaacaugaucaccgagcuccugcagaaggaguacaucgaccggcagggcaagacgccccuggggcuggucgaccucuucguguucuccaccagcuucuaccugaucuccaucuuccugcaccucgugaagaucccgacccaccgccacaucaccggcaagcccugccccaagccccaccggcugaaccacauggggaucugcagcugcggccuguacaagcacccggggguccccgugaaguggaagcgcuga

SEQ ID NO: 39984 - RNA, 1473 nt, Artificial Sequence
  derived and/or modified CDS sequence (opt1) from LASV(Lassa virus/H.sapiens-wt/NGA/2016/ISTH_0009;Clade II)__AVO03571__GPCmut12
augggccagaucaucaccuucuuccaggaggugccccacgucaucgaggaggugaugaacaucgugcugaucgcccucagccugcuggccauccucaaggggaucuacaacgucgcgaccugcggccugcuggggcucguguccuuccugcugcucugcggccgcagcugcuccacgaccuacaaggggguguacgagcugcagacccuggagcucgacauggccagccugaacaugugcaugccgcuguccugcaccaagaacaacagccaccacuacaucauggucggcaacgagacgggccucgagcugacccugaccaacaccuccaucaucaaccacaaguucugcaaccucagcgacgcccacaagaagaaccuguacgaccacgcccugauguccaucaucagcacguuccaccucuccauccccaacuucaaccaguacgaggccaugagcugcgacuucaacgggggccggaucuccgugcaguacaaccugagccacuccuacgcgguggacgccgccaaccacugcgggaccaucgccaacggcguccugcagaccuucaugcgcauggcguggggcgggagcuacaucgcccucgacuccggcaaggggagcugggacugcaucaugaccuccuaccaguaccugaucauccagaacacgaccugggaggaccacugccaguucagccggcccagccccaucggcuaccuggggcuccugucccagcgcacccgggacaucuacaucagccgccggcugcucggcaccuucacguggacccuguccgacagcgagggcaacgagacccccgggggcuacugccugacccgcuggaugcucaucgaggccgagcugaagugcuucgggaacacggccguggccaagugcaacgagaagcacgacgaggaguucugcgacaugcugcggcuguucgacuucugcaagcaggcgauccgccggcugaagaccgaggcccagauguccauccagcugaucaacaaggccgugaacgcccucaucaacgaccagcugaucaugaagaaccaccuccgcgacaucaugggcauccccuacugcaacuacagcaaguacugcuaccucaaccacaccgucaccgggaagacgucccugccccggugcugccuggugagcaacggcuccuaccucaacgagacccacuucagcgacgacaucgagcagcaggccgacaacaugaucaccgagcugcugcagaaggaguacaucgaccgccagggcaagaccccgcuggggcucguggaccuguucgucuucuccacgagcuucuaccugaucuccaucuuccuccaccuggugaagaucccgacccaccggcacaucaccggcaagcccugccccaagccccaccgccugaaccacauggggaucugcagcugcggccucuacaaccacccgggggugcccgucaaguggaagcgguga

SEQ ID NO: 39985 - RNA, 1473 nt, Artificial Sequence
  derived and/or modified CDS sequence (opt1) from LASV(Lassa virus/H.sapiens-wt/NGA/2016/ISTH_0017;Clade II)__AVO03567__GPCmut12
augggccagaucaucaccuucuuccaggaggugccccacgucaucgaggaggugaugaacaucgugcugaucgcccucagccugcuggccauccucaaggggaucuacaacgucgcgaccugcggccuguucgggcugguguccuuccuccugcugugcggccgcagcugcuccacgaccuacaaggggguguacgagcuccagacccuggagcuggacauggccagccucaacaugugcaugccgcuguccugcaccaagaacaacagccaccacuacaucauggucggcaacgagacgggccuggagcucacccugaccaacaccuccaucaucaaccacaaguucugcaaccugagcgacgcccacaagaagaaccucuacgaccacgcccugauguccaucaucagcacguuccaccuguccauccccaacuucaaccaguacgaggccaugagcugcgacuucaacgggggcaagaucuccgugcaguacaaccucagccacaccuacgcgaucgacgccgccaaccacugcgggaccaucgccaacggcgugcugcagaccuucaugcggauggcguggggcggguccuacaucgcccuggacagcggcaagggguccugggacugcaucaugacgagcuaccaguaccucaucauccagaacaccaccugggaggaccacugccaguucucccgccccagccccaucggcuaccuggggcugcucagccagcggacccgcgacaucuacaucucccggcgccugcugggcacguucaccuggacccucagcgacuccgagggcaacgagacccccgggggcuacugccugacgcgguggaugcugaucgaggccgagcucaagugcuucgggaacaccgccgucgccaagugcaacgagaagcacgacgaggaguucugcgacaugcugcgccuguucgacuucugcaagcaggcgauccggcgccucaagaccgaggcccagaugagcauccagcugaucaacaaggccgugaacgcccugaucaacgaccagcucaucaugaagaaccaccuccgggacaucaugggcaucccguacugcaacuacuccaaguacugcuaccugaaccacaccgugacggggaagaccagccugccccgcugcugccuggucuccaacggcagcuaccugaacgagacccacuucuccgacgacaucgagcagcaggccgacaacaugaucaccgagcuccugcagaaggaguacauggaccggcagggcaagacgccccuggggcugguggaccucuucguguucagcaccuccuucuaccugaucagcaucuuccugcaccucguccgcaucccgacccaccggcacgugaucggcaagcccugccccaagccccaccgccugaaccacauggggaucugcuccugcggccuguacaagcacccgggggugcccgucaaguggaagcgguga

SEQ ID NO: 39986 - RNA, 1473 nt, Artificial Sequence
  derived and/or modified CDS sequence (opt1) from LASV(Lassa virus/H.sapiens-wt/NGA/2018/ISTH_0959;Clade II)__AVV65099__GPCmut12
augggccagaucaucaccuucuuccaggaggugccccacgucaucgaggaggugaugaacaucgugcugaucgcccucagccugcuggccauccucaaggggaucuacaacgucgugaccugcggccuguucgggcugguguccuuccuccugcugugcggccgcagcugcuccacgaccuacaagggggucuacgagcuccagacccuggagcuggacauggcgagccucaacaugugcaugccgcuguccugcaccaagaacaacagccaccacuacaucauggugggcaacgagacgggccuggagcucacccugaccaacaccuccaucaucaaccacaaguucugcaaccugagcgacgcccacaagaagaaccucuacgaccacgcccugauguccaucaucagcacguuccaccuguccauccccaacuucaaccaguacgaggccaugagcugcgacuucaacgggggcaagaucuccgugcaguacaaccucagccacgccuacgcgaucgacgccgccaaccacugcgggaccaucgccaacggcguccugcagaccuucaugcggauggcguggggcggguccuacaucgcccuggacagcggcaagggguccugggacugcaucaugaccagcuaccaguaccucaucauccagaacacgaccugggaggaccacugccaguucucccgccccagccccaucggcuaccuggggcugcucagccagcggacccgcgacaucuacaucucccggcgccugcugggcaccuucacguggacccucagcgacuccgagggcaacgagacccccgggggcuacugccugacccgguggaugcugaucgaggccgagcucaagugcuucgggaacacggccguggccaagugcaacgagaagcacgacgaggaguucugcgacaugcugcgccuguucgacuucugcaagcaggcgauccggcgccucaagaccgaggcccagaugagcauccagcugaucaacaaggccgugaacgcccugaucaacgaccagcucaucaugaagaaccaccuccgggacaucaugggcauccccuacugcaacuacuccaaguacugcuaccugaaccacaccgucaccgggaagacgagccugccccgcugcugccugguguccaacggcagcuaccugaacgagacccacuucuccgacgacaucgagcagcaggccgacaacaugaucaccgagcuccugcagaaggaguacaucgaccggcagggcaagaccccgcuggggcugguggaccucuucgucuucagcacguccuucuaccugaucagcaucuuccugcaccucgugaagaucccgacccaccgccacgugaucggcaagcccugccccaagccccaccggcugaaccacauggggaucugcuccugcggccuguacaagcacccggggguccccgugaaguggaagcgcuga

SEQ ID NO: 39987 - RNA, 1473 nt, Artificial Sequence
  derived and/or modified CDS sequence (opt1) from LASV(LASV003-NIG-2008;Clade II)__AIT17580__GPCmut12
augggccagaucaucaccuucuuccaggaggugccccacgucaucgaggaggugaugaacaucgugcugaucgcccucagccugcuggccauccucaaggggaucuacaacgucgcgaccugcggccuguucgggcugguguccuuccuccugcugugcggccgcagcugcuccacgaccuacaaggggguguacgagcuccagacccuggagcuggacauggccagccucaacaugugcaugccgcuguccugcaccaagaacaacagccaccacuacaucauggucggcaacgagacgggccuggagcucacccugaccaacaccuccaucaucaaccacaaguucugcaaccugagcgacgcccacaagaagaaccucuacgaccacgcccugauguccaucaucagcacguuccaccuguccauccccaacuucaaccaguacgaggccaugagcugcgacuucaacgggggcaagaucuccgugcaguacaaccucagccacaccuacgcgguggacgccgccaaccacugcgggaccaucgccaacggcguccugcagaccuucaugcggauggcguggggcggguccuacaucgcccuggacagcggcaagggguccugggacugcaucaugacgagcuaccaguaccucaucauccagaacaccaccugggaggaccacugccaguucucccgccccagccccaucggcuaccuggggcugcucagccagcggacccgcgacaucuacaucucccggcgccugcugggcacguucaccuggacccucagcgacuccgagagcaacgagaccccgggcggguacugccugacgcgguggaugcugaucgaggccgagcucaagugcuucggcaacaccgccguggccaagugcaacgagaagcacgacgaggaguucugcgacaugcugcgccuguucgacuucugcaagcaggcgauccggcgccucaaggccgaggcccagauguccauccagcugaucaacaaggccgugaacgcccugaucaacgaccagcucaucaugaagaaccaccuccgggacaucauggggauccccuacugcaacuacagcaaguacugcuaccugaaccacaccgucaccggccgcacgucccugccccggugcugccuggugagcaacggguccuaccugaacgagacccacuucagcgacgacaucgagcagcaggcggacaacaugaucaccgagcuccugcagaaggaguacauggaccgccagggcaagacgccccugggccugguggaccucuucgucuucuccaccagcuucuaccugaucuccaucuuccugcaccucgugaagaucccgacccaccggcacgugaucgggaagcccugccccaagccccaccgccugaaccacaugggcaucugcagcugcgggcuguacaagcacccgggcguccccgugaaguggaagcgguga

SEQ ID NO: 39988 - RNA, 1473 nt, Artificial Sequence
  derived and/or modified CDS sequence (opt1) from LASV(LASV035-NIG-2009;Clade II)__AIT17588__GPCmut12
augggccagaucaucaccuucuuccaggaggugccccacgucaucgaggaggugaugaacaucgugcugaucgcccucagccugcuggccauccucaaggggaucuacaacgucgcgaccugcggccuguucgggcugguguccuuccuccugcugugcggccgcagcugcuccacgaccuacaaggggguguacgagcuccagacccuggagcuggacauggccagccucaacaugugcaugccgcuguccugcaccaagaacaacagccaccacuacaucauggucggcaacgagacgggccuggagcucacccugaccaacaccuccaucaucaaccacaaguucugcaaccugagcgacgcccacaagaagaaccucuacgaccacgcccugauguccaucaucagcacguuccaccuguccauccccaacuucaaccaguacgaggccaugagcugcgacuucaacgggggcaagaucuccgugcaguacaaccucagccacgcguacgccguggacgccgccaaccacugcgggaccaucgcgaacggcguccugcagaccuucaugcggauggccuggggcggguccuacaucgcccuggacagcggcaagggguccugggacugcaucaugaccagcuaccaguaccucaucauccagaacacgaccugggaggaccacugccaguucucccgccccagccccaucggcuaccuggggcugcucagccagcggacccgcgacaucuacaucucccggcgccugcugggcaccuucacguggacccucagcgacuccgagggcaacgagacccccgggggcuacugccugacccgguggaugcugaucgaggccgagcucaagugcuucgggaacacggccguggcgaagugcaacgagaagcacgacgaggaguucugcgacaugcugcgccuguucgacuucugcaagcaggccauccggcgccucaaggccgaggcccagaugagcauccagcugaucaacaaggccgugaacgcgcugaucaacgaccagcucaucaugaagaaccaccuccgggacaucaugggcauccccuacugcaacuacuccaaguacugcuaccugaaccacaccgucaccgggaagaccagccugccccgcugcugccugguguccaacggcagcuaccugaacgagacgcacuucuccgacgacaucgagcagcaggccgacaacaugaucaccgagcuccugcagaaggaguacaucgaccggcagggcaagaccccgcuggggcugguggaccucuucgucuucagcaccuccuucuaccugaucagcaucuuccugcaccucgugaagaucccgacgcaccgccacgugaucggcaagcccugccccaagccccaccggcugaaccacauggggaucugcuccugcggccuguacaagcacccggggguccccgugaaguggaagcgcuga

SEQ ID NO: 39989 - RNA, 1473 nt, Artificial Sequence
  derived and/or modified CDS sequence (opt1) from LASV(LASV1000-NIG-2009;Clade II)__AIT17782__GPCmut12
augggccagaucaucaccuucuuccaggaggugccccacgucaucgaggaggugaugaacaucgugcugaucgcccucagccugcuggccauccucaaggggaucuacaacgucgcgaccugcggccuguucgggcugguguccuuccuccugcugugcggccgcagcugcuccacgaccuacaaggggguguacgagcuccagacccuggagcuggacauggccagccucaacaugugcaugccgcuguccugcaccaagaacaacagccaccacuacaucauggucggcaacgagacgggccuggagcucacccugaccaacaccuccaucaucaaccacaaguucugcaaccugagcgacgcccacaagaagaaccucuacgaccacgcccugauguccaucaucagcacguuccaccuguccauccccaacuucaaccaguacgaggccaugagcugcgacuucaacgggggcaagaucuccgugcaguacaaccucagccacaccuacgcgguggacgccgccaaccacugcgggaccaucgccaacggcguccugcagaccuucaugcggauggcguggggcggguccuacaucgcccuggacagcggcaagggguccugggacugcaucaugacgagcuaccaguaccucaucauccagaacaccaccugggaggaccacugccaguucucccgccccagccccaucggcuaccuggggcugcucagccagcggacccgcgacaucuacaucucccggcgccugcugggcacguucaccuggacccucagcgacuccgagggcaacgagacccccgggggcuacugccugacgcgguggaugcugaucgaggccgagcucaagugcuucgggaacaccgccguggccaagugcaacgagaagcacgacgaggaguucugcgacaugcugcgccuguucgacuucugcaagcaggcgaucaagcggcucaagaccgaggcccagaugagcauccagcugaucaacaaggccgugaacgcccugaucaacgaccagcucaucaugaagaaccaccuccgcgacaucaugggcaucccguacugcaacuacuccaaguacugcuaccugaaccacaccgucacggggaagaccagccugccccggugcugccugguguccaacggcagcuaccugaacgagacccacuucuccgacgacaucgagcagcaggccgacaacaugaucaccgagcuccugcagaaggaguacaucgaccgccagggcaagacgccccuggggcugguggaccucuucgucuucagcaccuccuucuaccugaucagcaucuuccugcaccucgugaagaucccgacccaccggcacguggucggcaagcccugccccaagccccaccgccugaaccacauggggaucugcuccugcggccuguacaagcacccgggggugcccgugaaguggaagcgguga

SEQ ID NO: 39990 - RNA, 1473 nt, Artificial Sequence
  derived and/or modified CDS sequence (opt1) from LASV(LASV221-NIG-2010;Clade II)__AIT17624__GPCmut12
augggccagaucaucaccuucuuccaggaggugccccacgucaucgaggaggugaugaacaucgugcugaucgcccucagccugcuggccauccucaaggggaucuacaacgucgcgaccugcggccuguucgggcugguguccuuccuccugcugugcggccgcagcugcuccacgaccuacaaggggguguacgagcuccagacccuggagcuggacauggccagccucaacaugugcaugccgcuguccugcaccaagaacaacagccaccacuacaucauggucggcaacgagacgggccuggagcucacccugaccaacaccuccaucaucaaccacaaguucugcaaccugagcgacgcccacaagaagaaccucuacgaccacgcccugauguccaucaucagcacguuccaccuguccauccccaacuucaaccaguacgaggccaugagcugcgacuucaacgggggcaagaucuccgugcaguacaaccucagccacaccuacgcgaucgacgccgccaaccacugcgggaccaucgccaacggcgugcugcagaccuucaugcggauggcguggggcggguccuacaucgcccuggacagcggcaagggguccugggacugcaucaugacgagcuaccaguaccucaucauccagaacaccaccugggaggaccacugccaguucucccgccccagccccaucggcuaccuggggcugcucagccagcggacccgcgacaucuacaucucccggcgccugcugggcacguucaccuggacccucagcgacuccgagggcaacgagacccccgggggcuacugccugacgcgguggaugcugaucgaggccgagcucaagugcuucgggaacaccgccgucgccaagugcaacgagaagcacgacgaggaguucugcgacaugcugcgccuguucgacuucugcaagcaggcgauccggcgccucaagaccgaggcccagaugagcauccagcugaucaacaaggccgugaacgcccugaucaacgaccagcucaucaugaagaaccaccuccgggacaucaugggcaucccguacugcaacuacuccaaguacugcuaccugaaccacaccgugacggggaagaccagccugccccgcugcugccuggucuccaacggcagcuaccugaacgagacccacuucuccgacgacaucgagcagcaggccgacaacaugaucaccgagaugcuccagaaggaguacauggaccggcagggcaagacgccccuggggcugguggaccuguucguguucagcaccuccuucuaccucaucagcaucuuccugcaccuggucaagaucccgacccaccgccacgugaucggcaagcccugccccaagccccaccggcucaaccacauggggaucugcuccugcggccuguacaagcacccgggggugcccgucaaguggaagcgcuga

SEQ ID NO: 39991 - RNA, 1473 nt, Artificial Sequence
  derived and/or modified CDS sequence (opt1) from LASV(LASV237-NIG-2010;Clade II)__AIT17638__GPCmut12
augggccagaucaucaccuucuuccaggaggugccccacgucaucgaggaggugaugaacaucgugcugaucgcccucagccugcuggccauccucaaggggaucuacaacgucgcgaccugcggccuguucgggcugguguccuuccuccugcugugcggccgcagcugcuccacgaccuacaaggggguguacgagcuccagacccuggagcuggacauggccagccucaacaugugcaugccgcuguccugcaccaagaacaacagccaccacuacaucauggucggcaacgagacgggccuggagcucacccugaccaacaccuccaucaucaaccacaaguucugcaaccugagcgacgcccacaagaaggaccucuacgaccacgcccugauguccaucaucagcacguuccaccuguccauccccaacuucaaccaguacgaggccaugagcugcgacuucaacgggggcaagaucuccgugcaguacaaccucagccacaccuacgcgguggacgccgccaaccacugcgggaccaucgccaacggcguccugcagaccuucaugcggauggcguggggcggguccuacaucgcccuggacagcggcaagggguccugggacugcaucaugacgagcuaccaguaccucaucauccagaacaccaccugggaggaccacugccaguucucccgccccagccccaucggcuaccuggggcugcucagccagcggacccgcgacaucuacaucucccggcgccugcugggcacguucaccuggacccucagcgacuccgagggcaacgagacccccgggggcuacugccugacgcgguggaugcugaucgaggccgagcucaagugcuucgggaacaccgccguggccaagugcaacgagaagcacgacgaggaguucugcgacaugcugcgccuguucgacuucugcaagcaggcgauccggcgccucaagaccgaggcccagaugagcauccagcugaucaacaaggccgugaacgcccugaucaacgaccagcucaucaugaagaaccaccuccgggacaucaugggcaucccguacugcaacuacuccaaguacugcuaccugaaccacaccgucacggggaagaccagccugccccgcugcugccugguguccaacggcagcuaccugaacgagacccacuucuccgacgacaucgagcagcaggccgacaacaugaucaccgagcuccugcagaaggaguacauggaccggcagggcaagacgccccuggggcugguggaccucuucgucuucagcaccuccuucuaccugaucagcaucuuccugcaccucaucaagaucccgacccaccgccacaucaccggcaagcccugccccaagccccaccggcugaaccacauggggaucugcuccugcggccuguacaagcacccgggggugcccgugaaguggaagcgcuga

SEQ ID NO: 39992 - RNA, 1473 nt, Artificial Sequence
  derived and/or modified CDS sequence (opt1) from LASV(LASV253-NIG-2011;Clade II)__AIT17670__GPCmut12
augggccagaucaucaccuucuuccaggaggugccccacgucaucgaggaggugaugaacaucgugcugaucgcccucagccugcuggccauccucaaggggaucuacaacgucgcgaccugcggccuguucgggcugguguccuuccuccugcugugcggccgcagcugcuccacgaccuacaaggggguguacgagcuccagacccuggagcuggacauggccagccucaacaugugcaugccgcuguccugcaccaagaacaacagccaccacuacaucauggucggcaacgagacgggccuggagcucacccugaccaacaccuccaucaucaaccacaaguucugcaaccugagcgacgcccacaagaagaaccucuacgaccacgcccugauguccaucaucagcacguuccaccuguccauccccaacuucaaccaguacgaggccaugagcugcgacuucaacgggggcaagaucuccgugcaguacaaccucagccacaccuacgcgguggacgccgccaaccacugcgggaccaucgccaacggcguccugcagaccuucaugcggauggcguggggcggguccuacaucgcccuggacagcggcaagggguccugggacugcaucaugacgagcuaccaguaccucaucauccagaacaccaccugggaggaccacugccaguucucccgccccagccccaucggcuaccuggggcugcucagccagcggacccgcgacaucuacaucucccggcgccugcugggcacguucaccuggacccucagcgacuccgagggcaacgagacccccgggggcuacugccugacgcgguggaugcugaucgaggccgagcucaagugcuucgggaacaccgccguggccaagugcaacgagaagcacgacgaggaguucugcgacaugcugcgccuguucgacuucugcaagcaggcgauccggcgccucaaggccgaggcccagaugagcauccagcugaucaacaaggccgugaacgcccugaucaacgaccagcucaucaugaagaaccaccuccgggacaucaugggcauccccuacugcaacuacuccaaguacugcuaccugaaccacaccgucaccgggcgcacgagccugccccggugcugccugguguccaacggcagcuaccugaacgagacccacuucuccgacgacaucgagcagcaggcggacaacaugaucaccgagcuccugcagaaggaguacaucgaccgccagggcaagaccccgcuggggcugguggaccucuucgucuucagcacguccuucuaccugaucagcaucuuccugcaccucgugaagaucccgacccaccggcacaucaucggcaagcccugccccaagccccaccgccugaaccacauggggaucugcuccugcggccuguacaagcacccgggggugcccgucaaguggaagcgguga

SEQ ID NO: 39993 - RNA, 1473 nt, Artificial Sequence
  derived and/or modified CDS sequence (opt1) from LASV(LASV254-NIG-2011;Clade II)__AIT17674__GPCmut12
augggccagaucaucaccuucuuccaggaggugccccacgucaucgaggaggugaugaacaucgugcugaucgcccucagccugcuggccauccucaaggggaucuacaacgucgcgaccugcggccuguucgggcugguguccuuccuccugcugugcggccgcagcugcuccacgaccuacaaggggguguacgagcuccagacccuggagcuggacaugaccaaccucaacaugugcaugccgcugagcugcacgaagaacaacucccaccacuacaucauggucggcaacgagaccggccuggagcucacccugaccaacacgagcaucaucaaccacaaguucugcaaccuguccgacgcccacaagaagaaccucuacaaccacgcccugaugagcaucaucuccaccuuccaccugagcauccccaacuucaaccaguacgaggccauguccugcgacuucaacgggggcaagaucagcgugcaguacaaccucucccacagcuacgccguggacgcggccaaccacugcgggaccaucgccaacggcguccugcagaccuucaugcggauggccuggggcggguccuacaucgcgcuggacagcggcaaggggaacugggacugcaucaugacguccuaccaguaccucaucauccagaacaccaccugggaggaccacugccaguucagccgccccucccccaucggcuaccuggggcugcucagccagcggacccgcgacaucuacaucagccggcgccugcugggcacguucaccuggacccucuccgacagcgagggcaacgagacccccgggggcuacugccugacgcgguggaugcugaucgaggccgagcucaagugcuucgggaacaccgccguggccaagugcaacgagaagcacgacgaggaguucugcgacaugcugcgccuguucgacuucugcaagcaggccauccggcgccucaagaccgaggcgcaggccaacauccagcugaucaacaaggccgugaacgcccugaucaacgaccagcucaucaugaagaaccaccuccgggacaucaugggcaucccguacugcaacuacuccaaguacugcuaccugaaccacaccgucacggggaagaccagccugccccgcugcugccugguguccaacggcagcuaccugaacgagacccacuucuccgacgacaucgagcagcaggccgacaacaugaucaccgagcuccugcagaaggaguacauggaccggcagggcaagacgccccuggggcugguggaccucuucgucuucagcaccuccuucuaccugaucagcaucuuccugcaccucgugaagaucccgacccaccgccacgugaucggcaagcccugccccaagccccaccggcugaaccacauggggaucugcuccugcggccuguacaagcacccggggguccccgugaaguggaagcgcuga

SEQ ID NO: 39994 - RNA, 1473 nt, Artificial Sequence
  derived and/or modified CDS sequence (opt1) from LASV(Nig08-A19;Clade III)__ADU56618__GPCmut12
augggccagaucgugaccuucuuccaggaggucccccacgugaucgaggaggugaugaacaucguccugaucgcccucagcauccuggccauccugaaggggcucuacaacaucgcgaccugcggccugaucgggcuggugacguuccuccugcuguccggccgcagcugcuccaugaccuacaaggggguguacgagcuccagacccuggagcugaacaugaacacccucaacaugugcaugccgcugagcugcacgaagaacaacucccaccacuacaucauggucggcaacgagaccggccuggagcucacccugaccaacacgagccugcuccaccacaaguucugcaaccuguccgacgcccacaagaagaaccuguacgaccacacccucaugagcaucaucuccaccuuccaccugagcauccccaacuucaaccaguacgaggccauguccugcgacuucaacgggggcaagaucaccgugcaguacaaccugagccacuccuacgccaucgacgccgcgaaccacugcgggacgguggccaacggcguccuccagaccuucaugcggauggccuggggcgggagcuacaucgcccuggacuccggccgcgggaagugggacugcaucaugaccagcuaccaguaccugaucauccagaacaccacgugggaggaccacugccaguucucccggcccagccccaucggcuaccucgggcugcugucccagcgcacccgggacaucuacaucagccgccggcuccugggcaccuucaccuggacgcugagcgacuccgagggcaacgagacccccgggggcuacugccucacccgcuggaugcugaucgaggcggagcugaagugcuucgggaacaccgccguggccaagugcaacgagaagcacgacgaggaguucugcgacaugcuccggcuguucgacuucugcaagcaggccauccgccggcugaaggccgaggcgcagaugagcauccagcucaucaacaaggccgugaacgcccugaucaacgaccagcugaucaugaagaaccaccuccgcgacaucaugggcauccccuacugcaacuacuccaaguacugcuaccugaaccacacgagcaccgggcggaccucccugccccgcugcugccucgucagcaacggcuccuaccugaacgagacccacuucagcgacgacaucgagcagcaggccgacaacaugaucacggagaugcugcagaaggaguaccuggaccggcagggcaagaccccgcucgggcugguggaccuguucguguucuccaccagcuucuaccucaucuccaucuuccugcaccuggucaagaucccgacccaccgccacaucgugggcaagcccugccccaagccccaccggcucaaccacauggggaucugcagcugcggccuguacaagcagccgggggugcccguccgcuggaagcgguga

SEQ ID NO: 39995 - RNA, 1476 nt, Artificial Sequence
  derived and/or modified CDS sequence (opt1) from LASV(G1180-SLE-2010;Clade IV)__AIT17168__GPCmut12
augggccagaucgugaccuucuuccaggaggucccccacgugaucgaggaggugaugaacaucguccugaucgcccucagcauccuggccgugcugaaggggcucuacaacuucgcgaccugcggccugguggggcugcucacguuccugcugcucugcggccgcuccugcaccgccagccgguacaagggggucuacgagcugcagacccuggagcucaacauggagacccugaacaugugcaugccgcuguccugcacgaagaacaacagccaccacuacaucauggugggcaacgagaccggccucgagcugacccugaccaacacguccaucaucaaccacaaguucugcaaccucagcgacgcccacaagaagaaccuguacgaccacgcccugauguccaucaucagcaccuuccaccucuccauccccaacuucaaccaguacgaggccaugagcugcgacuucaacgggggcaagaucuccgugcaguacaaccugagccacuccuacgcgggggacgccgccaaccacugcggcaccgucgccaacggggugcugcagaccuucaugcgcauggcguggggcggcagcuacaucgcccucgacuccgggcacggcagcugggacugcaucaugacguccuaccaguaccugaucauccagaacaccaccugggaggaccacugccaguucagccggcccucccccaucggguaccugggccuccugagccagcgcacccgggacaucuacaucagccgccggcugcucggcacguucaccuggacccuguccgacagcgaggggaaggacaccccgggcggguacugccugacgcgcuggaugcucaucgaggccgagcugaagugcuucggcaacaccgccguggccaagugcaacgagaagcacgacgaggaguucugcgacaugcugcggcuguucgacuucugcaagcaggcgauccagcgccugaaggccgaggcccagauguccauccagcugaucaacaaggccgucaacgcccucaucaacgaccagcugaucaugaagaaccaccuccgggacaucauggggauccccuacugcaacuacagcaaguacugcuaccucaaccacaccaccacgggcaagaccucccugcccaagugcugccuggugagcaacggcuccuaccucaacgagacccacuucagcgacgacaucgagcagcaggcggacaacaugaucaccgagaugcugcagaaggaguacauggagcgccaggggaagacgccccugggccugguggaccucuucgucuucuccaccagcuucuaccugaucuccaucuuccugcaccucgugaagaucccgacccaccggcacaucgugggcaagagcugccccaagccccaccgccugaaccacauggggaucugcuccugcgggcuguacaagcagcccggcgucccggugaaguggaagcgguga

SEQ ID NO: 39996 - RNA, 1476 nt, Artificial Sequence
  derived and/or modified CDS sequence (opt1) from LASV(G1442-SLE-2011;Clade IV)__AIT17180__GPCmut12
augggccagaucgugaccuucuuccaggaggucccccacgugaucgaggaggugaugaacaucguccugaucgcccucagcauccuggccgugcugaaggggcucuacaacguggcgaccugcggccugaucgggcuggucaccuuccuccugcugugcggccgcuccugcaccaccacccucuacaaggggguguacgagcugcagacgcuggagcucaacauggagacccugaacaugugcaugccgcugagcugcaccaagaacaacucccaccacuacauccgggugggcaacgagaccggccucgagcugacgcugaccaacaccagcaucaucaaccacaaguucugcaaccucuccgacgcccacaagaagaaccuguacgaccacgcccugaugagcaucaucuccaccuuccaccucagcauccccaacuucaaccaguacgaggccauguccugcgacuucaacgggggcaagaucagcguccaguacaaccugucccacagcuacgccggggacgcggccaaccacugcggcacgguggccaacggggugcugcagaccuucaugcgcauggccuggggcggcuccuacaucgcgcucgacagcgggcggggcaacugggacugcaucaugaccuccuaccaguaccugaucauccagaacaccacgugggacgaccacugccaguucagccgccccucccccaucggguaccugggccuccugagccagcggacccgcgacgucuacaucucccggcgccugcucggcaccuucaccuggacgcugagcgacagcgaggggaaggacaccccgggcggguacugccugacccgguggaugcucaucgaggccgagcugaagugcuucggcaacaccgccguggccaagugcaacgagaagcacgacgaggaguucugcgacaugcugcgccucuucgacuucugcaagcaggccauccagcggcugaaggcggaggcccagauguccauccagcugaucaacaaggccgugaacgcccucaucaacgaccagcugaucaugaagaaccaccuccgcgacaucauggggauccccuacugcaacuacagcaaguacugcuaccugaacaacacggccaccggcaagaccucccugcccaagugcugccugaucagcaacggcuccuaccucaacgagacccacuucagcgacgacaucgagcaggaggcggacaacaugaucacggagaugcugcagaaggaguacauggagcggcaggggaagacgccccugggccuggucgaccucuucguguucuccaccagcuucuaccugaucuccaucuuccugcaccucgugaagaucccgacccaccgccacaucgucggcaagagcugccccaagccccaccggcugaaccacauggggaucugcuccugcgggcuguacaagcagcccggcgugccggugcgcuggaagcgguga

SEQ ID NO: 39997 - RNA, 1476 nt, Artificial Sequence
  derived and/or modified CDS sequence (opt1) from LASV(G3010-SLE-2013;Clade IV)__AIT17344__GPCmut12
augggccagaucgugaccuucuuccaggaggucccccacgugaucgaggaggugaugaacaucguccugaucgcccucagcauccuggccgugcugaaggggcucuacaacuucgcgaccugcggccugguggggcuggucacguuccuccugcugugcggccgcuccugcaccaccagccucuacaaggggguguacgagcugcagacccuggagcucaacauggagacgcugaacaugugcaugccgcuguccugcaccaagaacaacagccaccacuacaucauggugggcaacgagaccggccucgagcugacccugacgaacaccuccaucaucaaccacaaguucugcaaccucagcgacgcccacaagaagaaccuguacaaccacgcccugauguccaucaucagcaccuuccaccucuccauccccaacuucaaccaguacgaggccaugagcugcgacuucaacgggggcaagaucuccguccaguacaaccugagccacuccuacgccggggacgcggccagccacugcggcaccguggccaacggggugcugcagacguucaugcggauggccuggggcggcuccuacaucgcgcucgacagcggguacggcaagugggacugcaucaugaccuccuaccaguaccugaucauccagaacaccaccugggaggaccacugccaguucagccgccccucccccaucggguaccugggccuccugagccagcggacgcgcgacaucuacaucagccggcgccugcucggcaccuucaccuggacccuguccgacagcgaggggaaggacacgccgggcggguacugccugacccgguggaugcucaucgaggccgagcugaagugcuucggcaacaccgccgucgccaagugcaacgagaagcacgacgaggaguucugcgacaugcugcgccucuucgacuucugcaagcaggccauccagcggcugaagaccgaggcgcagauguccauccagcugaucaacaaggccgugaacgcccucaucaacgaccagcugaucaugaagaaccaccuccgcgacaucauggggauccccuacugcaacuacagcaaguacugcuaccugaaccacacgaccaccggcaagaccucccugcccaagugcugccuggugagcaacggcuccuaccucaacgagacgcacuucagcgacgacaucgagcagcaggccgacaacaugaucaccgagaugcugcagaaggaguacauggagcggcaggggaagacgccccugggccuggucgaccucuucguguucuccaccagcuucuaccugaucuccaucuuccugcaccucgugaagaucccgacccaccgccacaucgucggcaagagcugccccaagccccaccggcugaaccacauggggaucugcuccugcgggcuguacaagcagcccggcgugccggugcgcuggaagcgguga

SEQ ID NO: 39998 - RNA, 1476 nt, Artificial Sequence
  derived and/or modified CDS sequence (opt1) from LASV(G502-SLE-2009;Clade IV)__AIT17126__GPCmut12
augggccagaucgugaccuucuuccaggaggucccccacgugaucgaggaggugaugaacaucguccugaucgcccucagcauccuggccgugcugaaggggcucuacaacuucgcgaccugcggccugguggggcugcucacguuccugcugcucugcggccgcuccugcaccaccgggcuguacaagggcgucuacgagcugcagacccucgagcugaacauggagacgcugaacaugugcaugccgcucagcugcaccaagaacaacucccaccacuacaucauggugggcaacgagaccgggcuggagcugacccucacgaacaccagcaucaucaaccacaaguucugcaaccuguccgacgcccacaagaagaaccuguacgaccacgcccucaugagcaucaucuccaccuuccaccugagcauccccaacuucaaccaguacgaggccauguccugcgacuucaacggcgggaagaucagcgugcaguacaaccugucccacagcuacgccggcgacgcggccgaccacugcgggaccgucgccaacggcgugcuccagacguucaugcggauggccuggggcggguccuacaucgcgcuggacagcggccgcgggcggugggacugcaucaugaccuccuaccaguaccugaucauccagaacaccaccugggaggaccacugccaguucagccgccccucccccaucggcuaccucggccugcugagccagcggacgcgcgacaucuacaucucccggcgccuccuggggaccuucaccuggacccugagcgacagcgagggcaaggacacgcccgggggcuacugccucacccgguggaugcugaucgaggccgagcugaagugcuucgggaacaccgccguggccaagugcaacgagaagcacgacgaggaguucugcgacaugcuccgccuguucgacuucugcaagcaggccauccagcggcugaaggcggaggcccagauguccauccagcucaucaacaaggccgucaacgcccugaucaacgaccagcuggugaugaagaaccaccuccgcgacaucaugggcauccccuacugcaacuacagccgguacugcuaccugaaccacaccacgaccggccgcaccucccugcccaagugcugccucgugagcaacggguccuaccugaacgagacccacuucagcgacgacaucgagcagcaggccgacaacaugaucacggagaugcugcagaaggaguacauggagcggcagggcaagaccccgcuggggcucgucgaccuguucguguucuccaccagcuucuaccugaucuccaucuuccuccaccuggugaagaucccgacccaccgccacaucgucggcaagagcugccccaagccccaccggcugaaccacauggggaucugcuccugcggccucuacaagcagcccggcgugccggugaaguggaagcgcuga

SEQ ID NO: 39999 - RNA, 1476 nt, Artificial Sequence
  derived and/or modified CDS sequence (opt1) from LASV(G733-SLE-2010;Clade IV)__AIT17154__GPCmut12
augggccagaucgugaccuucuuccaggaggucccccacgugaucgaggaggugaugaacaucguccugaucgcccucagcauccuggccgugcugaaggggcucuacaacuucgcgaccugcggcaucguggggcuggucuccuuccugcuccugugcggccgcagcugcacgaccucccuguacaaggggguguacgagcuccagacccuggagcugaacauggagacccucaacaugugcaugccgcugagcugcacgaagaacaacucccaccacuacaucauggugggcaacgagaccggccuggagcucacccugaccaacacgagcaucaucaaccacaaguucugcaaccuguccgacgcccacaagaagaaccucuacgaccacgcccugaugagcaucaucuccaccuuccaccugagcauccccaacuucaaccaguacgaggccauguccugcgacuucaacgggggcaagaucagcguccaguacaaccucucccacagcuacgccggggacgcggccaaccacugcggcaccaucgccaacggggugcugcagaccuucaugcggauggccuggggcggcuccuacaucgcgcuggacagcgggcgcgaccggugggacugcaucaugacguccuaccaguaccucaucauccagaacaccaccugggaggaccacugccaguucagccgccccucccccaucggcuaccuggggcugcucagccagcggacccgcgacaucuacaucagccggcgccugcugggcacguucaccuggacccucuccgacagcgagggcaaggacacccccgggggcuacugccugacgcgguggaugcugaucgaggccgagcucaagugcuucgggaacaccgccguggccaagugcaacgagaagcacgacgaggaguucugcgacaugcugcgccuguucgacuucugcaagcaggccauccagcggcucaaggcggaggcccagauguccauccagcugaucaacaaggccgucaacgcccugaucaacgaccagcucaucaugaagaaccaccuccgcgacaucaugggcaucccguacugcaacuacagcaaguacugcuaccugaaccacaccaccacggggaagaccucccugcccaagugcugccuggugagcaacggcuccuaccugaacgagacccacuucagcgacgacaucgagcagcaggccgacaacaugaucaccgagaugcuccagaaggaguacauggagcggcagggcaagacgccccuggggcugguggaccuguucgucuucuccaccagcuucuaccucaucuccaucuuccugcaccuggugaagaucccgacccaccgccacguggucggcaagagcugccccaagccccaccggcucaaccacauggggaucugcuccugcggccuguacgggcagcccggcgugccggugaaguggaagcgcuga

SEQ ID NO: 40000 - RNA, 1476 nt, Artificial Sequence
  derived and/or modified CDS sequence (opt1) from MOPV/LASV reassortant(IGS-1;Clade IV)__AFY05576__GPCmut12
augggccagaucgugaccuucuuccaggaggucccccacgugaucgaggaggugaugaacaucguccugaucgcccucagcgugcuggccgugcugaaggggcucuacaacuucgcgaccugcggccuggucgggcuggugaccuuccuccugcugugcggccgcuccugcaccaccagccucuacaaggggguguacgagcugcagacccuggagcucaacauggagacgcugaacaugugcaugccgcuguccugcaccaagaacaacagccaccacuacaucauggucggcaacgagaccggccucgagcugacccugacgaacaccuccaucaucaaccacaaguucugcaaccucagcgacgcccacaagaagaaccuguacgaccacgcccugauguccaucaucagcaccuuccaccucuccauccccaacuucaaccaguacgaggccaugagcugcgacuucaacgggggcaagaucuccgugcaguacaaccugagccacuccuacgccggggacgcggccaaccacugcggcaccguggccaacgggguccugcagacguucaugcggauggccuggggcggcagcuacaucgcgcucgacuccgggcgcggcaacugggacugcaucaugaccagcuaccaguaccugaucauccagaacaccaccugggaggaccacugccaguucucccggcccagccccaucggguaccugggccuccugucccagcgcacgcgggacaucuacaucagccgccggcugcucggcaccuucaccuggacccugagcgacuccgagggggaggacacgccgggcggguacugccugacccgcuggaugcucaucgaggccgagcugaagugcuucggcaacaccgccguggccaagugcaacgagaagcacgacgaggaguucugcgacaugcugcggcuguucgacuucugcaagcaggccauccagcgccugaaggcggaggcccagaugagcauccagcugaucaacaaggccgugaacgcccucaucaacgaccagcugaucaugaagaaccaccuccgggacaucauggggauccccuacugcaacuacuccaaguacugcuaccucaaccacaccacgaccggccgcaccagccugcccaagugcugccuggucuccaacggcagcuaccucaacgagacccacuucuccgacgacaucgagcagcaggccgacaacaugaucacggagaugcugcagaaggaguacauggagcggcaggggaagacgccccugggccugguggaccucuucguguucagcaccuccuucuaccugaucagcaucuuccugcaccucgucaagaucccgacccaccgccacaucguggggaaguccugccccaagccccaccggcugaaccacaugggcaucugcagcugcgggcuguacaagcagcccggcgugccggucaaguggaagcgcuga

SEQ ID NO: 40001 - RNA, 1476 nt, Artificial Sequence
  derived and/or modified CDS sequence (opt1) from LASV(LM765-SLE-2012;Clade IV)__AIT17814__GPCmut12
augggccagaucgugaccuucuuccaggaggucccccacgugaucgaggaggugaugaacaucguccugaucgcccucagcauccuggccgugcugaaggggcucuacaacuucgcgaccugcggccugguggggcuggucacguuccuccugcugugcggccgcuccugcaccaccagccucuacaaggggguguacgagcugcagacccuggagcucaacauggagacgcugaacaugugcaugccgcuguccugcaccaagaacaacagccaccacuacaucauggugggcaacgagaccggccucgagcugacccugacgaacaccuccaucaucgaccacaaguucugcaaccucagcgacgcccaccggaagaaccuguacgaccacgcccugauguccaucaucagcaccuuccaccucuccauccccaacuucaaccaguacgaggccaugagcugcgacuucaacgggggcaagaucuccguccaguacaaccugagccacuccuacgccaaggacgcggccgaccacugcgggaccguggccaacggcgugcugcagacguucaugcgcauggccuggggcgggagcuacaucgcgcucgacuccggccgggggcgcugggacugcaucaugaccagcuaccaguaccugaucauccagaacaccaccugggaggaccacugccaguucucccggcccagccccaucggcuaccuggggcuccugucccagcgcacgcgggacaucuacaucagccgccggcugcucggcaccuucaccuggacccugagcgacuccgagggcaaggacacgcccgggggcuacugccugacccgcuggaugcucaucgaggccgagcugaagugcuucgggaacaccgccgucgccaagugcaacgagaagcacgacgaggaguucugcgacaugcugcggcuguucgacuucugcaagcaggccauccagcgccugaaggcggaggcccagaugagcauccagcugaucaacaaggccgugaacgcccucaucaacgaccagcugaucaugaagaaccaccuccgggacaucaugggcauccccuacugcaacuacuccaaguacugcuaccucaaccacaccacgaccgggaagaccagccugcccaagugcugccugguguccaacggcagcuaccucaacgagacccacuucuccgacgacaucgagcagcaggccgacaacaugaucacggagaugcugcagaaggaguacauggagcgccagggcaagaccccgcuggggcuggucgaccucuucguguucagcaccuccuucuaccugaucagcaucuuccugcaccucgugaagaucccgacccaccggcacaucgucggcaagcccugccccaagccccaccgccugaaccacauggggaucugcuccugcggccuguacaagcagccgggggugcccgugaaguggaagcgguga

SEQ ID NO: 40002 - RNA, 1476 nt, Artificial Sequence
  derived and/or modified CDS sequence (opt1) from LASV(LM776-SLE-2012;Clade IV)__AIT17824__GPCmut12
augggccagaucgugaccuucuuccaggaggucccccacgugaucgaggaggugaugaacaucguccugaucgcccucagcauccuggccgugcugaaggggcucuacaacuucgcgaccugcggccugguggggcuggucaccuuccuccugcugugcggccgcuccugcaccaccagcguguacaaggggguguacgagcuccagacccuggagcugaacauggagacgcucaacaugugcaugccgcuguccugcaccaagaacaacagccaccacuacaucauggucggcaacgagaccggccuggagcucacccugacgaacaccuccaucaucaaccacaaguucugcaaccugagcgacgcccacaagaagaaccucuacgaccacgcccugauguccaucaucagcaccuuccaccuguccauccccaacuucaaccaguacgaggccaugagcugcgacuucaacgggggcaagaucuccgugcaguacaaccucagccacuccuacgccggggacgcggccaaccacugcggcaccguggccaacgggguccugcagacguucaugcggauggccuggggcggcagcuacaucgcgcuggacuccgggcacggcaagugggacugcaucaugaccagcuaccaguaccucaucauccagaacaccaccugggaggaccacugccaguucucccgccccagccccaucggguaccugggccugcucucccagcggacgcgcgacaucuacaucagccggcgccugcugggcaccuucaccuggacccucagcgacuccgaggggaaggacacgccgggcggguacugccugacccgguggaugcugaucgaggccgagcucaagugcuucggcaacaccgccguggccaagugcaacgagaagcacgacgaggaguucugcgacaugcugcgccuguucgacuucugcaagcaggccauccagcggcucaaggcggaggcccagaugagcauccagcugaucaacaaggccgugaacgcccugaucaacgaccagcucaucaugaagaaccaccuccgcgacaucauggggauccccuacugcaacuacuccaaguacugcuaccugaaccacaccacgaccggcaagaccagccugcccaagugcugccuggucuccaacggcagcuaccugaacgagacccacuucuccgacgacaucgagcagcaggccgacaacaugaucacggagaugcuccagaaggaguacauggagcggcaggggaagacgccccugggccugguggaccuguucguguucagcaccuccuucuaccucaucagcaucuuccugcaccuggucaagaucccgacccaccgccacaucguggggaaguccugccccaagccccaccggcucaaccacaugggcaucugcagcugcgggcuguacaagcagcccggcgugccgguccgcuggaagcgguga

SEQ ID NO: 40003 - RNA, 1476 nt, Artificial Sequence
  derived and/or modified CDS sequence (opt1) from LASV(Mad39;Clade IV)__ANH09722__GPCmut12
augggccagaucgugaccuucuuccaggaggucccccacgugaucgaggaggugaugaacaucguccugaucgcccucagcauccuggccgugcugaaggggcucuacaacguggcgaccugcggccugaucgggcuggucacguuccuccugcugugcggccgcuccugcaccaccacccucuacaaggggguguacgagcugcaggcccuggagcucaacauggagacgcugaacaugugcaugccgcugagcugcaccaagaacaacucccaccacuacauccgggugggcaacgagaccggccucgagcugacccugacgaacaccagccucaucaaccacaaguucugcaaccuguccgacgcccacaagaagaaccuguacgaccacgcccucaugagcaucaucuccaccuuccaccugagcauccccaacuucaaccaguacgaggccauguccugcgacuucaacgacgggaagaucagcguccaguacaaccugucccacaccuacgcgggcgacacggccaaccacugcgggaccguggccaacggcgugcuccagaccuucaugcgcauggccuggggcgggagcuacaucgcgcuggacuccggccgcgggggcugggacugcaucaugaccagcuaccaguaccugaucauccagaacacgaccugggaggaccacugccaguucucccggcccagccccaucggguaccucggccugcugucccagcggacccgcgacaucuacaucagccggcgccuccugggcaccuucacguggacccuguccgacagcgaggggaaggacaccccgggcggguacugccucacccgguggaugcugaucgaggccgagcugaagugcuucggcaacacggccgucgccaagugcaacgagaagcacgacgaggaguucugcgacaugcuccgccuguucgacuucugcaagcaggccauccagcggcugaaggcggaggcccagaugagcauccagcucaucaacaaggccgugaacgcccugaucaacgaccagcugaucaugaagaaccaccuccgcgacaucauggggauccccuacugcaacuacuccaaguacugcuaccugaaccacaccgugaccggcaagaccagccugcccaagugcugccucgucuccaacggcagcuaccugaacgagacgcacuucuccgacgacaucgagcagcaggccgacaacaugaucaccgagaugcugcagaaggaguacauggagcggcaggggaagacgccccugggccucguggaccuguucguguucagcaccuccuucuaccugaucagcaucuuccuccaccuggucaagaucccgacccaccgccacgugguggggaagcccugccccaagccccaccggcugaaccacaugggcaucugcuccugcggguucuacaagcagccgggcguccccgugcgcuggaagcgguga

SEQ ID NO: 40004 - RNA, 1476 nt, Artificial Sequence
  derived and/or modified CDS sequence (opt1) from LASV(Z0947-SLE-2011;Clade IV)__AIT17840__GPCmut12
augggccagaucgugaccuucuuccaggaggucccccacgugaucgaggaggugaugaacaucguccugaucgcccucagcauccuggccgugcugaaggggcucuacaacuucgcgaccugcggccugguggggcuggucacguuccuccugcugugcggccgcuccugcaccaucagccucuacaaggggguguacgagcugcagacccuggagcucaacauggagacccugaacaugugcaugccgcuguccugcacgaagaacaacagccaccacuacaucauggugggcaacgagaccggccucgagcugacccugaccaacacguccaucaucaaccacaaguucugcaaccucagcgacgcccacaagaagaaccuguacgaccacgcccugauguccaucaucagcaccuuccaccucuccauccccaacuucaaccaguacgaggccaugagcugcgacuucaacgggggcaagaucuccguccaguacaaccugagccacuccuacgccggggacgcggccaaccacugcggcaccguggccaacggggugcugcagaccuucaugcggauggccuggggcggcagcuacaucgcgcucgacuccgggcgcgaccggugggacugcaucaugacgagcuaccaguaccugaucauccagaacaccaccugggaggaccacugccaguucucccgccccagccccaucggcuaccuggggcuccugucccagcggacccgcgacaucuacaucagccggcgccugcucggcacguucaccuggacccugagcgacuccgagggcaaggacacccccgggggcuacugccugacgcgguggaugcucaucgaggccgagcugaagugcuucgggaacaccgccgucgccaagugcaacgagaagcacgacgaggaguucugcgacaugcugcgccucuucgacuucugcaagcaggccauccagcggcugaaggcggaggcccagaugagcauccagcugaucaacaaggccgugaacgcccucaucaacgaccagcugaucaugaagaaccaccuccgcgacaucaugggcaucccguacugcaacuacuccaaguacugcuaccugaaccacaccaccacggggaagaccagccugcccaagugcugccugguguccaacggcagcuaccucaacgagacccacuucuccgacgacaucgagcagcaggccgacaacaugaucaccgagaugcugcagaaggaguacauggagcggcagggcaagacgccccuggggcuggucgaccucuucguguucagcaccuccuucuaccugaucagcaucuuccugcaccucgugaagaucccgacccaccgccacaucgucggcaagcccugccccaagccccaccggcugaaccacauggggaucugcuccugcggccuguacaagcagccgggggugcccgugaaguggaagcgcuga

SEQ ID NO: 40005 - RNA, 1476 nt, Artificial Sequence
  derived and/or modified CDS sequence (opt4) from LASV(Josiah;Clade IV)__NP_694870__GPCmut12
augggccagaucgugaccuucuuccaggaggugccccacgugaucgaggaggugaugaacaucgugcugaucgcccugagcgugcuggccgugcugaagggccuguacaacuucgccaccugcggccuggugggccuggugaccuuccugcugcugugcggcagaagcugcaccaccagccuguacaagggcguguacgagcugcagacccuggagcugaacauggagacccugaacaugugcaugccccugagcugcaccaagaacaacagccaccacuacaucauggugggcaacgagaccggccuggagcugacccugaccaacaccagcaucaucaaccacaaguucugcaaccugagcgacgcccacaagaagaaccuguacgaccacgcccugaugagcaucaucagcaccuuccaccugagcauccccaacuucaaccaguacgaggccaugagcugcgacuucaacggcggcaagaucagcgugcaguacaaccugagccacagcuacgccggcgacgccgccaaccacugcggcaccguggccaacggcgugcugcagaccuucaugagaauggccuggggcggcagcuacaucgcccuggacagcggcagaggcaacugggacugcaucaugaccagcuaccaguaccugaucauccagaacaccaccugggaggaccacugccaguucagcagacccagccccaucggcuaccugggccugcugagccagagaaccagagacaucuacaucagcagaagacugcugggcaccuucaccuggacccugagcgacagcgagggcaaggacacccccggcggcuacugccugaccagauggaugcugaucgaggccgagcugaagugcuucggcaacaccgccguggccaagugcaacgagaagcacgacgaggaguucugcgacaugcugagacuguucgacuucugcaagcaggccauccagagacugaaggccgaggcccagaugagcauccagcugaucaacaaggccgugaacgcccugaucaacgaccagcugaucaugaagaaccaccugagagacaucaugggcauccccuacugcaacuacagcaaguacugcuaccugaaccacaccaccaccggcagaaccagccugcccaagugcugccuggugagcaacggcagcuaccugaacgagacccacuucagcgacgacaucgagcagcaggccgacaacaugaucaccgagaugcugcagaaggaguacauggagagacagggcaagaccccccugggccugguggaccuguucguguucagcaccagcuucuaccugaucagcaucuuccugcaccuggugaagauccccacccacagacacaucgugggcaagagcugccccaagccccacagacugaaccacaugggcaucugcagcugcggccuguacaagcagcccggcgugcccgugaaguggaagagauga

SEQ ID NO: 40006 - RNA, 1473 nt, Artificial Sequence
  derived and/or modified CDS sequence (opt4) from LASV(LP;Clade I)__AAF86701__GPCmut12
augggccagaucaucaccuucuuccaggaggugccccacgugaucgaggaggugaugaacaucgugcugaucgcccugagccugcuggccauccugaagggccuguacaacaucgccaccugcggcaucaucggccugguggccuuccuguuccugugcggcaagagcugcagccugacccugaagggcggcuacgagcugcagacccuggagcugaacauggagacccugaacaugugcaugccccugagcugcaccaagaacagcagccaccacuacaucagagugggcaacgagaccggccuggagcugacccugaccaacaccagcaucaucaaccacaaguucugcaaccugagcgacgcccacaagaagaaccuguacgaccacgcccugaugagcaucaucagcaccuuccaccugagcauccccaacuucaaccaguacgaggccaugagcugcgacuucaacggcggcaagaucagcgugcaguacaaccugagccacagcuacgccggcgacgccgccgagcacugcggcaccguggccaacggcgugcugcagaccuucaugagaauggccuggggcggcagauacaucgcccuggacagcggcaagggcaacugggacugcaucaugaccagcuaccaguaccugaucauccagaacaccaccugggaggaccacugccaguucagcagacccagccccaucggcuaccugggccugcugagccagagaaccagagacaucuacaucagcagaagacugcugggcaccuucaccuggacccugagcgacagcgagggcaacgagacccccggcggcuacugccugaccagauggaugcugaucgaggccgagcugaagugcuucggcaacaccgccguggccaagugcaacgagaagcacgacgaggaguucugcgacaugcugagacuguucgacuucugcaagcaggccaucagaagacugaaggccgaggcccagaugagcauccagcugaucaacaaggccgugaacgcccugaucaacgaccagcugaucaugaagaaccaccugagagacaucaugggcauccccuacugcaacuacagcaaguacugcuaccugaaccacaccagcagcggcagaaccagccugcccaagugcugccugaucagcaacggcagcuaccugaacgagacccaguucagcgacgacaucgagcagcaggccgacaacaugaucaccgagaugcugcagaaggaguacaucgagagacagggcaagaccccccugggccugguggacaucuucaucuucagcaccagcuucuaccugaucagcaucuuccugcaccugaucaagauccccacccacagacacaucgugggcaagcccugccccaagccccacagacugaaccacaugggcgugugcagcugcggccuguacaagcaccccggcgugcccaccaaguggaagagauga

SEQ ID NO: 40007 - RNA, 1473 nt, Artificial Sequence
  derived and/or modified CDS sequence (opt4) from LASV(803213;Clade II)__AAF86703__GPCmut12
augggccagaucaucaccuucuuccaggaggugccccacgugaucgaggaggugaugaacaucgugcugaucgcccugagccugcuggccauccugaagggcaucuacaacguggccaccugcggccuguucggccugaucagcuuccugcugcugugcggcagaagcugcagcgugaccuacaagggcguguacgagcugcagacccuggagcugaacauggccaaccugaacaugugcaugccccugagcugcaccaagaacaacagccaccacuacaucauggugggcaacgagaccggccuggagcugacccugaccaacaccagcaucaucaaccacaaguucugcaaccugagcgacgcccacaagaagaaccuguacgaccacgcccugaugagcaucaucagcaccuuccaccugagcauccccaacuucaaccaguacgaggccaugagcugcgacuucaacggcggcaagaucagcgugcaguacaaccugagccacagcuucgccguggacgccgccaaccacugcggcaccaucgccaacggcgugcugcagaccuucaugagaauggccuggggcggcagcuacaucgcccuggacagcggcaagggcaacugggacugcaucaugaccagcuaccaguaccugaucauccagaacaccaccugggaggaccacugccaguucagcagacccagccccaucggcuaccugggccugcugagccagagaaccagagacaucuacaucagcagaagacugcugggcaccuucaccuggacccugagcgacagcgagggcaacgaggcccccggcggcuacugccugaccagauggaugcugaucgaggccgagcugaagugcuucggcaacaccgccguggccaagugcaacgagaagcacgacgaggaguucugcgacaugcugagacuguucgacuucugcaagcaggccaucaagagacugaagaccgaggcccagaugagcauccagcugaucaacaaggccgugaacgcccugaucaacgaccagcugaucaugaagaaccaccugagagacaucaugggcauccccuacugcaacuacagcagauacugcuaccugaaccacaccgugaccggcaagaccagccugcccagaugcugccuggugagcaacggcagcuaccugaacgagacccacuucagcgacgacaucgagcagcaggccgacaacaugaucaccgagaugcugcagaaggaguacauggacagacagggcaagaccccccugggccugguggaccuguucguguucagcaccagcuucuaccugaucagcaucuuccugcaccuggugaagauccccacccacagacacaucgugggcaagcccugccccaagccccacagacugaaccacaugggcaucugcagcugcggccuguacaagcaccccggcgugcccgugaaguggaagagauga

SEQ ID NO: 40008 - RNA, 1473 nt, Artificial Sequence
  derived and/or modified CDS sequence (opt4) from LASV(GA391;Clade III)__CAA36645__GPCmut12
augggccagaucgugaccuucuuccaggaggugccccacgugaucgaggaggugaugaacaucgugcugaucgcccugagcauccuggccauccugaagggccuguacaacguggccaccugcggccugaucggccuggugaccuuccugcugcugagcggcagaagcugcagccugaucuacaagggcaccuacgagcugcagacccuggagcugaacauggagacccugaacaugugcaugccccugagcugcaccaagaacaacagccaccacuacaucagagugggcaacgagaccggccuggagcugacccugaccaacaccagcauccugaaccacaaguucugcaaccugagcgacgcccacaagagaaaccuguacgaccacagccugaugagcaucaucagcaccuuccaccugagcauccccaacuucaaccaguacgaggccaugagcugcgacuucaacggcggcaagaucaccgugcaguacaaccugagccacagcuucgccguggacgccgccggccacugcggcacccuggccaacggcgugcugcagaccuucaugagaauggccuggggcggcagcuacaucgcccuggacagcggcagaggcaacugggacugcaucaugaccagcuaccaguaccugaucauccagaacaccaccugggacgaccacugccaguucagcagacccagccccaucggcuaccugggccugcugagccagagaaccagagacaucuacaucagcagaagacugcugggcaccuucaccuggacccugagcgacagcgagggcaacgagacccccggcggcuacugccugaccagauggaugcugaucgaggccgagcugaagugcuucggcaacaccgccguggccaagugcaacgagaagcacgacgaggaguucugcgacaugcugagacuguucgacuucugcaagcaggccaucagaagacugaagaccgaggcccagaugagcauccagcugaucaacaaggccgugaacgcccugaucaacgaccagcugaucaugaagaaccaccugagagacaucaugggcauccccuacugcaacuacagcagauacugcuaccugaaccacaccagcaccggcaagaccagccugcccagaugcugccugaucagcaacggcagcuaccugaacgagaccaaguucagcgacgacaucgagcagcaggccgacaacaugaucaccgagaugcugcagaaggaguacaucgacagacagggcaagaccccccugggccugguggaccuguucguguucagcaccagcuucuaccugaucagcaucuuccugcaccuggugaagauccccacccacagacacaucgugggcaagcccugccccaagccccacagacugaaccacaugggcaucugcagcugcggccuguacaagcagcccggcgugcccgugagauggaagagauga

SEQ ID NO: 40009 - RNA, 1476 nt, Artificial Sequence
  derived and/or modified CDS sequence (opt4) from LASV(AV;Clade V)__CCA30314__GPCmut12
augggccagaucgugaccuucuuccaggaggugccccacgugaucgaggaggugaugaacaucgugcugaucgcccugagcauccuggccgugcugaagggccuguacaacaucgccaccugcggccugaucggccugaucaccuuccugcugcugugcggcagaagcugcagcagcaaccuguacaagggcguguacgagcugcagagccuggaccugaacauggagacccugaacaugugcaugccccugagcugcaccaagaacaacagccaccacuacaucagagugggcaacgacaccggccuggagcugacccugaccaacaccagcauccugaaccacaaguucugcaaccugagcgacgcccacaagaaggaccuguacgaccacgcccugaugagcaucaucagcaccuuccaccugagcauccccaacuucaaccaguacgaggccaugagcugcgacuucaacggcggcaagaucagcgugcaguacaaccugagccacagcuacgccaucgacgccgccaaccacugcggcaccguggccaacggcauccugcagaccuucaugagaauggccuggggcggcagcuacaucgcccuggacagcggcagaggcaacugggacugcaucaugaccagcuaccaguaccugaucauccagaacaccaccugggagaaccacugccaguucagcagacccagccccaucggcuaccugggccugcugagccagagaaccagagacaucuacaucagcagaagacugcugggcaccuucaccuggacccugagcgacagcgagggcaacgccacccccggcggcuacugccugaccagauggaugcugaucgaggccgagcugaagugcuucggcaacaccgccguggccaagugcaacgagaagcacgacgaggaguucugcgacaugcugagacuguucgacuucugcaagcaggccaucagcagacugaagagcgaggcccagaugagcauccagcugaucaacaaggccgugaacgcccugaucaacgaccagcugaucaugaagaaccaccugagagacaucaugggcauccccuacugcaacuacagcaaguacugcuaccugaaccacaccaucaccggcaagaccagccugcccaagugcugccuggugagcaacggcagcuaccugaacgagacccacuucagcgacgacaucgagcagcaggccgacaacaugaucaccgagaugcugcagaaggaguacauggagagacagggcaagaccccccugggccugguggaccuguucguguucagcaccagcuucuaccugaucagcaucuuccugagacuggugaagauccccacccacagacacaucgugggcaagcccugccccaagccccacagacugaaccacaugggcaucugcagcugcggccuguacaagcagcccggcgugcccgugagauggaagagauga

SEQ ID NO: 40010 - RNA, 1473 nt, Artificial Sequence
  derived and/or modified CDS sequence (opt4) from LASV(Togo/2016/7082;Clade VI)__AMR44577__GPCmut12
augggccagaucaucaccuucuuccaggaggugccccacgugaucgaggaggugaugaacaucgugcugaucgcccugagccugcuggccauccugaagggcguguacaacguggccaccugcggcaucaucggccuggugaccuuccuguuccugugcggcagaagcugcagccugaucuacaagggcagcuacgagcugcagacccuggagcugaacauggagacccugaacaugugcaugccccugagcugcaccaagaacagcagccaccacuacaucagagugggcaacgagaccggccuggagcugacccugaccaacaccagcaucaucaaccacaaguucugcaaccugagcgacgcccacaagagaaaccuguacgaccacgcccugaugagcauccugagcaccuuccaccugagcauccccaacuucaaccaguacgaggccaugagcugcgacuucaacggcggcaagaucagcgugcaguacaaccugagccacgccuacgccguggacgccgccgagcacugcggcaccguggccaacggcgugcugcagaccuucaugagaauggccuggggcggcagcuacaucgcccuggacagcggcagaggcaacugggacugcaucaugaccagcuaccaguaccugaucauccagaacaccaccugggaggaccacugccaguucagcagacccagccccaucggcuaccugggccugcugagccagagaaccagagacaucuacaucagcagaagacugcugggcaccuucaccuggacccugagcgacagcgagggcaacgagacccccggcggcuacugccugaccagauggaugcugaucgaggccgagcugaagugcuucggcaacaccgccguggccaagugcaacgagaagcacgacgaggaguucugcgacaugcugagacuguucgacuucugcaagcaggccauccagagacugaagagcgaggcccagaugagcauccagcugaucaacaaggccgugaacgcccugaucaacgaccagcugaucaugaagaaccaccugagagacaugaugggcauccccuacugcaacuacagcaaguacugcuaccugaaccacaccagcagcggcagaaccagccugcccaagugcugccuggugagcaacggcagcuaccugaacgagacccacuucagcgacgacaucgagcagcaggccgacaacaugaucaccgagaugcugcagaaggaguacaucgacagacagggcaagaccccccugggccugguggaccuguucguguucagcaccagcuucuaccugaucagcaucuuccugcaccugaucaagauccccacccacagacacaucgugggcaagcccugccccaagccccacagacugaaccacaugggcaucugcagcugcggccuguacaagcagcccggcgugcccaccagauggaagagauga

SEQ ID NO: 40011 - RNA, 1473 nt, Artificial Sequence
  derived and/or modified CDS sequence (opt4) from LASV(KAK-428;Clade n.d. (VII))__ANH09740__GPCmut12
augggccagaucgugaccuucuuccaggaggugccccacgugaucgaggaggugaugaacaucgugcugaucgcccugagccugcuggccauccugaagggccuguacaacuucgccaccugcggcgugaucggccugaucaccuuccugcugcugugcggcagaagcugcagcgccaccuacaagggccaguacgagcugcagacccuggagcugaacauggagagccugaacaugugcaugccccugagcugcaccaagaacaacagccaccacuacaucagagccggcaacaacaccggccuggagcugacccugaccaacaccagcaucaucagccacaaguucugcaaccugagcgacgcccacaagaagaaccuguacgaccacacccugaugagcaucaucaccaccuuccaccugagcauccccaacuucaaccaguacgaggccaugagcugcgacuucaacggcggcaagaucagcauccaguacaaccugagccacagcuacgccggcgacgccgcccagcacugcggcaccguggccaacggcgugcugcagaccuucaugagaauggccuggggcggcagcuaccuggcccuggacagcggcagaagaggcugggacugcaucaucagcagcuaccaguaccugaucauccagaacaccaccugggacgaccacugccaguucagcagacccagccccaucggcuaccugggcuucgugagccagaagaccagagacaucuacaucagcagaagacugcugggcaccuucaccuggacccugagcgacagcgagggccacgacaugcccggcggcuacugccugaccagauggaugcugaucgaggccgaccugaagugcuucggcaacaccgccguggccaagugcaacgagaagcacgacgaggaguucugcgacauguggagacuguucgacuucugcaagcaggccauccagagacugaaggccgaggcccagaugaacauccagcugaucaacaaggccgugaacgcccugaucaacgaccagcugaugaugaagaaccaccugagagacaucaugggcauccccuacugcaacuacagcaaguucugcuaccugaacaacaccaccaccggcagaaccagccugcccagaugcugccugaucagcaacggcagcuaccugaacgagacccacuucagcgacgacaucgagcagcaggccgacaacaugaucaccgagaugcugcagaaggaguacauggacagacagggcaagaccccccugggccugguggaccuguucguguucagcaccagcuucuaccugaucaccaucuuccugcaccuggugaagauccccacccacagacacaucgugggcaagcccugccccaagccccacagacugaaccacaugggcaucugcagcugcggccuguacaagcagcccggcgugcccgugagauggaagagauga

SEQ ID NO: 40012 - RNA, 1473 nt, Artificial Sequence; identical to SEQ ID NO: 40006
  derived and/or modified CDS sequence (opt4) from LASV(Pinneo-NIG-1969;Clade I)__AIT17836__GPCmut12

SEQ ID NO: 40013 - RNA, 1473 nt, Artificial Sequence
  derived and/or modified CDS sequence (opt4) from LASV(ISTH0009-NIG-2011;Clade II)__AIT17404__GPCmut12
augggccagaucaucaccuucuuccaggaggugccccacgugaucgaggaggugaugaacaucgugcugaucgcccugagccugcuggccauccugaagggcaucuacaacguggccaccugcggccuguucggccuggugagcuuccugcugcugugcggcagaagcugcagcaccaccuacaagggcguguacgagcugcagacccuggagcuggacauggccagccugaacaugugcaugccccugagcugcaccaagaacaacagccaccacuacaucauggugggcaacgagaccggccuggagcugacccugaccaacaccagcaucaucaaccacaaguucugcaaccugagcgacgcccacaagaagaaccuguacgaccacgcccugaugagcaucaucagcaccuuccaccugagcauccccaacuucaaccaguacgaggccaugagcugcgacuucaacggcggcaagaucagcgugcaguacaaccugagccacgccuacgccguggacgccgccaaccacugcggcaccaucgccaacggcgugcugcagaccuucaugagaauggccuggggcggcagcuacaucgcccuggacagcggcaagggcagcugggacugcaucaugaccagcuaccaguaccugaucauccagaacaccaccugggaggaccacugccaguucagcagacccagccccaucggcuaccugggccugcugagccagagaaccagagacaucuacaucagcagaagacugcugggcaccuucaccuggacccugagcgacagcgagggcaacgagacccccggcggcuacugccugaccagauggaugcugaucgaggccgagcugaagugcuucggcaacaccgccguggccaagugcaacgagaagcacgacgaggaguucugcgacaugcugagacuguucgacuucugcaagcaggccaucagaagacugaagaccgaggcccagaugagcauccagcugaucaacaaggccgugaacgcccugaucaacgaccagcugaucaugaagaaccaccugagagacaucaugggcauccccuacugcaacuacagcaaguacugcuaccugaaccacaccgugaccggcaagaccagccugcccagaugcugccuggugagcaacggcagcuaccugaacgagacccacuucagcgacgacaucgagcagcaggccgacaacaugaucaccgagcugcugcagaaggaguacauggacagacagggcaagaccccccugggccugguggaccuguucguguucagcaccagcuucuaccugaucagcaucuuccugcaccugaucaagauccccacccacagacacaucaccggcaagcccugccccaagccccacagacugaaccacaugggcaucugcagcugcggccuguacaagcaccccggcgugcccgugaaguggaagagauga

SEQ ID NO: 40014 - RNA, 1473 nt, Artificial Sequence
  derived and/or modified CDS sequence (opt4) from LASV(ISTH2010-NIG-2012;Clade II)__AIT17482__GPCmut12
augggccagaucaucaccuucuuccaggaggugccccacgugaucgaggaggugaugaacaucgugcugaucgcccugagccugcuggccauccugaagggcaucuacaacguggccaccugcggccuguucggccuggugagcuuccugcugcugugcggcagaagcugcagcaccaccuacaagggcguguacgagcugcagacccuggagcuggacauggccagccugaacaugugcaugccccugagcugcaccaagaacaacagccaccacuacaucauggugggcaacgagaccggccuggagcugacccugaccaacaccagcaucaucaaccacaaguucugcaaccugagcgacgcccacaagaagaaccuguacgaccacgcccugaugagcaucaucagcaccuuccaccugagcauccccaacuucaaccaguacgaggccaugagcugcgacuucaacggcggcaagaucagcgugcaguacaaccugagccacgccuacgccguggacgccgccaaccacugcggcaccaucgccaacggcgugcugcagaccuucaugagaauggccuggggcggcagcuacaucgcccuggacagcggcaagggcagcugggacugcaucaugaccagcuaccaguaccugaucauccagaacaucaccugggaggaccacugccaguucagcagacccagccccaucggcuaccugggccugcugagccagagaaccagagacaucuacaucagcagaagacugcugggcaccuucaccuggacccugagcgacagcgagggcaacgagacccccggcggcuacugccugaccagauggaugcugaucgaggccgagcugaagugcuucggcaacaccgccguggccaagugcaacgagaagcacgacgaggaguucugcgacaugcugagacuguucgacuucugcaagcaggccaucagaagacugaagaccgaggcccagaugagcauccagcugaucaacaaggccgugaacgcccugaucaacgaccagcugaucaugaagaaccaccugagagacaucaugggcauccccuacugcaacuacagcaaguacugcuaccugaaccacaccgugaccggcaagaccagccugcccagaugcugccuggugagcaacggcagcuaccugaacgagacccacuucagcgacgacaucgagcagcaggccgacaacaugaucaccgagcugcugcagaaggaguacaucgacagacagggcaagaccccccugggccugguggaccuguucguguucagcaccagcuucuaccugaucagcaucuuccugcaccuggugaagauccccacccacagacacguggugggcaagcccugccccaagccccacagacugaaccacaugggcaucugcagcugcggccuguacaagcaccccggcgugcccgugaaguggaagagauga

SEQ ID NO: 40015 - RNA, 1473 nt, Artificial Sequence
  derived and/or modified CDS sequence (opt4) from LASV(Lassa virus/H.sapiens-wt/NGA/2015/ISTH_0543;Clade II)__AVO03639__GPCmut12
augggccagaucaucaccuucuuccaggaggugccccacgugaucgaggaggugaugaacaucgugcugaucgcccugagccugcuggccauccugaagggcaucuacaacguggccaccugcggccuguucggccuggugagcuuccugcugcugugcggcagaagcugcagcaccaccuacaagggcguguacgagcugcagacccuggagcuggacauggccaaccugaacaugugcaugccccugagcugcaccaagaacaacagccaccacuacaucauggugggcaacgagaccggccuggagcugacccugaccaacaccagcaucaucaaccacaaguucugcaaccugagcgacgcccacaagaagaaccuguacgaccacgcccugaugagcaucaucagcaccuuccaccugagcauccccaacuucaaccaguacgaggccaugagcugcgacuucaacggcggcaagaucagcgugcaguacaaccugagccacaccuacgccguggacgccgccaaccacugcggcaccaucgccaacggcgugcugcagaccuucaugagaauggccuggggcggcagcuacaucgcccuggacagcggcaagggcagcugggacugcaucaugaccagcuaccaguaccuggugauccagaacaccaccugggaggaccacugccaguucagcagacccagccccaucggcuaccugggccugcugagccagagaaccagagacaucuacaucagcagaagacugcugggcaccuucaccuggacccugagcgacagcgagggcaacgagacccccggcggcuacugccugaccagauggaugcugaucgaggccgagcugaagugcuucggcaacaccgccguggccaagugcaacgagaagcacgacgaggaguucugcgacaugcugagacuguucgacuucugcaagcaggccaucagaagacugaagaccgaggcccagaugagcauccagcugaucaacaaggccgugaacgcccugaucaacgaccagcugaucaugaagaaccaccugagagacaucaugggcauccccuacugcaacuacagcaaguacugcuaccugaaccacaccgugaccggcaagaccagccugcccagaugcugccuggugagcaacggcagcuaccugaacgagacccacuucagcgacgacaucgagcagcaggccgacaacaugaucaccgagcugcugcagaaggaguacaucgacagacagggcaagaccccccugggccugguggaccuguucguguucagcaccagcuucuaccugaucagcaucuuccugcaccuggugaagauccccacccacagacacaucaccggcaagcccugccccaagccccacagacugaaccacaugggcaucugcagcugcggccuguacaagcaccccggcgugcccgugaaguggaagagauga

SEQ ID NO: 40016 - RNA, 1473 nt, Artificial Sequence
  derived and/or modified CDS sequence (opt4) from LASV(Lassa virus/H.sapiens-wt/NGA/2016/ISTH_0009;Clade II)__AVO03571__GPCmut12
augggccagaucaucaccuucuuccaggaggugccccacgugaucgaggaggugaugaacaucgugcugaucgcccugagccugcuggccauccugaagggcaucuacaacguggccaccugcggccugcugggccuggugagcuuccugcugcugugcggcagaagcugcagcaccaccuacaagggcguguacgagcugcagacccuggagcuggacauggccagccugaacaugugcaugccccugagcugcaccaagaacaacagccaccacuacaucauggugggcaacgagaccggccuggagcugacccugaccaacaccagcaucaucaaccacaaguucugcaaccugagcgacgcccacaagaagaaccuguacgaccacgcccugaugagcaucaucagcaccuuccaccugagcauccccaacuucaaccaguacgaggccaugagcugcgacuucaacggcggcagaaucagcgugcaguacaaccugagccacagcuacgccguggacgccgccaaccacugcggcaccaucgccaacggcgugcugcagaccuucaugagaauggccuggggcggcagcuacaucgcccuggacagcggcaagggcagcugggacugcaucaugaccagcuaccaguaccugaucauccagaacaccaccugggaggaccacugccaguucagcagacccagccccaucggcuaccugggccugcugagccagagaaccagagacaucuacaucagcagaagacugcugggcaccuucaccuggacccugagcgacagcgagggcaacgagacccccggcggcuacugccugaccagauggaugcugaucgaggccgagcugaagugcuucggcaacaccgccguggccaagugcaacgagaagcacgacgaggaguucugcgacaugcugagacuguucgacuucugcaagcaggccaucagaagacugaagaccgaggcccagaugagcauccagcugaucaacaaggccgugaacgcccugaucaacgaccagcugaucaugaagaaccaccugagagacaucaugggcauccccuacugcaacuacagcaaguacugcuaccugaaccacaccgugaccggcaagaccagccugcccagaugcugccuggugagcaacggcagcuaccugaacgagacccacuucagcgacgacaucgagcagcaggccgacaacaugaucaccgagcugcugcagaaggaguacaucgacagacagggcaagaccccccugggccugguggaccuguucguguucagcaccagcuucuaccugaucagcaucuuccugcaccuggugaagauccccacccacagacacaucaccggcaagcccugccccaagccccacagacugaaccacaugggcaucugcagcugcggccuguacaaccaccccggcgugcccgugaaguggaagagauga

SEQ ID NO: 40017 - RNA, 1473 nt, Artificial Sequence
  derived and/or modified CDS sequence (opt4) from LASV(Lassa virus/H.sapiens-wt/NGA/2016/ISTH_0017;Clade II)__AVO03567__GPCmut12
augggccagaucaucaccuucuuccaggaggugccccacgugaucgaggaggugaugaacaucgugcugaucgcccugagccugcuggccauccugaagggcaucuacaacguggccaccugcggccuguucggccuggugagcuuccugcugcugugcggcagaagcugcagcaccaccuacaagggcguguacgagcugcagacccuggagcuggacauggccagccugaacaugugcaugccccugagcugcaccaagaacaacagccaccacuacaucauggugggcaacgagaccggccuggagcugacccugaccaacaccagcaucaucaaccacaaguucugcaaccugagcgacgcccacaagaagaaccuguacgaccacgcccugaugagcaucaucagcaccuuccaccugagcauccccaacuucaaccaguacgaggccaugagcugcgacuucaacggcggcaagaucagcgugcaguacaaccugagccacaccuacgccaucgacgccgccaaccacugcggcaccaucgccaacggcgugcugcagaccuucaugagaauggccuggggcggcagcuacaucgcccuggacagcggcaagggcagcugggacugcaucaugaccagcuaccaguaccugaucauccagaacaccaccugggaggaccacugccaguucagcagacccagccccaucggcuaccugggccugcugagccagagaaccagagacaucuacaucagcagaagacugcugggcaccuucaccuggacccugagcgacagcgagggcaacgagacccccggcggcuacugccugaccagauggaugcugaucgaggccgagcugaagugcuucggcaacaccgccguggccaagugcaacgagaagcacgacgaggaguucugcgacaugcugagacuguucgacuucugcaagcaggccaucagaagacugaagaccgaggcccagaugagcauccagcugaucaacaaggccgugaacgcccugaucaacgaccagcugaucaugaagaaccaccugagagacaucaugggcauccccuacugcaacuacagcaaguacugcuaccugaaccacaccgugaccggcaagaccagccugcccagaugcugccuggugagcaacggcagcuaccugaacgagacccacuucagcgacgacaucgagcagcaggccgacaacaugaucaccgagcugcugcagaaggaguacauggacagacagggcaagaccccccugggccugguggaccuguucguguucagcaccagcuucuaccugaucagcaucuuccugcaccuggugagaauccccacccacagacacgugaucggcaagcccugccccaagccccacagacugaaccacaugggcaucugcagcugcggccuguacaagcaccccggcgugcccgugaaguggaagagauga

SEQ ID NO: 40018 - RNA, 1473 nt, Artificial Sequence
  derived and/or modified CDS sequence (opt4) from LASV(Lassa virus/H.sapiens-wt/NGA/2018/ISTH_0959;Clade II)__AVV65099__GPCmut12
augggccagaucaucaccuucuuccaggaggugccccacgugaucgaggaggugaugaacaucgugcugaucgcccugagccugcuggccauccugaagggcaucuacaacguggugaccugcggccuguucggccuggugagcuuccugcugcugugcggcagaagcugcagcaccaccuacaagggcguguacgagcugcagacccuggagcuggacauggccagccugaacaugugcaugccccugagcugcaccaagaacaacagccaccacuacaucauggugggcaacgagaccggccuggagcugacccugaccaacaccagcaucaucaaccacaaguucugcaaccugagcgacgcccacaagaagaaccuguacgaccacgcccugaugagcaucaucagcaccuuccaccugagcauccccaacuucaaccaguacgaggccaugagcugcgacuucaacggcggcaagaucagcgugcaguacaaccugagccacgccuacgccaucgacgccgccaaccacugcggcaccaucgccaacggcgugcugcagaccuucaugagaauggccuggggcggcagcuacaucgcccuggacagcggcaagggcagcugggacugcaucaugaccagcuaccaguaccugaucauccagaacaccaccugggaggaccacugccaguucagcagacccagccccaucggcuaccugggccugcugagccagagaaccagagacaucuacaucagcagaagacugcugggcaccuucaccuggacccugagcgacagcgagggcaacgagacccccggcggcuacugccugaccagauggaugcugaucgaggccgagcugaagugcuucggcaacaccgccguggccaagugcaacgagaagcacgacgaggaguucugcgacaugcugagacuguucgacuucugcaagcaggccaucagaagacugaagaccgaggcccagaugagcauccagcugaucaacaaggccgugaacgcccugaucaacgaccagcugaucaugaagaaccaccugagagacaucaugggcauccccuacugcaacuacagcaaguacugcuaccugaaccacaccgugaccggcaagaccagccugcccagaugcugccuggugagcaacggcagcuaccugaacgagacccacuucagcgacgacaucgagcagcaggccgacaacaugaucaccgagcugcugcagaaggaguacaucgacagacagggcaagaccccccugggccugguggaccuguucguguucagcaccagcuucuaccugaucagcaucuuccugcaccuggugaagauccccacccacagacacgugaucggcaagcccugccccaagccccacagacugaaccacaugggcaucugcagcugcggccuguacaagcaccccggcgugcccgugaaguggaagagauga

SEQ ID NO: 40019 - RNA, 1473 nt, Artificial Sequence
  derived and/or modified CDS sequence (opt4) from LASV(LASV003-NIG-2008;Clade II)__AIT17580__GPCmut12
augggccagaucaucaccuucuuccaggaggugccccacgugaucgaggaggugaugaacaucgugcugaucgcccugagccugcuggccauccugaagggcaucuacaacguggccaccugcggccuguucggccuggugagcuuccugcugcugugcggcagaagcugcagcaccaccuacaagggcguguacgagcugcagacccuggagcuggacauggccagccugaacaugugcaugccccugagcugcaccaagaacaacagccaccacuacaucauggugggcaacgagaccggccuggagcugacccugaccaacaccagcaucaucaaccacaaguucugcaaccugagcgacgcccacaagaagaaccuguacgaccacgcccugaugagcaucaucagcaccuuccaccugagcauccccaacuucaaccaguacgaggccaugagcugcgacuucaacggcggcaagaucagcgugcaguacaaccugagccacaccuacgccguggacgccgccaaccacugcggcaccaucgccaacggcgugcugcagaccuucaugagaauggccuggggcggcagcuacaucgcccuggacagcggcaagggcagcugggacugcaucaugaccagcuaccaguaccugaucauccagaacaccaccugggaggaccacugccaguucagcagacccagccccaucggcuaccugggccugcugagccagagaaccagagacaucuacaucagcagaagacugcugggcaccuucaccuggacccugagcgacagcgagagcaacgagacccccggcggcuacugccugaccagauggaugcugaucgaggccgagcugaagugcuucggcaacaccgccguggccaagugcaacgagaagcacgacgaggaguucugcgacaugcugagacuguucgacuucugcaagcaggccaucagaagacugaaggccgaggcccagaugagcauccagcugaucaacaaggccgugaacgcccugaucaacgaccagcugaucaugaagaaccaccugagagacaucaugggcauccccuacugcaacuacagcaaguacugcuaccugaaccacaccgugaccggcagaaccagccugcccagaugcugccuggugagcaacggcagcuaccugaacgagacccacuucagcgacgacaucgagcagcaggccgacaacaugaucaccgagcugcugcagaaggaguacauggacagacagggcaagaccccccugggccugguggaccuguucguguucagcaccagcuucuaccugaucagcaucuuccugcaccuggugaagauccccacccacagacacgugaucggcaagcccugccccaagccccacagacugaaccacaugggcaucugcagcugcggccuguacaagcaccccggcgugcccgugaaguggaagagauga

SEQ ID NO: 40020 - RNA, 1473 nt, Artificial Sequence
  derived and/or modified CDS sequence (opt4) from LASV(LASV035-NIG-2009;Clade II)__AIT17588__GPCmut12
augggccagaucaucaccuucuuccaggaggugccccacgugaucgaggaggugaugaacaucgugcugaucgcccugagccugcuggccauccugaagggcaucuacaacguggccaccugcggccuguucggccuggugagcuuccugcugcugugcggcagaagcugcagcaccaccuacaagggcguguacgagcugcagacccuggagcuggacauggccagccugaacaugugcaugccccugagcugcaccaagaacaacagccaccacuacaucauggugggcaacgagaccggccuggagcugacccugaccaacaccagcaucaucaaccacaaguucugcaaccugagcgacgcccacaagaagaaccuguacgaccacgcccugaugagcaucaucagcaccuuccaccugagcauccccaacuucaaccaguacgaggccaugagcugcgacuucaacggcggcaagaucagcgugcaguacaaccugagccacgccuacgccguggacgccgccaaccacugcggcaccaucgccaacggcgugcugcagaccuucaugagaauggccuggggcggcagcuacaucgcccuggacagcggcaagggcagcugggacugcaucaugaccagcuaccaguaccugaucauccagaacaccaccugggaggaccacugccaguucagcagacccagccccaucggcuaccugggccugcugagccagagaaccagagacaucuacaucagcagaagacugcugggcaccuucaccuggacccugagcgacagcgagggcaacgagacccccggcggcuacugccugaccagauggaugcugaucgaggccgagcugaagugcuucggcaacaccgccguggccaagugcaacgagaagcacgacgaggaguucugcgacaugcugagacuguucgacuucugcaagcaggccaucagaagacugaaggccgaggcccagaugagcauccagcugaucaacaaggccgugaacgcccugaucaacgaccagcugaucaugaagaaccaccugagagacaucaugggcauccccuacugcaacuacagcaaguacugcuaccugaaccacaccgugaccggcaagaccagccugcccagaugcugccuggugagcaacggcagcuaccugaacgagacccacuucagcgacgacaucgagcagcaggccgacaacaugaucaccgagcugcugcagaaggaguacaucgacagacagggcaagaccccccugggccugguggaccuguucguguucagcaccagcuucuaccugaucagcaucuuccugcaccuggugaagauccccacccacagacacgugaucggcaagcccugccccaagccccacagacugaaccacaugggcaucugcagcugcggccuguacaagcaccccggcgugcccgugaaguggaagagauga

SEQ ID NO: 40021 - RNA, 1473 nt, Artificial Sequence
  derived and/or modified CDS sequence (opt4) from LASV(LASV1000-NIG-2009;Clade II)__AIT17782__GPCmut12
augggccagaucaucaccuucuuccaggaggugccccacgugaucgaggaggugaugaacaucgugcugaucgcccugagccugcuggccauccugaagggcaucuacaacguggccaccugcggccuguucggccuggugagcuuccugcugcugugcggcagaagcugcagcaccaccuacaagggcguguacgagcugcagacccuggagcuggacauggccagccugaacaugugcaugccccugagcugcaccaagaacaacagccaccacuacaucauggugggcaacgagaccggccuggagcugacccugaccaacaccagcaucaucaaccacaaguucugcaaccugagcgacgcccacaagaagaaccuguacgaccacgcccugaugagcaucaucagcaccuuccaccugagcauccccaacuucaaccaguacgaggccaugagcugcgacuucaacggcggcaagaucagcgugcaguacaaccugagccacaccuacgccguggacgccgccaaccacugcggcaccaucgccaacggcgugcugcagaccuucaugagaauggccuggggcggcagcuacaucgcccuggacagcggcaagggcagcugggacugcaucaugaccagcuaccaguaccugaucauccagaacaccaccugggaggaccacugccaguucagcagacccagccccaucggcuaccugggccugcugagccagagaaccagagacaucuacaucagcagaagacugcugggcaccuucaccuggacccugagcgacagcgagggcaacgagacccccggcggcuacugccugaccagauggaugcugaucgaggccgagcugaagugcuucggcaacaccgccguggccaagugcaacgagaagcacgacgaggaguucugcgacaugcugagacuguucgacuucugcaagcaggccaucaagagacugaagaccgaggcccagaugagcauccagcugaucaacaaggccgugaacgcccugaucaacgaccagcugaucaugaagaaccaccugagagacaucaugggcauccccuacugcaacuacagcaaguacugcuaccugaaccacaccgugaccggcaagaccagccugcccagaugcugccuggugagcaacggcagcuaccugaacgagacccacuucagcgacgacaucgagcagcaggccgacaacaugaucaccgagcugcugcagaaggaguacaucgacagacagggcaagaccccccugggccugguggaccuguucguguucagcaccagcuucuaccugaucagcaucuuccugcaccuggugaagauccccacccacagacacguggugggcaagcccugccccaagccccacagacugaaccacaugggcaucugcagcugcggccuguacaagcaccccggcgugcccgugaaguggaagagauga

SEQ ID NO: 40022 - RNA, 1473 nt, Artificial Sequence
  derived and/or modified CDS sequence (opt4) from LASV(LASV221-NIG-2010;Clade II)__AIT17624__GPCmut12
augggccagaucaucaccuucuuccaggaggugccccacgugaucgaggaggugaugaacaucgugcugaucgcccugagccugcuggccauccugaagggcaucuacaacguggccaccugcggccuguucggccuggugagcuuccugcugcugugcggcagaagcugcagcaccaccuacaagggcguguacgagcugcagacccuggagcuggacauggccagccugaacaugugcaugccccugagcugcaccaagaacaacagccaccacuacaucauggugggcaacgagaccggccuggagcugacccugaccaacaccagcaucaucaaccacaaguucugcaaccugagcgacgcccacaagaagaaccuguacgaccacgcccugaugagcaucaucagcaccuuccaccugagcauccccaacuucaaccaguacgaggccaugagcugcgacuucaacggcggcaagaucagcgugcaguacaaccugagccacaccuacgccaucgacgccgccaaccacugcggcaccaucgccaacggcgugcugcagaccuucaugagaauggccuggggcggcagcuacaucgcccuggacagcggcaagggcagcugggacugcaucaugaccagcuaccaguaccugaucauccagaacaccaccugggaggaccacugccaguucagcagacccagccccaucggcuaccugggccugcugagccagagaaccagagacaucuacaucagcagaagacugcugggcaccuucaccuggacccugagcgacagcgagggcaacgagacccccggcggcuacugccugaccagauggaugcugaucgaggccgagcugaagugcuucggcaacaccgccguggccaagugcaacgagaagcacgacgaggaguucugcgacaugcugagacuguucgacuucugcaagcaggccaucagaagacugaagaccgaggcccagaugagcauccagcugaucaacaaggccgugaacgcccugaucaacgaccagcugaucaugaagaaccaccugagagacaucaugggcauccccuacugcaacuacagcaaguacugcuaccugaaccacaccgugaccggcaagaccagccugcccagaugcugccuggugagcaacggcagcuaccugaacgagacccacuucagcgacgacaucgagcagcaggccgacaacaugaucaccgagaugcugcagaaggaguacauggacagacagggcaagaccccccugggccugguggaccuguucguguucagcaccagcuucuaccugaucagcaucuuccugcaccuggugaagauccccacccacagacacgugaucggcaagcccugccccaagccccacagacugaaccacaugggcaucugcagcugcggccuguacaagcaccccggcgugcccgugaaguggaagagauga

SEQ ID NO: 40023 - RNA, 1473 nt, Artificial Sequence
  derived and/or modified CDS sequence (opt4) from LASV(LASV237-NIG-2010;Clade II)__AIT17638__GPCmut12
augggccagaucaucaccuucuuccaggaggugccccacgugaucgaggaggugaugaacaucgugcugaucgcccugagccugcuggccauccugaagggcaucuacaacguggccaccugcggccuguucggccuggugagcuuccugcugcugugcggcagaagcugcagcaccaccuacaagggcguguacgagcugcagacccuggagcuggacauggccagccugaacaugugcaugccccugagcugcaccaagaacaacagccaccacuacaucauggugggcaacgagaccggccuggagcugacccugaccaacaccagcaucaucaaccacaaguucugcaaccugagcgacgcccacaagaaggaccuguacgaccacgcccugaugagcaucaucagcaccuuccaccugagcauccccaacuucaaccaguacgaggccaugagcugcgacuucaacggcggcaagaucagcgugcaguacaaccugagccacaccuacgccguggacgccgccaaccacugcggcaccaucgccaacggcgugcugcagaccuucaugagaauggccuggggcggcagcuacaucgcccuggacagcggcaagggcagcugggacugcaucaugaccagcuaccaguaccugaucauccagaacaccaccugggaggaccacugccaguucagcagacccagccccaucggcuaccugggccugcugagccagagaaccagagacaucuacaucagcagaagacugcugggcaccuucaccuggacccugagcgacagcgagggcaacgagacccccggcggcuacugccugaccagauggaugcugaucgaggccgagcugaagugcuucggcaacaccgccguggccaagugcaacgagaagcacgacgaggaguucugcgacaugcugagacuguucgacuucugcaagcaggccaucagaagacugaagaccgaggcccagaugagcauccagcugaucaacaaggccgugaacgcccugaucaacgaccagcugaucaugaagaaccaccugagagacaucaugggcauccccuacugcaacuacagcaaguacugcuaccugaaccacaccgugaccggcaagaccagccugcccagaugcugccuggugagcaacggcagcuaccugaacgagacccacuucagcgacgacaucgagcagcaggccgacaacaugaucaccgagcugcugcagaaggaguacauggacagacagggcaagaccccccugggccugguggaccuguucguguucagcaccagcuucuaccugaucagcaucuuccugcaccugaucaagauccccacccacagacacaucaccggcaagcccugccccaagccccacagacugaaccacaugggcaucugcagcugcggccuguacaagcaccccggcgugcccgugaaguggaagagauga

SEQ ID NO: 40024 - RNA, 1473 nt, Artificial Sequence
  derived and/or modified CDS sequence (opt4) from LASV(LASV253-NIG-2011;Clade II)__AIT17670__GPCmut12
augggccagaucaucaccuucuuccaggaggugccccacgugaucgaggaggugaugaacaucgugcugaucgcccugagccugcuggccauccugaagggcaucuacaacguggccaccugcggccuguucggccuggugagcuuccugcugcugugcggcagaagcugcagcaccaccuacaagggcguguacgagcugcagacccuggagcuggacauggccagccugaacaugugcaugccccugagcugcaccaagaacaacagccaccacuacaucauggugggcaacgagaccggccuggagcugacccugaccaacaccagcaucaucaaccacaaguucugcaaccugagcgacgcccacaagaagaaccuguacgaccacgcccugaugagcaucaucagcaccuuccaccugagcauccccaacuucaaccaguacgaggccaugagcugcgacuucaacggcggcaagaucagcgugcaguacaaccugagccacaccuacgccguggacgccgccaaccacugcggcaccaucgccaacggcgugcugcagaccuucaugagaauggccuggggcggcagcuacaucgcccuggacagcggcaagggcagcugggacugcaucaugaccagcuaccaguaccugaucauccagaacaccaccugggaggaccacugccaguucagcagacccagccccaucggcuaccugggccugcugagccagagaaccagagacaucuacaucagcagaagacugcugggcaccuucaccuggacccugagcgacagcgagggcaacgagacccccggcggcuacugccugaccagauggaugcugaucgaggccgagcugaagugcuucggcaacaccgccguggccaagugcaacgagaagcacgacgaggaguucugcgacaugcugagacuguucgacuucugcaagcaggccaucagaagacugaaggccgaggcccagaugagcauccagcugaucaacaaggccgugaacgcccugaucaacgaccagcugaucaugaagaaccaccugagagacaucaugggcauccccuacugcaacuacagcaaguacugcuaccugaaccacaccgugaccggcagaaccagccugcccagaugcugccuggugagcaacggcagcuaccugaacgagacccacuucagcgacgacaucgagcagcaggccgacaacaugaucaccgagcugcugcagaaggaguacaucgacagacagggcaagaccccccugggccugguggaccuguucguguucagcaccagcuucuaccugaucagcaucuuccugcaccuggugaagauccccacccacagacacaucaucggcaagcccugccccaagccccacagacugaaccacaugggcaucugcagcugcggccuguacaagcaccccggcgugcccgugaaguggaagagauga

SEQ ID NO: 40025 - RNA, 1473 nt, Artificial Sequence
  derived and/or modified CDS sequence (opt4) from LASV(LASV254-NIG-2011;Clade II)__AIT17674__GPCmut12
augggccagaucaucaccuucuuccaggaggugccccacgugaucgaggaggugaugaacaucgugcugaucgcccugagccugcuggccauccugaagggcaucuacaacguggccaccugcggccuguucggccuggugagcuuccugcugcugugcggcagaagcugcagcaccaccuacaagggcguguacgagcugcagacccuggagcuggacaugaccaaccugaacaugugcaugccccugagcugcaccaagaacaacagccaccacuacaucauggugggcaacgagaccggccuggagcugacccugaccaacaccagcaucaucaaccacaaguucugcaaccugagcgacgcccacaagaagaaccuguacaaccacgcccugaugagcaucaucagcaccuuccaccugagcauccccaacuucaaccaguacgaggccaugagcugcgacuucaacggcggcaagaucagcgugcaguacaaccugagccacagcuacgccguggacgccgccaaccacugcggcaccaucgccaacggcgugcugcagaccuucaugagaauggccuggggcggcagcuacaucgcccuggacagcggcaagggcaacugggacugcaucaugaccagcuaccaguaccugaucauccagaacaccaccugggaggaccacugccaguucagcagacccagccccaucggcuaccugggccugcugagccagagaaccagagacaucuacaucagcagaagacugcugggcaccuucaccuggacccugagcgacagcgagggcaacgagacccccggcggcuacugccugaccagauggaugcugaucgaggccgagcugaagugcuucggcaacaccgccguggccaagugcaacgagaagcacgacgaggaguucugcgacaugcugagacuguucgacuucugcaagcaggccaucagaagacugaagaccgaggcccaggccaacauccagcugaucaacaaggccgugaacgcccugaucaacgaccagcugaucaugaagaaccaccugagagacaucaugggcauccccuacugcaacuacagcaaguacugcuaccugaaccacaccgugaccggcaagaccagccugcccagaugcugccuggugagcaacggcagcuaccugaacgagacccacuucagcgacgacaucgagcagcaggccgacaacaugaucaccgagcugcugcagaaggaguacauggacagacagggcaagaccccccugggccugguggaccuguucguguucagcaccagcuucuaccugaucagcaucuuccugcaccuggugaagauccccacccacagacacgugaucggcaagcccugccccaagccccacagacugaaccacaugggcaucugcagcugcggccuguacaagcaccccggcgugcccgugaaguggaagagauga

SEQ ID NO: 40026 - RNA, 1473 nt, Artificial Sequence
  derived and/or modified CDS sequence (opt4) from LASV(Nig08-A19;Clade III)__ADU56618__GPCmut12
augggccagaucgugaccuucuuccaggaggugccccacgugaucgaggaggugaugaacaucgugcugaucgcccugagcauccuggccauccugaagggccuguacaacaucgccaccugcggccugaucggccuggugaccuuccugcugcugagcggcagaagcugcagcaugaccuacaagggcguguacgagcugcagacccuggagcugaacaugaacacccugaacaugugcaugccccugagcugcaccaagaacaacagccaccacuacaucauggugggcaacgagaccggccuggagcugacccugaccaacaccagccugcugcaccacaaguucugcaaccugagcgacgcccacaagaagaaccuguacgaccacacccugaugagcaucaucagcaccuuccaccugagcauccccaacuucaaccaguacgaggccaugagcugcgacuucaacggcggcaagaucaccgugcaguacaaccugagccacagcuacgccaucgacgccgccaaccacugcggcaccguggccaacggcgugcugcagaccuucaugagaauggccuggggcggcagcuacaucgcccuggacagcggcagaggcaagugggacugcaucaugaccagcuaccaguaccugaucauccagaacaccaccugggaggaccacugccaguucagcagacccagccccaucggcuaccugggccugcugagccagagaaccagagacaucuacaucagcagaagacugcugggcaccuucaccuggacccugagcgacagcgagggcaacgagacccccggcggcuacugccugaccagauggaugcugaucgaggccgagcugaagugcuucggcaacaccgccguggccaagugcaacgagaagcacgacgaggaguucugcgacaugcugagacuguucgacuucugcaagcaggccaucagaagacugaaggccgaggcccagaugagcauccagcugaucaacaaggccgugaacgcccugaucaacgaccagcugaucaugaagaaccaccugagagacaucaugggcauccccuacugcaacuacagcaaguacugcuaccugaaccacaccagcaccggcagaaccagccugcccagaugcugccuggugagcaacggcagcuaccugaacgagacccacuucagcgacgacaucgagcagcaggccgacaacaugaucaccgagaugcugcagaaggaguaccuggacagacagggcaagaccccccugggccugguggaccuguucguguucagcaccagcuucuaccugaucagcaucuuccugcaccuggugaagauccccacccacagacacaucgugggcaagcccugccccaagccccacagacugaaccacaugggcaucugcagcugcggccuguacaagcagcccggcgugcccgugagauggaagagauga

SEQ ID NO: 40027 - RNA, 1476 nt, Artificial Sequence
  derived and/or modified CDS sequence (opt4) from LASV(G1180-SLE-2010;Clade IV)__AIT17168__GPCmut12
augggccagaucgugaccuucuuccaggaggugccccacgugaucgaggaggugaugaacaucgugcugaucgcccugagcauccuggccgugcugaagggccuguacaacuucgccaccugcggccuggugggccugcugaccuuccugcugcugugcggcagaagcugcaccgccagcagauacaagggcguguacgagcugcagacccuggagcugaacauggagacccugaacaugugcaugccccugagcugcaccaagaacaacagccaccacuacaucauggugggcaacgagaccggccuggagcugacccugaccaacaccagcaucaucaaccacaaguucugcaaccugagcgacgcccacaagaagaaccuguacgaccacgcccugaugagcaucaucagcaccuuccaccugagcauccccaacuucaaccaguacgaggccaugagcugcgacuucaacggcggcaagaucagcgugcaguacaaccugagccacagcuacgccggcgacgccgccaaccacugcggcaccguggccaacggcgugcugcagaccuucaugagaauggccuggggcggcagcuacaucgcccuggacagcggccacggcagcugggacugcaucaugaccagcuaccaguaccugaucauccagaacaccaccugggaggaccacugccaguucagcagacccagccccaucggcuaccugggccugcugagccagagaaccagagacaucuacaucagcagaagacugcugggcaccuucaccuggacccugagcgacagcgagggcaaggacacccccggcggcuacugccugaccagauggaugcugaucgaggccgagcugaagugcuucggcaacaccgccguggccaagugcaacgagaagcacgacgaggaguucugcgacaugcugagacuguucgacuucugcaagcaggccauccagagacugaaggccgaggcccagaugagcauccagcugaucaacaaggccgugaacgcccugaucaacgaccagcugaucaugaagaaccaccugagagacaucaugggcauccccuacugcaacuacagcaaguacugcuaccugaaccacaccaccaccggcaagaccagccugcccaagugcugccuggugagcaacggcagcuaccugaacgagacccacuucagcgacgacaucgagcagcaggccgacaacaugaucaccgagaugcugcagaaggaguacauggagagacagggcaagaccccccugggccugguggaccuguucguguucagcaccagcuucuaccugaucagcaucuuccugcaccuggugaagauccccacccacagacacaucgugggcaagagcugccccaagccccacagacugaaccacaugggcaucugcagcugcggccuguacaagcagcccggcgugcccgugaaguggaagagauga

SEQ ID NO: 40028 - RNA, 1476 nt, Artificial Sequence
  derived and/or modified CDS sequence (opt4) from LASV(G1442-SLE-2011;Clade IV)__AIT17180__GPCmut12
augggccagaucgugaccuucuuccaggaggugccccacgugaucgaggaggugaugaacaucgugcugaucgcccugagcauccuggccgugcugaagggccuguacaacguggccaccugcggccugaucggccuggugaccuuccugcugcugugcggcagaagcugcaccaccacccuguacaagggcguguacgagcugcagacccuggagcugaacauggagacccugaacaugugcaugccccugagcugcaccaagaacaacagccaccacuacaucagagugggcaacgagaccggccuggagcugacccugaccaacaccagcaucaucaaccacaaguucugcaaccugagcgacgcccacaagaagaaccuguacgaccacgcccugaugagcaucaucagcaccuuccaccugagcauccccaacuucaaccaguacgaggccaugagcugcgacuucaacggcggcaagaucagcgugcaguacaaccugagccacagcuacgccggcgacgccgccaaccacugcggcaccguggccaacggcgugcugcagaccuucaugagaauggccuggggcggcagcuacaucgcccuggacagcggcagaggcaacugggacugcaucaugaccagcuaccaguaccugaucauccagaacaccaccugggacgaccacugccaguucagcagacccagccccaucggcuaccugggccugcugagccagagaaccagagacguguacaucagcagaagacugcugggcaccuucaccuggacccugagcgacagcgagggcaaggacacccccggcggcuacugccugaccagauggaugcugaucgaggccgagcugaagugcuucggcaacaccgccguggccaagugcaacgagaagcacgacgaggaguucugcgacaugcugagacuguucgacuucugcaagcaggccauccagagacugaaggccgaggcccagaugagcauccagcugaucaacaaggccgugaacgcccugaucaacgaccagcugaucaugaagaaccaccugagagacaucaugggcauccccuacugcaacuacagcaaguacugcuaccugaacaacaccgccaccggcaagaccagccugcccaagugcugccugaucagcaacggcagcuaccugaacgagacccacuucagcgacgacaucgagcaggaggccgacaacaugaucaccgagaugcugcagaaggaguacauggagagacagggcaagaccccccugggccugguggaccuguucguguucagcaccagcuucuaccugaucagcaucuuccugcaccuggugaagauccccacccacagacacaucgugggcaagagcugccccaagccccacagacugaaccacaugggcaucugcagcugcggccuguacaagcagcccggcgugcccgugagauggaagagauga

SEQ ID NO: 40029 - RNA, 1476 nt, Artificial Sequence
  derived and/or modified CDS sequence (opt4) from LASV(G3010-SLE-2013;Clade IV)__AIT17344__GPCmut12
augggccagaucgugaccuucuuccaggaggugccccacgugaucgaggaggugaugaacaucgugcugaucgcccugagcauccuggccgugcugaagggccuguacaacuucgccaccugcggccuggugggccuggugaccuuccugcugcugugcggcagaagcugcaccaccagccuguacaagggcguguacgagcugcagacccuggagcugaacauggagacccugaacaugugcaugccccugagcugcaccaagaacaacagccaccacuacaucauggugggcaacgagaccggccuggagcugacccugaccaacaccagcaucaucaaccacaaguucugcaaccugagcgacgcccacaagaagaaccuguacaaccacgcccugaugagcaucaucagcaccuuccaccugagcauccccaacuucaaccaguacgaggccaugagcugcgacuucaacggcggcaagaucagcgugcaguacaaccugagccacagcuacgccggcgacgccgccagccacugcggcaccguggccaacggcgugcugcagaccuucaugagaauggccuggggcggcagcuacaucgcccuggacagcggcuacggcaagugggacugcaucaugaccagcuaccaguaccugaucauccagaacaccaccugggaggaccacugccaguucagcagacccagccccaucggcuaccugggccugcugagccagagaaccagagacaucuacaucagcagaagacugcugggcaccuucaccuggacccugagcgacagcgagggcaaggacacccccggcggcuacugccugaccagauggaugcugaucgaggccgagcugaagugcuucggcaacaccgccguggccaagugcaacgagaagcacgacgaggaguucugcgacaugcugagacuguucgacuucugcaagcaggccauccagagacugaagaccgaggcccagaugagcauccagcugaucaacaaggccgugaacgcccugaucaacgaccagcugaucaugaagaaccaccugagagacaucaugggcauccccuacugcaacuacagcaaguacugcuaccugaaccacaccaccaccggcaagaccagccugcccaagugcugccuggugagcaacggcagcuaccugaacgagacccacuucagcgacgacaucgagcagcaggccgacaacaugaucaccgagaugcugcagaaggaguacauggagagacagggcaagaccccccugggccugguggaccuguucguguucagcaccagcuucuaccugaucagcaucuuccugcaccuggugaagauccccacccacagacacaucgugggcaagagcugccccaagccccacagacugaaccacaugggcaucugcagcugcggccuguacaagcagcccggcgugcccgugagauggaagagauga

SEQ ID NO: 40030 - RNA, 1476 nt, Artificial Sequence
  derived and/or modified CDS sequence (opt4) from LASV(G502-SLE-2009;Clade IV)__AIT17126__GPCmut12
augggccagaucgugaccuucuuccaggaggugccccacgugaucgaggaggugaugaacaucgugcugaucgcccugagcauccuggccgugcugaagggccuguacaacuucgccaccugcggccuggugggccugcugaccuuccugcugcugugcggcagaagcugcaccaccggccuguacaagggcguguacgagcugcagacccuggagcugaacauggagacccugaacaugugcaugccccugagcugcaccaagaacaacagccaccacuacaucauggugggcaacgagaccggccuggagcugacccugaccaacaccagcaucaucaaccacaaguucugcaaccugagcgacgcccacaagaagaaccuguacgaccacgcccugaugagcaucaucagcaccuuccaccugagcauccccaacuucaaccaguacgaggccaugagcugcgacuucaacggcggcaagaucagcgugcaguacaaccugagccacagcuacgccggcgacgccgccgaccacugcggcaccguggccaacggcgugcugcagaccuucaugagaauggccuggggcggcagcuacaucgcccuggacagcggcagaggcagaugggacugcaucaugaccagcuaccaguaccugaucauccagaacaccaccugggaggaccacugccaguucagcagacccagccccaucggcuaccugggccugcugagccagagaaccagagacaucuacaucagcagaagacugcugggcaccuucaccuggacccugagcgacagcgagggcaaggacacccccggcggcuacugccugaccagauggaugcugaucgaggccgagcugaagugcuucggcaacaccgccguggccaagugcaacgagaagcacgacgaggaguucugcgacaugcugagacuguucgacuucugcaagcaggccauccagagacugaaggccgaggcccagaugagcauccagcugaucaacaaggccgugaacgcccugaucaacgaccagcuggugaugaagaaccaccugagagacaucaugggcauccccuacugcaacuacagcagauacugcuaccugaaccacaccaccaccggcagaaccagccugcccaagugcugccuggugagcaacggcagcuaccugaacgagacccacuucagcgacgacaucgagcagcaggccgacaacaugaucaccgagaugcugcagaaggaguacauggagagacagggcaagaccccccugggccugguggaccuguucguguucagcaccagcuucuaccugaucagcaucuuccugcaccuggugaagauccccacccacagacacaucgugggcaagagcugccccaagccccacagacugaaccacaugggcaucugcagcugcggccuguacaagcagcccggcgugcccgugaaguggaagagauga

SEQ ID NO: 40031 - RNA, 1476 nt, Artificial Sequence
  derived and/or modified CDS sequence (opt4) from LASV(G733-SLE-2010;Clade IV)__AIT17154__GPCmut12
augggccagaucgugaccuucuuccaggaggugccccacgugaucgaggaggugaugaacaucgugcugaucgcccugagcauccuggccgugcugaagggccuguacaacuucgccaccugcggcaucgugggccuggugagcuuccugcugcugugcggcagaagcugcaccaccagccuguacaagggcguguacgagcugcagacccuggagcugaacauggagacccugaacaugugcaugccccugagcugcaccaagaacaacagccaccacuacaucauggugggcaacgagaccggccuggagcugacccugaccaacaccagcaucaucaaccacaaguucugcaaccugagcgacgcccacaagaagaaccuguacgaccacgcccugaugagcaucaucagcaccuuccaccugagcauccccaacuucaaccaguacgaggccaugagcugcgacuucaacggcggcaagaucagcgugcaguacaaccugagccacagcuacgccggcgacgccgccaaccacugcggcaccaucgccaacggcgugcugcagaccuucaugagaauggccuggggcggcagcuacaucgcccuggacagcggcagagacagaugggacugcaucaugaccagcuaccaguaccugaucauccagaacaccaccugggaggaccacugccaguucagcagacccagccccaucggcuaccugggccugcugagccagagaaccagagacaucuacaucagcagaagacugcugggcaccuucaccuggacccugagcgacagcgagggcaaggacacccccggcggcuacugccugaccagauggaugcugaucgaggccgagcugaagugcuucggcaacaccgccguggccaagugcaacgagaagcacgacgaggaguucugcgacaugcugagacuguucgacuucugcaagcaggccauccagagacugaaggccgaggcccagaugagcauccagcugaucaacaaggccgugaacgcccugaucaacgaccagcugaucaugaagaaccaccugagagacaucaugggcauccccuacugcaacuacagcaaguacugcuaccugaaccacaccaccaccggcaagaccagccugcccaagugcugccuggugagcaacggcagcuaccugaacgagacccacuucagcgacgacaucgagcagcaggccgacaacaugaucaccgagaugcugcagaaggaguacauggagagacagggcaagaccccccugggccugguggaccuguucguguucagcaccagcuucuaccugaucagcaucuuccugcaccuggugaagauccccacccacagacacguggugggcaagagcugccccaagccccacagacugaaccacaugggcaucugcagcugcggccuguacggccagcccggcgugcccgugaaguggaagagauga

SEQ ID NO: 40032 - RNA, 1476 nt, Artificial Sequence
  derived and/or modified CDS sequence (opt4) from MOPV/LASV reassortant(IGS-1;Clade IV)__AFY05576__GPCmut12
augggccagaucgugaccuucuuccaggaggugccccacgugaucgaggaggugaugaacaucgugcugaucgcccugagcgugcuggccgugcugaagggccuguacaacuucgccaccugcggccuggugggccuggugaccuuccugcugcugugcggcagaagcugcaccaccagccuguacaagggcguguacgagcugcagacccuggagcugaacauggagacccugaacaugugcaugccccugagcugcaccaagaacaacagccaccacuacaucauggugggcaacgagaccggccuggagcugacccugaccaacaccagcaucaucaaccacaaguucugcaaccugagcgacgcccacaagaagaaccuguacgaccacgcccugaugagcaucaucagcaccuuccaccugagcauccccaacuucaaccaguacgaggccaugagcugcgacuucaacggcggcaagaucagcgugcaguacaaccugagccacagcuacgccggcgacgccgccaaccacugcggcaccguggccaacggcgugcugcagaccuucaugagaauggccuggggcggcagcuacaucgcccuggacagcggcagaggcaacugggacugcaucaugaccagcuaccaguaccugaucauccagaacaccaccugggaggaccacugccaguucagcagacccagccccaucggcuaccugggccugcugagccagagaaccagagacaucuacaucagcagaagacugcugggcaccuucaccuggacccugagcgacagcgagggcgaggacacccccggcggcuacugccugaccagauggaugcugaucgaggccgagcugaagugcuucggcaacaccgccguggccaagugcaacgagaagcacgacgaggaguucugcgacaugcugagacuguucgacuucugcaagcaggccauccagagacugaaggccgaggcccagaugagcauccagcugaucaacaaggccgugaacgcccugaucaacgaccagcugaucaugaagaaccaccugagagacaucaugggcauccccuacugcaacuacagcaaguacugcuaccugaaccacaccaccaccggcagaaccagccugcccaagugcugccuggugagcaacggcagcuaccugaacgagacccacuucagcgacgacaucgagcagcaggccgacaacaugaucaccgagaugcugcagaaggaguacauggagagacagggcaagaccccccugggccugguggaccuguucguguucagcaccagcuucuaccugaucagcaucuuccugcaccuggugaagauccccacccacagacacaucgugggcaagagcugccccaagccccacagacugaaccacaugggcaucugcagcugcggccuguacaagcagcccggcgugcccgugaaguggaagagauga

SEQ ID NO: 40033 - RNA, 1476 nt, Artificial Sequence
  derived and/or modified CDS sequence (opt4) from LASV(LM765-SLE-2012;Clade IV)__AIT17814__GPCmut12
augggccagaucgugaccuucuuccaggaggugccccacgugaucgaggaggugaugaacaucgugcugaucgcccugagcauccuggccgugcugaagggccuguacaacuucgccaccugcggccuggugggccuggugaccuuccugcugcugugcggcagaagcugcaccaccagccuguacaagggcguguacgagcugcagacccuggagcugaacauggagacccugaacaugugcaugccccugagcugcaccaagaacaacagccaccacuacaucauggugggcaacgagaccggccuggagcugacccugaccaacaccagcaucaucgaccacaaguucugcaaccugagcgacgcccacagaaagaaccuguacgaccacgcccugaugagcaucaucagcaccuuccaccugagcauccccaacuucaaccaguacgaggccaugagcugcgacuucaacggcggcaagaucagcgugcaguacaaccugagccacagcuacgccaaggacgccgccgaccacugcggcaccguggccaacggcgugcugcagaccuucaugagaauggccuggggcggcagcuacaucgcccuggacagcggcagaggcagaugggacugcaucaugaccagcuaccaguaccugaucauccagaacaccaccugggaggaccacugccaguucagcagacccagccccaucggcuaccugggccugcugagccagagaaccagagacaucuacaucagcagaagacugcugggcaccuucaccuggacccugagcgacagcgagggcaaggacacccccggcggcuacugccugaccagauggaugcugaucgaggccgagcugaagugcuucggcaacaccgccguggccaagugcaacgagaagcacgacgaggaguucugcgacaugcugagacuguucgacuucugcaagcaggccauccagagacugaaggccgaggcccagaugagcauccagcugaucaacaaggccgugaacgcccugaucaacgaccagcugaucaugaagaaccaccugagagacaucaugggcauccccuacugcaacuacagcaaguacugcuaccugaaccacaccaccaccggcaagaccagccugcccaagugcugccuggugagcaacggcagcuaccugaacgagacccacuucagcgacgacaucgagcagcaggccgacaacaugaucaccgagaugcugcagaaggaguacauggagagacagggcaagaccccccugggccugguggaccuguucguguucagcaccagcuucuaccugaucagcaucuuccugcaccuggugaagauccccacccacagacacaucgugggcaagcccugccccaagccccacagacugaaccacaugggcaucugcagcugcggccuguacaagcagcccggcgugcccgugaaguggaagagauga

SEQ ID NO: 40034 - RNA, 1476 nt, Artificial Sequence
  derived and/or modified CDS sequence (opt4) from LASV(LM776-SLE-2012;Clade IV)__AIT17824__GPCmut12
augggccagaucgugaccuucuuccaggaggugccccacgugaucgaggaggugaugaacaucgugcugaucgcccugagcauccuggccgugcugaagggccuguacaacuucgccaccugcggccuggugggccuggugaccuuccugcugcugugcggcagaagcugcaccaccagcguguacaagggcguguacgagcugcagacccuggagcugaacauggagacccugaacaugugcaugccccugagcugcaccaagaacaacagccaccacuacaucauggugggcaacgagaccggccuggagcugacccugaccaacaccagcaucaucaaccacaaguucugcaaccugagcgacgcccacaagaagaaccuguacgaccacgcccugaugagcaucaucagcaccuuccaccugagcauccccaacuucaaccaguacgaggccaugagcugcgacuucaacggcggcaagaucagcgugcaguacaaccugagccacagcuacgccggcgacgccgccaaccacugcggcaccguggccaacggcgugcugcagaccuucaugagaauggccuggggcggcagcuacaucgcccuggacagcggccacggcaagugggacugcaucaugaccagcuaccaguaccugaucauccagaacaccaccugggaggaccacugccaguucagcagacccagccccaucggcuaccugggccugcugagccagagaaccagagacaucuacaucagcagaagacugcugggcaccuucaccuggacccugagcgacagcgagggcaaggacacccccggcggcuacugccugaccagauggaugcugaucgaggccgagcugaagugcuucggcaacaccgccguggccaagugcaacgagaagcacgacgaggaguucugcgacaugcugagacuguucgacuucugcaagcaggccauccagagacugaaggccgaggcccagaugagcauccagcugaucaacaaggccgugaacgcccugaucaacgaccagcugaucaugaagaaccaccugagagacaucaugggcauccccuacugcaacuacagcaaguacugcuaccugaaccacaccaccaccggcaagaccagccugcccaagugcugccuggugagcaacggcagcuaccugaacgagacccacuucagcgacgacaucgagcagcaggccgacaacaugaucaccgagaugcugcagaaggaguacauggagagacagggcaagaccccccugggccugguggaccuguucguguucagcaccagcuucuaccugaucagcaucuuccugcaccuggugaagauccccacccacagacacaucgugggcaagagcugccccaagccccacagacugaaccacaugggcaucugcagcugcggccuguacaagcagcccggcgugcccgugagauggaagagauga

SEQ ID NO: 40035 - RNA, 1476 nt, Artificial Sequence
  derived and/or modified CDS sequence (opt4) from LASV(Mad39;Clade IV)__ANH09722__GPCmut12
augggccagaucgugaccuucuuccaggaggugccccacgugaucgaggaggugaugaacaucgugcugaucgcccugagcauccuggccgugcugaagggccuguacaacguggccaccugcggccugaucggccuggugaccuuccugcugcugugcggcagaagcugcaccaccacccuguacaagggcguguacgagcugcaggcccuggagcugaacauggagacccugaacaugugcaugccccugagcugcaccaagaacaacagccaccacuacaucagagugggcaacgagaccggccuggagcugacccugaccaacaccagccugaucaaccacaaguucugcaaccugagcgacgcccacaagaagaaccuguacgaccacgcccugaugagcaucaucagcaccuuccaccugagcauccccaacuucaaccaguacgaggccaugagcugcgacuucaacgacggcaagaucagcgugcaguacaaccugagccacaccuacgccggcgacaccgccaaccacugcggcaccguggccaacggcgugcugcagaccuucaugagaauggccuggggcggcagcuacaucgcccuggacagcggcagaggcggcugggacugcaucaugaccagcuaccaguaccugaucauccagaacaccaccugggaggaccacugccaguucagcagacccagccccaucggcuaccugggccugcugagccagagaaccagagacaucuacaucagcagaagacugcugggcaccuucaccuggacccugagcgacagcgagggcaaggacacccccggcggcuacugccugaccagauggaugcugaucgaggccgagcugaagugcuucggcaacaccgccguggccaagugcaacgagaagcacgacgaggaguucugcgacaugcugagacuguucgacuucugcaagcaggccauccagagacugaaggccgaggcccagaugagcauccagcugaucaacaaggccgugaacgcccugaucaacgaccagcugaucaugaagaaccaccugagagacaucaugggcauccccuacugcaacuacagcaaguacugcuaccugaaccacaccgugaccggcaagaccagccugcccaagugcugccuggugagcaacggcagcuaccugaacgagacccacuucagcgacgacaucgagcagcaggccgacaacaugaucaccgagaugcugcagaaggaguacauggagagacagggcaagaccccccugggccugguggaccuguucguguucagcaccagcuucuaccugaucagcaucuuccugcaccuggugaagauccccacccacagacacguggugggcaagcccugccccaagccccacagacugaaccacaugggcaucugcagcugcggcuucuacaagcagcccggcgugcccgugagauggaagagauga

SEQ ID NO: 40036 - RNA, 1476 nt, Artificial Sequence
  derived and/or modified CDS sequence (opt4) from LASV(Z0947-SLE-2011;Clade IV)__AIT17840__GPCmut12
augggccagaucgugaccuucuuccaggaggugccccacgugaucgaggaggugaugaacaucgugcugaucgcccugagcauccuggccgugcugaagggccuguacaacuucgccaccugcggccuggugggccuggugaccuuccugcugcugugcggcagaagcugcaccaucagccuguacaagggcguguacgagcugcagacccuggagcugaacauggagacccugaacaugugcaugccccugagcugcaccaagaacaacagccaccacuacaucauggugggcaacgagaccggccuggagcugacccugaccaacaccagcaucaucaaccacaaguucugcaaccugagcgacgcccacaagaagaaccuguacgaccacgcccugaugagcaucaucagcaccuuccaccugagcauccccaacuucaaccaguacgaggccaugagcugcgacuucaacggcggcaagaucagcgugcaguacaaccugagccacagcuacgccggcgacgccgccaaccacugcggcaccguggccaacggcgugcugcagaccuucaugagaauggccuggggcggcagcuacaucgcccuggacagcggcagagacagaugggacugcaucaugaccagcuaccaguaccugaucauccagaacaccaccugggaggaccacugccaguucagcagacccagccccaucggcuaccugggccugcugagccagagaaccagagacaucuacaucagcagaagacugcugggcaccuucaccuggacccugagcgacagcgagggcaaggacacccccggcggcuacugccugaccagauggaugcugaucgaggccgagcugaagugcuucggcaacaccgccguggccaagugcaacgagaagcacgacgaggaguucugcgacaugcugagacuguucgacuucugcaagcaggccauccagagacugaaggccgaggcccagaugagcauccagcugaucaacaaggccgugaacgcccugaucaacgaccagcugaucaugaagaaccaccugagagacaucaugggcauccccuacugcaacuacagcaaguacugcuaccugaaccacaccaccaccggcaagaccagccugcccaagugcugccuggugagcaacggcagcuaccugaacgagacccacuucagcgacgacaucgagcagcaggccgacaacaugaucaccgagaugcugcagaaggaguacauggagagacagggcaagaccccccugggccugguggaccuguucguguucagcaccagcuucuaccugaucagcaucuuccugcaccuggugaagauccccacccacagacacaucgugggcaagcccugccccaagccccacagacugaaccacaugggcaucugcagcugcggccuguacaagcagcccggcgugcccgugaaguggaagagauga

SEQ ID NO: 40037 - RNA, 1476 nt, Artificial Sequence
  derived and/or modified CDS sequence (opt5) from LASV(Josiah;Clade IV)__NP_694870__GPCmut12
augggccagaucgugaccuucuuucaagaggucccccacguuauugaagaggugaugaacaucgugcugauugcccucagcguccuggcugugcuuaaggggcuguacaauuucgccacaugcggacucguuggccuggugacguuucuucugcucugugggagauccugcaccacaucucuguauaaaggagucuacgaacugcagacccucgagcugaacauggaaacacuuaauauguguaugccucugagcugcaccaagaacaauucccaucacuauaucauggugggcaacgagacagggcucgagcugacccuuacgaauaccucuauuaucaaccauaaauucuguaaucugagcgacgcgcacaagaaaaaccucuacgaucaugcucugauguccaucauuucuacauuucaccugagcaucccgaauuucaaccaguaugaagccauguccugcgacuuuaauggaggcaagauuagcguucaguacaaccucucucacuccuaugccggcgaugcugccaaucauugugggaccguggcuaacggaguccugcaaacauucaugcggauggccuggggcgggagcuacaucgcgcuugacucuggacgcggcaacugggauugcauuaugaccuccuaccaguaucugaucauucagaauacgacaugggaggaccacugucaguuuagcagacccucuccuaucggguaccucggacugcuuucccaacggacccgcgauaucuauauuagcagacggcugcucggcacauucaccuggacccuguccgacucugaaggcaaggauacacccgggggauacugccugacgcgcuggaugcucaucgaggccgagcugaaauguuuuggcaacaccgcuguggccaagugcaaugaaaaacaugacgaggaguucugcgauaugcuuagacuguuugacuucuguaagcaggcuauucagcggcucaaagccgaagcgcagaugagcauccaacugauuaacaaggccgugaaugcucuuaucaacgaucagcugaucaugaagaaucaccuccgcgacauuauggggaucccuuauugcaacuacuccaaauauuguuaccugaaucacacaaccacaggaagaaccagccugcccaagugcugucucgucucuaacggcuccuaccugaaugaaacgcauuucagcgacgauauugagcagcaagccgacaacaugaucacagagaugcuucagaaagaauauauggagcggcaggggaagaccccucugggacucguugaucuguuuguguucucuaccagcuuuuaccugauuuccaucuuccuucaccucgugaaaaucccgacacaucgccacauugucggcaagucuugccccaaaccucauagacugaaucacaugggcaucuguagcugcgggcuguauaagcagcccggagugccuguuaaguggaaacgguga

SEQ ID NO: 40038 - RNA, 1473 nt, Artificial Sequence
  derived and/or modified CDS sequence (opt5) from LASV(LP;Clade I)__AAF86701__GPCmut12
augggccagaucauuaccuucuuucaagaggugccccacgucaucgaagagguuaugaacauugugcugaucgcccucagccugcuugcuauucugaaggggcucuacaauaucgccacaugcggaaucauuggccugguggcguuccuuuuucugugugggaaauccugcucucucacgcugaagggaggcuaugaacugcagacccucgagcugaacauggaaacacuuaauauguguaugccucugagcugcaccaaaaacuccucucaucacuacaucagagucgggaaugagacaggacucgagcugacccuuacaaacaccagcauuaucaaucauaaguucuguaaccuguccgacgcucacaaaaagaaucucuaugaucaugcccugaugucuauuaucagcacguuucaccuguccauuccgaacuucaaucaguacgaagccaugagcugcgacuuuaacggcggcaagaucucugugcaguauaaucucucccacagcuacgcuggggaugccgcugagcauuguggaaccguugccaacggcgugcugcaaacauucaugcggauggcguggggagggcgcuauaucgcccuugacucuggcaaagggaauugggauugcauuaugaccuccuaccaguaccugaucauucagaacacaaccugggaagaccacugucaguuuagcagacccucuccuaucggauaucucggccugcuuucccaacggacgcgcgauauuuacaucagcagacggcugcucggcacauucaccuggacacuguccgacucugaggggaacgagacccccggaggcuauugccugacccgcuggaugcucaucgaagcugagcugaaguguuuugggaauacagccgucgcuaaaugcaacgaaaagcaugaugaggaguucugcgacaugcuuagacuguuugauuucuguaaacaggccauucggcgccucaaggcggaagcccagaugagcauccagcugauuaauaaggcugugaacgcccuuaucaaugaccaacugauuaugaaaaaccaccucagagauaucaugggaaucccuuacugcaauuauuccaaguacuguuaucugaaccacacgagcucuggccggaccucccugcccaaaugcugucucauuagcaaugggucuuaccugaacgagacacaguucagcgacgacaucgaacagcaagcugauaauaugauuaccgagaugcuucagaaggaauacaucgagcgccagggaaaaacaccucugggccucguugacauuuuuaucuucuccaccucuuuuuaucugauuagcaucuuccugcaucuuaucaagauuccgacgcacagacauaucgugggcaaacccugcccuaagccccaccggcucaaccauaugggggucuguuccugcggacuguacaagcacccuggcgugcccacaaaauggaagcgcuga

SEQ ID NO: 40039 - RNA, 1473 nt, Artificial Sequence
  derived and/or modified CDS sequence (opt5) from LASV(803213;Clade II)__AAF86703__GPCmut12
augggccagaucauuaccuucuuucaagaggugccccacgucaucgaagagguuaugaacauugugcugaucgcccucagccugcuugcuauucugaaggggaucuacaauguggccacaugcggacucuucggccugaucuccuuucuucugcucugugggagaucuugcagcgucacguauaaaggaguguacgaacugcagacccuggagcucaacauggcgaaucugaacauguguaugccucuuuccugcacaaagaauaacucucaucacuauauuaugguuggcaaugaaaccgggcuggagcucacacugaccaacacaagcaucauuaaucauaaauucuguaaccuuuccgacgcucacaagaaaaaucuguacgaucaugcccucaugucuaucauuagcaccuuucaccuguccaucccgaacuucaaucaguaugaggccaugagcugcgacuuuaacggaggcaagauuucugugcaguacaaucugucccacagcuucgcugucgaugccgcuaaccauuguggcacgaucgccaacggggugcuccaaaccuuuaugcggauggcguggggaggcucuuauaucgcccuggacuccgggaagggaaauugggauugcauuaugacaagcuaccaguaccuuaucauucagaacaccacaugggaagaccacugucaguucucucgccccuccccuaucggcuaucuggggcuccugagccaaagaacccgggauauuuacaucucccgcagacuucugggaacguuuacauggacccucucugacagcgagggcaaugaagcucccggcggguauugccugacacgguggaugcugaucgaggccgagcucaaauguuucggaaacaccgcuguugccaagugcaaugaaaaacaugaugaggaauuuugcgacaugcugcgccuuuucgauuucuguaagcaggcgauuaaaagacugaagaccgaggcccagauguccauccagcucauuaacaaggcugugaaugcccugaucaacgaccaacuuauuaugaaaaaucaucugcgggauaucaugggcaucccuuacugcaacuauagccgcuacuguuaucucaaucacacagucacggggaagaccucucugcccagaugcugucugguguccaacggaagcuaccucaaugaaacacacuuuucugacgacauugagcagcaggcugauaacaugaucaccgagaugcugcaaaaagaauacauggaccggcagggcaagacaccucuugggcugguggaucucuucgucuuuagcaccuccuucuaucugauuucuaucuuucugcaccuuguuaaaauuccgacgcaucgccacaucgugggaaagcccugcccuaaaccccauagacucaaucacaugggcauuuguagcugcggccuguacaagcacccuggggugcccgucaaguggaaacgguga

SEQ ID NO: 40040 - RNA, 1473 nt, Artificial Sequence
  derived and/or modified CDS sequence (opt5) from LASV(GA391;Clade III)__CAA36645__GPCmut12
augggccagaucgugaccuucuuucaagaggucccccacguuauugaagaggugaugaacaucgugcugauugcccucagcauccuggcuauucuuaaggggcuguacaaugucgccacaugcggacucaucggccuggugacguuccuucugcucuccgggagaucuuguagccugaucuauaaaggaaccuacgaacugcagacacucgagcugaacauggaaacccuuaauaugugcaugccucuguccuguacaaagaacaauucucaucacuauauucggguuggcaacgagaccgggcucgagcugacacuuaccaauacgagcauccugaaccauaaauuuugcaaucucuccgacgcgcacaagcgcaaccuguacgaucauucucugaugagcauuaucuccaccuuccaccucagcauuccgaauuuuaaccaguaugaagcuaugucuugugacuucaauggaggcaaaaucacagugcaguacaaccugucccacagcuuugccgucgaugccgcuggccauugcgggacccuugccaauggagugcugcaaacauucaugagaauggcuuggggcgggucuuauauugcccucgacuccggacggggcaacugggauuguaucaugaccagcuaccaguaccugaucauucagaacacgacaugggacgaucacugccaguuuucucgccccuccccuaucggguaucuuggacugcucagccaaagaacccgggacauuuacaucucccgcagacugcugggcacauucaccuggacccucucugauagcgagggcaaugaaacacccgggggauauugucugacgcgguggaugcuuauugaggcggagcugaagugcuuuggcaacaccgccguugcuaaguguaaugaaaaacaugacgaggaguucugcgauaugcuccgccuguuugacuucugcaagcaggccaucagacggcuuaaaacagaagcucagauguccauccagcugauuaacaaggccgugaaugcgcucaucaacgaucaacugauuaugaaaaaucaucugcgcgacaucauggggauuccuuacuguaacuauagcagauacugcuaucucaaucacaccucuacaggaaagaccucccugccccgguguugccuuaucagcaacggcucuuaccugaaugaaacgaaguucagcgacgauaucgagcagcaggccgacaacaugauuacagagaugcuccaaaaagaauacaucgaucgccaggggaagaccccucugggacuggucgaccuuuuuguguucuccaccucuuuuuaucucauuagcaucuuccugcaccuggugaaaauuccgacacacagacauaucgucggcaagcccuguccuaaaccccaccggcucaaucauaugggcauuugcuccugugggcuguacaagcagccuggaguucccgugagauggaaacgcuga

SEQ ID NO: 40041 - RNA, 1476 nt, Artificial Sequence
  derived and/or modified CDS sequence (opt5) from LASV(AV;Clade V)__CCA30314__GPCmut12
augggccagaucgugaccuucuuucaagaggucccccacguuauugaagaggugaugaacaucgugcugauugcccucagcauccuggcuguccuuaaggggcuguacaauauugccacaugcggacucaucggccugaucacguuccuucugcucugugggagauccugcucuagcaaccuguauaaaggaguguacgaacugcagucccucgaccugaauauggagacccuuaacauguguaugccucugucuugcacaaagaauaacagccaucacuauauucggguuggcaaugauaccgggcucgaacugacacuuaccaacacauccauccugaaucauaaauuuuguaaccucucugacgcgcacaagaaagaucuguacgaccaugcucugaugagcauuaucuccaccuuccaccucagcauuccgaauuuuaaccaguaugaggccaugucuugcgauuucaauggaggcaagaucuccgugcaguacaaccugagccacucuuaugccauugacgcugccaaucauuguggcacggucgcuaacgggauccuucaaaccuuuaugcgcauggccuggggaggcuccuacaucgcgcuggauagcgggagaggaaacugggacugcauuaugacaucuuaccaguaucucaucauucagaauaccacaugggagaaccacugucaguucucccggcccagcccuaucggcuaccuggggcuucugucccaacgcaccagagauauuuauaucucucggcgccuccugggaacguuuacauggacccugagcgacuccgaaggcaaugccacacccggcggguacugccucaccagauggaugcugaucgaggcugaacuuaaguguuucggaaacaccgccguggcuaaaugcaaugagaagcaugaugaggaauuuugcgacaugcugcgccucuucgauuuuuguaaacaggccauuagccggcugaagucugaggcgcagauguccauccagcuuauuaacaaagccguuaaugcucugaucaacgaccaacucauuaugaagaaucaccugagagacaucaugggcaucccuuauugcaacuacagcaaguauuguuaccugaaucacacaauuacggggaaaaccucucuccccaagugcugucuggugagcaacggauccuaccuuaaugaaacacauuucucugaugacaucgagcagcaggccgauaacaugauuaccgaaaugcugcaaaaagaguauauggagcggcagggcaagacaccucucgggcuggucgaccuguucguguuuagcaccuccuucuaccuuaucagcauuuuucuccgccuggugaaaaucccgacgcacagacauauugucggaaagcccugcccuaaaccccaccggcugaaucauaugggcaucuguucuugcggccucuauaagcagccugggguucccgugcgcuggaagagauga

SEQ ID NO: 40042 - RNA, 1473 nt, Artificial Sequence
  derived and/or modified CDS sequence (opt5) from LASV(Togo/2016/7082;Clade VI)__AMR44577__GPCmut12
augggccagaucauuaccuucuuucaagaggugccccacgucaucgaagagguuaugaacauugugcugaucgcccucagccugcuugcuauucugaaggggguguacaaugucgccacaugcggaaucaucggccucgugacguuccuguuucuuugugggagauccugcucucugauuuauaaaggaagcuacgaacuccagacccuggagcugaacauggaaacacucaauauguguaugccucuguccugcaccaagaacucuagccaucacuauauccggguuggcaaugagacagggcuugagcugacccucacaaacaccuccauuaucaaucauaaauucuguaaccugucugacgcgcacaagcgcaaucuuuacgaucaugcucugaugagcauucucuccacguuucaccugagcaucccgaacuucaaucaguaugaagccaugucuugcgacuuuaacggaggcaaaauuuccgugcaguacaaucugagccacgccuaugcugucgaugccgcugagcauuguggcaccguggccaacgggguucuccaaacauucaugagaauggcguggggaggcucuuacaucgcccuggacuccgggcggggaaauugggauugcaucaugaccagcuaccaguaucuuauuauccagaacacaaccugggaagaccacugucaguuuucucgccccuccccuauuggcuaccuggggcuccugagccaaagaacgcgggauaucuauauuucccgcagacuucugggaacauucaccuggacacucucugacagcgagggcaacgagacccccggcggguacugccugacccgguggaugcugaucgaagcugagcucaaguguuuuggaaauacagccguggcuaagugcaacgaaaaacaugaugaggaguucugcgacaugcugcgccuuuuugauuucuguaagcaggccauccagagacugaaauccgaagcgcagaugagcauucaacucaucaauaaggccgucaacgcucugauuaaugaccagcuuaucaugaaaaaccaucugcgggauaugaugggcauuccuuauugcaauuacucuaaguauuguuaccucaaccacacguccagcgggcgcaccucucugcccaagugcugucuggugagcaauggauccuaccucaacgagacacacuucucugacgacaucgaacagcaagccgauaauaugaucaccgagaugcugcagaaagaauauauugacagacagggcaagacaccucuugggcugguggaucucuuugucuucagcaccuccuuuuaccugaucagcauuuuccugcaccuuaucaaaauuccgacgcaucggcacaucguuggaaagcccugcccuaaaccccaucgccucaaccacaugggcauuuguucuugcggccuguauaagcagccuggggugcccacaagauggaaacgguga

SEQ ID NO: 40043 - RNA, 1473 nt, Artificial Sequence
  derived and/or modified CDS sequence (opt5) from LASV(KAK-428;Clade n.d. (VII))__ANH09740__GPCmut12
augggccagaucgugaccuucuuucaagaggucccccacguuauugaagaggugaugaacaucgugcugauugcccucagccugcuugcuauccugaaggggcucuacaauuucgccacaugcggagucauuggccugaucacguuucuucugcucugugggagauccugcucugcgaccuauaaaggacaguacgaacugcagacacuggagcucaacauggaaagccugaauauguguaugccucuuuccugcaccaagaacaauucucaucacuauauccgggcuggcaacaauacagggcuggagcucacccugacaaacaccagcauuaucucccauaaauucuguaaucuuucugacgcccacaagaaaaaccuguacgaucauacgcucaugagcauuaucaccacauuucaccuguccauuccgaauuucaaccaguaugaggccaugagcugcgacuuuaauggaggcaagaucucuauucaauacaaccugucccacagcuaugcuggcgaugccgcucagcauugugggaccguggccaauggaguucuccagacauucaugcgcauggcguggggcgggucuuaccuggcccuugacuccggaagacggggcugggauugcaucaucagcucuuaccaguaucugauuauccaaaacaccacgugggacgaucacugucaguuuucccgccccagcccuauuggguaccucggauucgugucccagaagacaagagacaucuauauuucucggcgccugcuuggcaccuuuacauggacccugagcgauuccgaaggccaugacaugcccgggggauacugccucaccagauggaugcugaucgaggcugaucugaaauguuucggcaacacagccgucgcuaagugcaaugaaaaacacgacgaggaguuuugcgauauguggcgccucuucgacuucuguaagcaggccauccaacggcugaaagcggaagcccagaugaacauucagcuuaucaauaaggcugugaacgcccugauuaaugaccaacucaugaugaagaaccaccugagagauaucauggggauuccuuauugcaauuacagcaaauuuuguuaucuuaacaauacgaccacaggacggaccucucugccccgcugcugucucaucuccaacggcagcuaccugaaugagacacauuucucugacgauaucgaacagcaggcugacaacaugauuaccgagaugcugcagaaggaauacauggauagacaagggaaaacgccucucggacugguugaccuuuuuguguucagcacauccuuuuaucugaucaccauuuuccuccaccuggucaagaucccgacccaucggcacauugugggcaaacccugcccuaagccccaucgccugaaucacaugggcaucuguucuugcgggcuuuacaaacagccuggagugcccgucagauggaagcgguga

SEQ ID NO: 40044 - RNA, 1473 nt, Artificial Sequence; identical to SEQ ID NO: 40038
  derived and/or modified CDS sequence (opt5) from LASV(Pinneo-NIG-1969;Clade I)__AIT17836__GPCmut12

SEQ ID NO: 40045 - RNA, 1473 nt, Artificial Sequence
  derived and/or modified CDS sequence (opt5) from LASV(ISTH0009-NIG-2011;Clade II)__AIT17404__GPCmut12
augggccagaucauuaccuucuuucaagaggugccccacgucaucgaagagguuaugaacauugugcugaucgcccucagccugcuugcuauucugaaggggaucuacaauguggccacaugcggacucuucggccuggucuccuuucuucugcucugugggagaucuugcagcacgaccuauaaaggaguguacgaacugcagacacuggagcucgacauggcgucccugaacauguguaugccucuuucuugcaccaagaauaacagccaucacuauaucaugguuggcaaugaaacagggcuggagcucacccugacaaacaccuccauuaucaaucauaaauucuguaaccuuucugaugcucacaagaaaaaucuguacgaccaugcccucaugagcauuaucuccacguuucaccugagcauuccgaacuucaaucaguaugaggccaugucuugcgauuuuaacggaggcaagaucuccgugcaguacaaucugagccacgcuuaugccgucgacgcugccaaccauuguggcaccauugcgaauggggugcuccaaacauucaugcggauggccuggggaggcucuuacaucgcucuggauuccgggaagggaagcugggacugcaucaugaccucuuaccaguaucuuauuauccagaacacaaccugggaagaucacugucaguuuucccgccccagcccuauuggcuaccuggggcuccugucccaaagaacgcgggacaucuauauuucucgcagacuucugggaacauucaccuggacacucagcgauuccgagggcaacgaaacccccggcggguacugccugacccgguggaugcugaucgaggccgagcucaaauguuuuggaaauacagcuguugccaagugcaacgaaaaacaugacgaggaguucugcgauaugcugcgccuuuuugacuucuguaagcaggcgaucagacggcugaaaacggaagcccagaugagcauucagcucaucaauaaggcugugaacgcccugauuaaugaucaacuuaucaugaagaaccaucugcgcgacauuaugggcaucccuuauugcaauuacucuaaauauuguuaccucaaccacaccgucacagggaagaccucccugcccagaugcugucuggugagcaauggaucuuaccucaacgaaacacacuucagcgacgauaucgagcagcaggcugacaauaugauuaccgagcugcuucaaaaagaauauauggaucggcagggcaagacgccucuggggcucguggaccuguuugucuucuccacaucuuuuuaccugaucagcauuuuccuucaccucaucaaaauuccgacccaucgccacaucaccggaaagcccugcccuaaaccccauagacugaaccacaugggcauuuguuccugcggccuguauaagcacccugggguucccgugaaguggaaacgguga

SEQ ID NO: 40046 - RNA, 1473 nt, Artificial Sequence
  derived and/or modified CDS sequence (opt5) from LASV(ISTH2010-NIG-2012;Clade II)__AIT17482__GPCmut12
augggccagaucauuaccuucuuucaagaggugccccacgucaucgaagagguuaugaacauugugcugaucgcccucagccugcuugcuauucugaaggggaucuacaauguggccacaugcggacucuucggccuggucuccuuucuucugcucugugggagaucuugcagcacgaccuauaaaggaguguacgaacugcagacacuggagcucgacauggcgucccugaacauguguaugccucuuucuugcaccaagaauaacagccaucacuauaucaugguuggcaaugaaacagggcuggagcucacccugacaaacaccuccauuaucaaucauaaauucuguaaccuuucugaugcucacaagaaaaaucuguacgaccaugcccucaugagcauuaucuccacguuucaccugagcauuccgaacuucaaucaguaugaggccaugucuugcgauuuuaacggaggcaagaucuccgugcaguacaaucugagccacgcuuaugccgucgacgcugccaaccauuguggcaccauugcgaauggggugcuccaaacauucaugcggauggccuggggaggcucuuacaucgcucuggauuccgggaagggaagcugggacugcaucaugaccucuuaccaguaucuuauuauccagaacauuacaugggaagaucacugucaguuuucccgccccagcccuaucggcuaccuggggcuccugucccaaagaacccgggacauuuauaucucucgcagacuucugggaacguucacauggacccucagcgauuccgagggcaacgaaacacccggcggguacugccugacccgguggaugcugaucgaggccgagcucaaauguuuuggaaauaccgcuguugccaagugcaacgaaaaacaugacgaggaguucugcgauaugcugcgccuuuuugacuucuguaagcaggcgauuagacggcugaaaacagaagcccagaugagcauccagcucauuaauaaggcugugaacgcccugaucaaugaucaacuuauuaugaagaaccaucugcgcgacaucaugggcaucccuuauugcaauuacucuaaauauuguuaccucaaccacacggucaccgggaagacaucccugcccagaugcugucuggugagcaauggaucuuaccucaacgaaacccacuucagcgacgauauugagcagcaggcugacaauaugaucacagagcugcuucaaaaagaauauauugaucggcagggcaagaccccucuggggcucguggaccuguuugucuucuccacgucuuuuuaccugaucagcauuuuccuucaccucguuaaaaucccgacacaucgccacguggugggaaagcccugcccuaaaccccauagacugaaccacaugggcauuuguuccugcggccuguauaagcacccugggguccccgugaaguggaaacgguga

SEQ ID NO: 40047 - RNA, 1473 nt, Artificial Sequence
  derived and/or modified CDS sequence (opt5) from LASV(Lassa virus/H.sapiens-wt/NGA/2015/ISTH_0543;Clade II)__AVO03639__GPCmut12
augggccagaucauuaccuucuuucaagaggugccccacgucaucgaagagguuaugaacauugugcugaucgcccucagccugcuugcuauucugaaggggaucuacaauguggccacaugcggacucuucggccuggucuccuuucuucugcucugugggagaucuugcagcacgaccuauaaaggaguguacgaacugcagacacuggagcucgacauggcgaaccugaauauguguaugccucuuuccugcaccaagaacaauucucaucacuauaucaugguuggcaacgaaacagggcuggagcucacccugacaaauaccagcauuaucaaccauaaauucuguaaucuuuccgaugcucacaagaaaaaccuguacgaccaugcccucaugucuauuaucagcacguuucaccuguccauuccgaauuucaaccaguaugaggccaugagcugcgauuuuaauggaggcaagaucucugugcaguacaaccugucccacaccuaugcugucgacgccgcuaaucauuguggcacaauugccaacggggugcuccaaaccuucaugcggauggcguggggaggcagcuacaucgcccuggauucugggaagggauccugggacugcaucaugacaagcuaccaguaucuuguuauucagaacaccacgugggaagaucacugucaguuuucucgccccuccccuaucggcuaccuggggcuccugagccaaagaacacgggacauuuauaucucccgcagacuucugggaaccuucacauggacccucucugauagcgagggcaaugaaacccccggcggguacugccugacacgguggaugcugauugaggcugagcucaaauguuuuggaaacacggccguggcuaagugcaaugaaaaacaugacgaggaguucugcgauaugcugcgccuuuuugacuucuguaagcaggccaucagacggcugaaaaccgaagcgcagauguccauccagcucauuaacaaggccgucaaugcucugaucaacgaucaacuuauuaugaagaaucaucugcgcgacaucaugggcauuccuuauugcaacuacagcaaauauuguuaccucaaucacacagugaccgggaagacaucucugcccagaugcugucugguguccaacggaagcuaccucaaugaaacccacuucucugacgauaucgagcagcaggccgacaacaugaucacggagcugcuucaaaaagaauauauugaucggcagggcaagacaccucuggggcucgucgaccuguuuguuuucagcaccuccuuuuaccugaucucuauuuuccuucaccucgugaaaaucccgacccaucgccacauuacaggaaagcccugcccuaaaccccauagacugaaucacaugggcaucuguagcugcggccuguauaagcacccuggggugcccgucaaguggaaacgguga

SEQ ID NO: 40048 - RNA, 1473 nt, Artificial Sequence
  derived and/or modified CDS sequence (opt5) from LASV(Lassa virus/H.sapiens-wt/NGA/2016/ISTH_0009;Clade II)__AVO03571__GPCmut12
augggccagaucauuaccuucuuucaagaggugccccacgucaucgaagagguuaugaacauugugcugaucgcccucagccugcuugcuauucugaaggggaucuacaauguggccacaugcggacuccugggccuugucuccuuccugcuccugugugggagaucuugcagcacgaccuauaaaggaguguacgaacugcagacacucgagcuggacauggcgucccuuaacauguguaugccucugucuugcaccaagaauaacagccaucacuauaucaugguuggcaaugaaacagggcucgagcugacccuuacaaacaccuccauuaucaaucauaaauuuuguaaccugucugaugcucacaagaaaaaucucuacgaccaugcccugaugagcauuaucuccacguuccaccugagcauuccgaacuuuaaucaguaugaggccaugucuugcgauuucaacggaggccggaucuccgugcaguacaaucucagccacucuuaugcugucgacgccgcuaaccauuguggcaccauugccaauggggugcugcaaacauuuaugcgcauggcguggggaggcuccuacaucgcccuugauagcgggaagggaucuugggacugcaucaugaccuccuaccaguaucugauuauccagaacacaaccugggaagaucacugucaguucagcagacccuccccuauuggcuaccucgggcugcuuucucaacggacgcgcgacaucuauauuagcagacggcugcucggaacauuuaccuggacacuguccgauagcgagggcaacgaaacccccggcggguacugccugacccgcuggaugcucaucgaggcugagcugaaguguuucggaaauacagccguugcuaaaugcaacgaaaagcaugacgaggaauuuugcgauaugcuuagacuguucgacuuuuguaaacaggccauccggcgccucaagacggaggcgcagaugucuauucagcugaucaauaaagccgugaacgcucuuauuaaugaucaacugaucaugaagaaccaccucagagacauuaugggcaucccuuauugcaauuacuccaaguauuguuaccugaaccacaccgucacagggaaaaccagccugccccggugcugucucgugucuaauggaagcuaccugaacgaaacacauuucuccgacgauaucgagcagcaggccgacaauaugauuaccgagcuucugcaaaaggaauauaucgaucgccagggcaaaacgccucucgggcugguggaccuguucgucuuuucuaccagcuucuaccuuauuuccaucuuucuccaccugguuaagauuccgacacauagacacaucaccggaaaacccugcccuaagccccaucggcugaaccacaugggcauuuguagcugcggccucuauaaucacccuggggugcccgugaaauggaagcgcuga

SEQ ID NO: 40049 - RNA, 1473 nt, Artificial Sequence
  derived and/or modified CDS sequence (opt5) from LASV(Lassa virus/H.sapiens-wt/NGA/2016/ISTH_0017;Clade II)__AVO03567__GPCmut12
augggccagaucauuaccuucuuucaagaggugccccacgucaucgaagagguuaugaacauugugcugaucgcccucagccugcuugcuauucugaaggggaucuacaauguggccacaugcggacucuucggccuggucuccuuucuucugcucugugggagaucuugcagcacgaccuauaaaggaguguacgaacugcagacacuggagcucgacauggcgucccugaacauguguaugccucuuucuugcaccaagaauaacagccaucacuauaucaugguuggcaaugaaacagggcuggagcucacccugacaaacaccuccauuaucaaucauaaauucuguaaccuuucugaugcucacaagaaaaaucuguacgaccaugcccucaugagcauuaucuccacguuucaccugagcauuccgaacuucaaucaguaugaggccaugucuugcgauuuuaacggaggcaagaucuccgugcaguacaaucugagccacaccuaugcuauugacgccgcuaaccauuguggcacaaucgccaaugggguccuccaaaccuucaugcggauggcguggggaggcucuuacaucgcccuggauuccgggaagggaagcugggacugcauuaugacaucuuaccaguaucuuaucauucagaacaccacgugggaagaucacugucaguuuucccgccccagcccuaucggcuaccuggggcuccugucccaaagaacacgggacauuuauaucucucgcagacuucugggaaccuucacauggacccucagcgauuccgagggcaacgaaacccccggcggguacugccugacacgguggaugcugaucgaggcugagcucaaauguuuuggaaauacggccguggcuaagugcaacgaaaaacaugacgaggaguucugcgauaugcugcgccuuuuugacuucuguaagcaggccauuagacggcugaaaaccgaagcgcagaugagcauccagcucauuaauaaggccguuaacgcucugaucaaugaucaacuuauuaugaagaaccaucugcgcgacaucaugggcaucccuuauugcaauuacucuaaauauuguuaccucaaccacacagugaccgggaagacaucccugcccagaugcugucuggucagcaauggaucuuaccucaacgaaacccacuucagcgacgauauugagcagcaggccgacaauaugaucacggagcugcuucaaaaagaauauauggaucggcagggcaagacaccucuggggcucguggaccuguuuguguucuccaccucuuuuuaccugauuagcaucuuccuucaccucguccgcauuccgacccauagacacguuaucggaaaacccugcccuaagccccaucggcugaaccacaugggcauuuguuccugcggccuguauaaacacccuggggugcccgugaaguggaagcgcuga

SEQ ID NO: 40050 - RNA, 1473 nt, Artificial Sequence
  derived and/or modified CDS sequence (opt5) from LASV(Lassa virus/H.sapiens-wt/NGA/2018/ISTH_0959;Clade II)__AVV65099__GPCmut12
augggccagaucauuaccuucuuucaagaggugccccacgucaucgaagagguuaugaacauugugcugaucgcccucagccugcuugcuauucugaaggggaucuacaauguggucacaugcggacucuucggccugguguccuuucuucugcucugugggagaucuugcagcacgaccuauaaaggaguuuacgaacugcagacacuggagcucgacauggccucccugaacauguguaugccucuuucuugcaccaagaauaacagccaucacuauaucauggugggcaaugaaacagggcuggagcucacccugacaaacaccuccauuaucaaucauaaauucuguaaccuuucugaugcgcacaagaaaaaucuguacgaccaugcucucaugagcauuaucuccacguuucaccugagcauuccgaacuucaaucaguaugaggccaugucuugcgauuuuaacggaggcaagaucuccguccaguacaaucugagccacgccuaugcuauugacgccgcuaaccauuguggcaccaucgccaauggggugcuccaaacauucaugcggauggcguggggaggcucuuacaucgcccuggauuccgggaagggaagcugggacugcauuaugaccucuuaccaguaucuuaucauucagaacacaaccugggaagaucacugucaguuuucccgccccagcccuaucggcuaccuggggcuccugucccaaagaacgcgggacauuuauaucucucgcagacuucugggaacauucaccuggacacucagcgauuccgagggcaacgaaacccccggcggguacugccugacccgguggaugcugaucgaggcugagcucaaauguuuuggaaauacagccguugcuaagugcaacgaaaaacaugacgaggaguucugcgauaugcugcgccuuuuugacuucuguaagcaggccauuagacggcugaaaacggaagcgcagaugagcauccagcucauuaauaaggccgugaacgcucugaucaaugaucaacuuauuaugaagaaccaucugcgcgacaucaugggcaucccuuauugcaauuacucuaaauauuguuaccucaaccacaccgucacagggaagaccucccugcccagaugcugucuggugagcaauggaucuuaccucaacgaaacacacuucagcgacgauauugagcagcaggccgacaauaugaucaccgagcugcuucaaaaagaauauauugaucggcagggcaagacgccucuggggcucguggaccuguuugucuucuccacaucuuuuuaccugaucagcauuuuccuucaccucguuaaaaucccgacccaucgccacgugauuggaaagcccugcccuaaaccccauagacugaaccacaugggcaucuguuccugcggccuguauaagcacccuggggugcccgucaaguggaaacgguga

SEQ ID NO: 40051 - RNA, 1473 nt, Artificial Sequence
  derived and/or modified CDS sequence (opt5) from LASV(LASV003-NIG-2008;Clade II)__AIT17580__GPCmut12
augggccagaucauuaccuucuuucaagaggugccccacgucaucgaagagguuaugaacauugugcugaucgcccucagccugcuugcuauucugaaggggaucuacaauguggccacaugcggacucuucggccuggucuccuuucuucugcucugugggagaucuugcagcacgaccuauaaaggaguguacgaacugcagacacuggagcucgacauggcgucccugaacauguguaugccucuuucuugcaccaagaauaacagccaucacuauaucaugguuggcaaugaaacagggcuggagcucacccugacaaacaccuccauuaucaaucauaaauucuguaaccuuucugaugcucacaagaaaaaucuguacgaccaugcccucaugagcauuaucuccacguuucaccugagcauuccgaacuucaaucaguaugaggccaugucuugcgauuuuaacggaggcaagaucuccgugcaguacaaucugagccacaccuaugcugucgacgccgcuaaccauuguggcacaauugccaauggggugcuccaaaccuucaugcggauggcguggggaggcucuuacaucgcccuggauuccgggaagggaagcugggacugcaucaugacaucuuaccaguaucuuauuauccagaacaccacgugggaagaucacugucaguuuucccgccccagcccuauuggcuaccuggggcuccugucccaaagaacacgggacaucuauauuucucgcagacuucugggaaccuucacauggacccucagcgauuccgagagcaacgaaacccccggcggcuacugccugacacgguggaugcugaucgaggcugagcucaaauguuuugggaauacggccguugcuaagugcaacgaaaaacaugacgaggaguucugcgauaugcugcgccuuuuugacuucuguaagcaggccaucagacggcugaaagcggaagcccagaugucuauucagcucaucaauaaggcugugaacgcccugauuaaugaucaacuuaucaugaagaaccaucugcgcgacauuaugggaaucccuuauugcaauuacuccaaauauuguuaccucaaccacaccgucacaggcagaaccagccugccccggugcugucuggugucuaaugggagcuaccucaacgaaacacacuucuccgacgauaucgagcagcaggcugacaauaugauuaccgagcugcuucaaaaggaauauauggaucgccagggaaaaacgccucugggccucguggaccuguuugucuucucuaccagcuuuuaccugaucuccauuuuccuucaccucguuaagaucccgacacauagacacgugauugggaaacccugcccuaagccccaucggcugaaccacaugggaaucuguagcugcggccuguauaaacacccuggcgugcccgucaaguggaagcgcuga

SEQ ID NO: 40052 - RNA, 1473 nt, Artificial Sequence
  derived and/or modified CDS sequence (opt5) from LASV(LASV035-NIG-2009;Clade II)__AIT17588__GPCmut12
augggccagaucauuaccuucuuucaagaggugccccacgucaucgaagagguuaugaacauugugcugaucgcccucagccugcuugcuauucugaaggggaucuacaauguggccacaugcggacucuucggccuggucuccuuucuucugcucugugggagaucuugcagcacgaccuauaaaggaguguacgaacugcagacacuggagcucgacauggcgucccugaacauguguaugccucuuucuugcaccaagaauaacagccaucacuauaucaugguuggcaaugaaacagggcuggagcucacccugacaaacaccuccauuaucaaucauaaauucuguaaccuuucugaugcucacaagaaaaaucuguacgaccaugcccucaugagcauuaucuccacguuucaccugagcauuccgaacuucaaucaguaugaggccaugucuugcgauuuuaacggaggcaagaucuccgugcaguacaaucugagccacgcuuaugccgucgacgcugccaaccauuguggcaccauugcgaauggggugcuccaaacauucaugcggauggccuggggaggcucuuacaucgcucuggauuccgggaagggaagcugggacugcaucaugaccucuuaccaguaucuuauuauccagaacacaaccugggaagaucacugucaguuuucccgccccagcccuauuggcuaccuggggcuccugucccaaagaacgcgggacaucuauauuucucgcagacuucugggaacauucaccuggacacucagcgauuccgagggcaacgaaacccccggcggguacugccugacccgguggaugcugaucgaggccgagcucaaauguuuuggaaauacagcuguugccaagugcaacgaaaaacaugacgaggaguucugcgauaugcugcgccuuuuugacuucuguaagcaggcgaucagacggcugaaagccgaagcucagaugagcauucagcucaucaauaaggccgugaacgcucugauuaaugaucaacuuaucaugaagaaccaucugcgcgacauuaugggcaucccuuauugcaauuacucuaaauauuguuaccucaaccacacggucaccgggaagacaucccugcccagaugcugucuggugagcaauggaucuuaccucaacgaaacccacuucagcgacgauaucgagcagcaggccgacaauaugauuacagagcugcuucaaaaagaauauaucgaucggcagggcaagaccccucuggggcucguggaccuguuugucuucuccacgucuuuuuaccugauuagcaucuuccuucaccucguuaaaauuccgacacaucgccacgugaucggaaagcccugcccuaaaccccauagacugaaccacaugggcauuuguuccugcggccuguauaagcacccuggggugcccgucaaguggaaacgguga

SEQ ID NO: 40053 - RNA, 1473 nt, Artificial Sequence
  derived and/or modified CDS sequence (opt5) from LASV(LASV1000-NIG-2009;Clade II)__AIT17782__GPCmut12
augggccagaucauuaccuucuuucaagaggugccccacgucaucgaagagguuaugaacauugugcugaucgcccucagccugcuugcuauucugaaggggaucuacaauguggccacaugcggacucuucggccuggucuccuuucuucugcucugugggagaucuugcagcacgaccuauaaaggaguguacgaacugcagacacuggagcucgacauggcgucccugaacauguguaugccucuuucuugcaccaagaauaacagccaucacuauaucaugguuggcaaugaaacagggcuggagcucacccugacaaacaccuccauuaucaaucauaaauucuguaaccuuucugaugcucacaagaaaaaucuguacgaccaugcccucaugagcauuaucuccacguuucaccugagcauuccgaacuucaaucaguaugaggccaugucuugcgauuuuaacggaggcaagaucuccgugcaguacaaucugagccacaccuaugcugucgacgccgcuaaccauuguggcacaauugccaauggggugcuccaaaccuucaugcggauggcguggggaggcucuuacaucgcccuggauuccgggaagggaagcugggacugcaucaugacaucuuaccaguaucuuauuauccagaacaccacgugggaagaucacugucaguuuucccgccccagcccuauuggcuaccuggggcuccugucccaaagaacacgggacaucuauauuucucgcagacuucugggaaccuucacauggacccucagcgauuccgagggcaacgaaacccccggcggguacugccugacacgguggaugcugaucgaggcugagcucaaauguuuuggaaauacggccguugcuaagugcaacgaaaaacaugacgaggaguucugcgauaugcugcgccuuuuugacuucuguaagcaggccaucaaaagacugaagaccgaagcgcagaugagcauucagcucaucaauaaggccgugaacgcucugauuaaugaucaacuuaucaugaaaaaccaucugcgggacauuaugggcaucccuuauugcaauuacucuaaguauuguuaccucaaccacacagucaccgggaaaacaucccugccccgcugcugucuggugagcaauggaucuuaccucaacgaaacccacuucagcgacgauaucgagcagcaggccgacaauaugauuacggagcugcuucaaaaggaauauaucgauagacagggcaaaacaccucuggggcucguggaccuguuugucuucuccaccucuuuuuaccugauuagcaucuuccuucaccucguuaagauuccgacccaucggcacguggugggaaaacccugcccuaagccccaucgccugaaccacaugggcaucuguuccugcggccuguauaagcacccugggguccccgugaaauggaagagauga

SEQ ID NO: 40054 - RNA, 1473 nt, Artificial Sequence
  derived and/or modified CDS sequence (opt5) from LASV(LASV221-NIG-2010;Clade II)__AIT17624__GPCmut12
augggccagaucauuaccuucuuucaagaggugccccacgucaucgaagagguuaugaacauugugcugaucgcccucagccugcuugcuauucugaaggggaucuacaauguggccacaugcggacucuucggccuggucuccuuucuucugcucugugggagaucuugcagcacgaccuauaaaggaguguacgaacugcagacacuggagcucgacauggcgucccugaacauguguaugccucuuucuugcaccaagaauaacagccaucacuauaucaugguuggcaaugaaacagggcuggagcucacccugacaaacaccuccauuaucaaucauaaauucuguaaccuuucugaugcucacaagaaaaaucuguacgaccaugcccucaugagcauuaucuccacguuucaccugagcauuccgaacuucaaucaguaugaggccaugucuugcgauuuuaacggaggcaagaucuccgugcaguacaaucugagccacaccuaugcuauugacgccgcuaaccauuguggcacaaucgccaaugggguccuccaaaccuucaugcggauggcguggggaggcucuuacaucgcccuggauuccgggaagggaagcugggacugcauuaugacaucuuaccaguaucuuaucauucagaacaccacgugggaagaucacugucaguuuucccgccccagcccuaucggcuaccuggggcuccugucccaaagaacacgggacauuuauaucucucgcagacuucugggaaccuucacauggacccucagcgauuccgagggcaacgaaacccccggcggguacugccugacacgguggaugcugaucgaggcugagcucaaauguuuuggaaauacggccguggcuaagugcaacgaaaaacaugacgaggaguucugcgauaugcugcgccuuuuugacuucuguaagcaggccauuagacggcugaaaaccgaagcgcagaugagcauccagcucauuaauaaggccguuaacgcucugaucaaugaucaacuuauuaugaagaaccaucugcgcgacaucaugggcaucccuuauugcaauuacucuaaauauuguuaccucaaccacacagugaccgggaagacaucccugcccagaugcugucuggucagcaauggaucuuaccucaacgaaacccacuucagcgacgauauugagcagcaggccgacaauaugaucacggagaugcugcaaaaagaauauauggaucggcagggcaagacaccucuugggcugguggaccucuuuguguucuccaccucuuuuuaccugauuagcaucuuccugcaccuugucaaaauuccgacccaucgccacguuaucggaaagcccugcccuaaaccccauagacucaaccacaugggcauuuguuccugcggccuguauaagcacccuggggugcccgugaaguggaaacgguga

SEQ ID NO: 40055 - RNA, 1473 nt, Artificial Sequence
  derived and/or modified CDS sequence (opt5) from LASV(LASV237-NIG-2010;Clade II)__AIT17638__GPCmut12
augggccagaucauuaccuucuuucaagaggugccccacgucaucgaagagguuaugaacauugugcugaucgcccucagccugcuugcuauucugaaggggaucuacaauguggccacaugcggacucuucggccuggucuccuuucuucugcucugugggagaucuugcagcacgaccuauaaaggaguguacgaacugcagacacuggagcucgacauggcgucccugaacauguguaugccucuuucuugcaccaagaauaacagccaucacuauaucaugguuggcaaugaaacagggcuggagcucacccugacaaacaccuccauuaucaaucauaaauucuguaaccuuucugaugcucacaagaaagaccuguacgaucaugcccucaugagcauuaucuccacguuucaccugagcauuccgaauuucaaccaguaugaggccaugucuugcgacuuuaauggaggcaagaucuccgugcaguacaaccugagccacaccuaugcugucgaugccgcuaaucauuguggcacaauugccaacggggugcuccaaaccuucaugcggauggcguggggaggcucuuacaucgcccuggacuccgggaagggaagcugggauugcaucaugacaucuuaccaguaucuuauuauccagaauaccacgugggaagaccacugucaguuuucccgccccagcccuauuggcuaccuggggcuccugucccaaagaacacgggauaucuauauuucucgcagacuucugggaaccuucacauggacccucagcgacuccgagggcaacgaaacccccggcggguacugccugacacgguggaugcugaucgaggcugagcucaaauguuuuggaaacacggccguugcuaagugcaaugaaaaacaugaugaggaguucugcgacaugcugcgccuuuuugauuucuguaagcaggccaucagacggcugaaaaccgaagcgcagaugagcauucagcucaucaacaaggccgugaaugcucugauuaacgaccaacuuaucaugaagaaucaucugcgcgacauuaugggcaucccuuauugcaacuacucuaaauauuguuaccucaaucacacagucaccgggaagacaucccugcccagaugcugucuggugagcaacggaucuuaccucaaugaaacccacuucagcgaugacaucgagcagcaggccgauaacaugauuacggagcugcuucaaaaagaauauauggaccggcagggcaagacaccucuggggcucguggaucuguuugucuucuccaccucuuuuuaccugaucagcauuuuccuucaccucaucaaaauuccgacccaucgccacaucacaggaaagcccugcccuaaaccccauagacugaaucacaugggcauuuguuccugcggccuguauaagcacccugggguucccgugaaguggaaacgguga

SEQ ID NO: 40056 - RNA, 1473 nt, Artificial Sequence
  derived and/or modified CDS sequence (opt5) from LASV(LASV253-NIG-2011;Clade II)__AIT17670__GPCmut12
augggccagaucauuaccuucuuucaagaggugccccacgucaucgaagagguuaugaacauugugcugaucgcccucagccugcuugcuauucugaaggggaucuacaauguggccacaugcggacucuucggccuggucuccuuucuucugcucugugggagaucuugcagcacgaccuauaaaggaguguacgaacugcagacacuggagcucgacauggcgucccugaacauguguaugccucuuucuugcaccaagaauaacagccaucacuauaucaugguuggcaaugaaacagggcuggagcucacccugacaaacaccuccauuaucaaucauaaauucuguaaccuuucugaugcucacaagaaaaaucuguacgaccaugcccucaugagcauuaucuccacguuucaccugagcauuccgaacuucaaucaguaugaggccaugucuugcgauuuuaacggaggcaagaucuccgugcaguacaaucugagccacaccuaugcugucgacgccgcuaaccauuguggcacaauugccaauggggugcuccaaaccuucaugcggauggcguggggaggcucuuacaucgcccuggauuccgggaagggaagcugggacugcaucaugacaucuuaccaguaucuuauuauccagaacaccacgugggaagaucacugucaguuuucccgccccagcccuauuggcuaccuggggcuccugucccaaagaacacgggacaucuauauuucucgcagacuucugggaaccuucacauggacccucagcgauuccgagggcaacgaaacccccggcggguacugccugacacgguggaugcugaucgaggcugagcucaaauguuuuggaaauacggccguugcuaagugcaacgaaaaacaugacgaggaguucugcgauaugcugcgccuuuuugacuucuguaagcaggccaucagacggcugaaagcggaagcccagaugagcauucagcucaucaauaaggcugugaacgcccugauuaaugaucaacuuaucaugaagaaccaucugcgcgacauuaugggcaucccuuauugcaauuacucuaaauauuguuaccucaaccacaccgucacagggagaaccucccugccccggugcugucuggugagcaauggaucuuaccucaacgaaacacacuucagcgacgauaucgagcagcaggcugacaauaugauuaccgagcugcuucaaaaggaauauaucgaucgccagggcaaaacgccucuggggcucguggaccuguuugucuucuccacaucuuuuuaccugauuagcaucuuccuucaccucguuaagauuccgacccauagacacaucauuggaaaacccugcccuaagccccaucggcugaaccacaugggcaucuguuccugcggccuguauaaacacccuggggugcccgugaaguggaagcgcuga

SEQ ID NO: 40057 - RNA, 1473 nt, Artificial Sequence
  derived and/or modified CDS sequence (opt5) from LASV(LASV254-NIG-2011;Clade II)__AIT17674__GPCmut12
augggccagaucauuaccuucuuucaagaggugccccacgucaucgaagagguuaugaacauugugcugaucgcccucagccugcuugcuauucugaaggggaucuacaauguggccacaugcggacucuucggccuggucuccuuucuucugcucugugggagaucuugcagcacgaccuauaaaggaguguacgaacugcagacacuggagcucgacaugaccaaccugaauauguguaugccucuuuccugcacaaagaacaauucucaucacuauaucaugguuggcaacgaaaccgggcuggagcucacacugaccaauacgagcauuaucaaccauaaauucuguaaucuuuccgaugcgcacaagaaaaaccuguacaaucaugcucucaugucuauuaucagcaccuuucaccuguccauuccgaacuucaaucaguaugaggccaugagcugcgacuuuaacggaggcaagaucucugugcaguacaaucugucccacagcuaugccgucgaugcugccaaccauuguggcacaauugcuaacggggugcuccaaaccuucaugcggauggccuggggaggcucuuacaucgcgcuggacuccgggaagggaaauugggauugcaucaugacaagcuaccaguaucuuauuauccagaacaccacgugggaagaccacugucaguuuucucgccccuccccuauuggcuaccuggggcuccugagccaaagaacacgggauaucuauauuucccgcagacuucugggaaccuucacauggacccucucugacagcgagggcaaugaaacccccggcggguacugccugacacgguggaugcugaucgaggccgagcucaaauguuuuggaaacacggcuguugccaagugcaaugaaaaacaugaugaggaguucugcgacaugcugcgccuuuuugauuucuguaagcaggcuaucagacggcugaaaaccgaagcccaggcgaacauucagcucaucaauaaggccgugaacgcucugauuaaugaccaacuuaucaugaagaaccaucugcgcgauauuaugggcaucccuuauugcaauuacuccaaauauuguuaccucaaccacacagucaccgggaagacaagccugcccagaugcugucuggugucuaauggauccuaccucaacgaaacccacuucagcgacgacaucgagcagcaggccgauaauaugauuacggagcugcuucaaaaagaauauauggaccggcagggcaagacaccucuggggcucguggaucuguuugucuucucuaccagcuuuuaccugaucuccauuuuccuucaccucguuaaaaucccgacccaucgccacgugauuggaaagcccugcccuaaaccccauagacugaaccacaugggcaucuguucuugcggccuguauaagcacccuggggugcccgucaaguggaaacgguga

SEQ ID NO: 40058 - RNA, 1473 nt, Artificial Sequence
  derived and/or modified CDS sequence (opt5) from LASV(Nig08-A19;Clade III)__ADU56618__GPCmut12
augggccagaucgugaccuucuuucaagaggucccccacguuauugaagaggugaugaacaucgugcugauugcccucagcauccuggcuauucuuaaggggcuguacaauaucgccacaugcggacucaucggccuggucacguuccuucugcucuccgggagaucuuguagcaugaccuauaaaggaguguacgaacugcagacacuggagcucaacaugaauacccugaacaugugcaugccucuuuccuguacaaagaauaacucucaucacuauauuaugguuggcaaugaaaccgggcuggagcucacacugaccaacacgagccuucugcaucacaaauuuugcaaucucuccgacgcgcauaagaaaaaccuguacgaucacacccugaugucuaucauuagcacauuccaccucuccaucccgaauuuuaaccaguaugaggcuaugagcugugacuucaauggaggcaagauuaccgugcaguacaaccugucucauuccuaugccaucgaugccgcuaaucacugcggcacagucgccaacggggugcuucaaaccuuuaugcggauggcuuggggaggcagcuacauugcccuggacucugggcgcggaaagugggauuguaucaugacguccuaccaguaucucaucauucagaacacaaccugggaagaccauugccaguucagcagacccucuccuaucggcuaccuggggcuucugucccaacggacacgcgauauuuauaucagcagacggcuccugggaaccuuuaccuggacacuguccgacucugagggcaaugaaacgcccggcggguacugucucacccgcuggaugcugauugaggcggagcuuaaaugcuucggaaacacagccguugcuaaguguaaugaaaaacacgaugaggaauuuugcgacaugcugagacucuucgauuuuugcaagcaggccauccggcgccugaaagcugaggcccagaugagcauccagcuuauuaacaaggcggugaaugcccugaucaacgaccaacucauuaugaagaaucaccugagagauaucaugggcauuccuuauuguaacuacuccaaauauugcuaccugaaucauaccagcacagggcggaccucucucccccgcuguugccuggucuccaacggaagcuaccuuaaugaaacgcacuucucugacgacaucgagcagcaggcugauaacaugaucacagagaugcugcaaaaggaauaucucgacagacagggcaaaaccccucuggggcugguggaucuuuucguguuuagcaccuccuucuaccucauuucuaucuuucugcaucuggucaagauuccgacacaccggcauaucguuggaaaacccuguccuaagccccaccgccucaaucacaugggcauuugcagcuguggccuguauaaacagccuggggugcccgugagauggaagcgguga

SEQ ID NO: 40059 - RNA, 1476 nt, Artificial Sequence
  derived and/or modified CDS sequence (opt5) from LASV(G1180-SLE-2010;Clade IV)__AIT17168__GPCmut12
augggccagaucgugaccuucuuucaagaggucccccacguuauugaagaggugaugaacaucgugcugauugcccucagcauccuggcuguccuuaaggggcuguacaauuucgccacaugcggacucgugggccugcuuacguuucugcuccugugugggagauccugcaccgcgucucgguauaaaggaguuuacgaacugcagacacucgagcugaacauggaaacccuuaauauguguaugccucugagcugcacaaagaacaauucccaucacuauauuauggugggcaacgagaccgggcucgagcugacacuuaccaauacgucuaucaucaaccauaaauucuguaaucugagcgacgcucacaagaaaaaccucuacgaucaugcccugauguccauuaucucuaccuuucaccugagcauuccgaauuucaaccaguaugaagccauguccugcgacuuuaauggaggcaagaucagcguccaguacaaccucucucacuccuaugcuggcgaugccgcuaaucauugugggacaguggccaacggaguucugcaaaccuucaugcgcauggcguggggcgggagcuacauugcccuugacucuggacacggcuccugggauugcaucaugacaagcuaccaguaucugauuauccagaacaccacgugggaggaccauugucaguuuucuagacccuccccuaucggguaccucggacugcuuagccaacggacacgcgauauuuauaucuccagacggcugcucggcaccuucacauggacccugucugacagcgaaggcaaggauacccccgggggauacugccugacacgcuggaugcucauugaggcugagcugaaauguuuuggcaauacggccguggcuaagugcaacgaaaaacacgacgaggaguucugcgauaugcuuagacuguuugacuucuguaagcaggccauccagcggcucaaagcggaagcccagauguccauucaacugaucaauaaggcugucaacgcccuuaucaaugaucagcugauuaugaagaaccaccuccgcgacaucauggggauuccuuauugcaauuacagcaaauauuguuaccugaaccauaccacaaccggaaagacaucucugcccaaaugcugucucguguccaauggcagcuaccugaacgaaacccacuucucugacgauaucgagcagcaagcugacaauaugauuacggagaugcuucagaaggaauauauggagagacaggggaaaacaccucugggacucguggaucuguuugucuucagcaccuccuuuuaccugaucucuaucuuccuucaucucguuaagauuccgacccaccggcauaucgugggcaaaagcugccccaagccucaccgccugaaccacaugggcauuuguuccugcgggcuguauaagcagcccggagugccugucaaauggaagagauga

SEQ ID NO: 40060 - RNA, 1476 nt, Artificial Sequence
  derived and/or modified CDS sequence (opt5) from LASV(G1442-SLE-2011;Clade IV)__AIT17180__GPCmut12
augggccagaucgugaccuucuuucaagaggucccccacguuauugaagaggugaugaacaucgugcugauugcccucagcauccuggcuguccuuaaggggcuguacaauguggccacaugcggacucauuggccugguuacguuccuucugcucugugggagauccugcaccacaacccuguauaaaggaguguacgaacugcagacacucgagcugaacauggaaacccuuaauauguguaugccucugucuugcacaaagaacaauagccaucacuauauccgggucggcaacgagaccgggcucgagcugacgcuuaccaauacauccaucauuaaccauaaauuuuguaaucugucugacgcgcacaagaaaaaccucuacgaucaugcucugaugagcaucauuuccaccuuccaccugucuaucccgaauuuuaaccaguaugaagccaugagcugcgacuucaauggaggcaagauuuccgugcaguacaaccucagccacucuuaugccggcgaugcugccaaucauugugggacaguugcuaacggagugcugcaaaccuuuaugcgcauggccuggggcggguccuacaucgcgcuugacagcggaagaggcaacugggauugcauuaugacgucuuaccaguaucugaucauccagaauacaaccugggacgaucacugucaguucucccggcccagcccuauuggguaccucggacugcuuucucaacgcacaagagacgucuauaucucccggcgccugcucggcaccuuuaccuggacacugagcgauuccgagggcaaggacacgcccgggggauacugccugaccagauggaugcucauugaagccgagcugaaauguuucggcaacacagcuguggccaagugcaaugagaaacaugaugaagaguuuugcgacaugcuucggcuguucgauuuuuguaagcaggcuauccagcgccucaaagccgaagcgcagaugucuauucaacugaucaacaaggccgugaaugcucuuaucaacgaccagcugauuaugaagaaucaccucagagacaucauggggauuccuuauugcaacuacagcaaauauuguuaccugaauaacaccgccacaggaaagaccucccugcccaaaugcugucucaucagcaauggcucuuaccugaacgagacgcacuucuccgaugacauugaacaggaggcugauaauaugaucacagagaugcuucaaaaggaauauauggagcggcaggggaaaaccccucugggacucgucgaccuguucguuuuuagcaccucuuucuaccugaucagcauuuuucuucaucucgugaagaucccgacacaccgccauauugugggcaaauccugccccaagccucacagacugaaccauaugggcaucuguucuugcgggcuguauaagcagcccggagucccugugcgguggaaacgcuga

SEQ ID NO: 40061 - RNA, 1476 nt, Artificial Sequence
  derived and/or modified CDS sequence (opt5) from LASV(G3010-SLE-2013;Clade IV)__AIT17344__GPCmut12
augggccagaucgugaccuucuuucaagaggucccccacguuauugaagaggugaugaacaucgugcugauugcccucagcauccuggcuguccuuaaggggcuguacaauuucgccacaugcggacucgugggccugguuacguuucuucugcucugugggagauccugcaccacaucucuguauaaaggaguguacgaacugcagacccucgagcugaacauggaaacacuuaauauguguaugccucugagcugcaccaagaacaauucccaucacuauauuauggucggcaacgagacagggcucgagcugacccuuacgaauaccucuaucaucaaccauaaauucuguaaucugagcgacgcgcacaagaaaaaccucuacaaucaugcucugauguccauuaucucuacauuucaccugagcauuccgaacuucaaucaguaugaagccauguccugcgauuuuaacggaggcaagaucagcgugcaguacaaucucucucacuccuaugccggcgacgcugccagccauugugggaccguugcuaacggagugcugcaaacauucaugcggauggccuggggcgggucuuacauugcgcuugauuccggauacggcaagugggacugcaucaugaccagcuaucaguaccugauuauccagaacacgacaugggaggaucacugucaguuuucucgccccuccccuaucggguaucucggacugcuuagccaaagaacccgggacauuuacaucucccgcagacugcucggcacauucaccuggacccugucugauagcgaaggcaaagacacacccgggggauauugccugacgcgguggaugcucauugaggccgagcugaaguguuuuggcaauaccgcugucgccaaaugcaacgaaaagcaugaugaggaguucugcgacaugcuucgccuguuugauuucuguaaacaggcuauccagagacucaagacagaagcccagauguccauucaacugaucaauaaggcggugaacgcccuuaucaaugaccagcugauuaugaaaaaccaccuccgggauaucauggggauuccuuacugcaauuauagcaaguacuguuaccugaaccacaccacaaccggaaaaacgucucugcccaagugcugucucguguccaauggcagcuaucugaacgaaacacauuucucugacgacaucgagcagcaagcugauaauaugauuaccgagaugcuucagaaagaauacauggagcgccaggggaagaccccucugggacucgucgaccuguuuguuuucagcacauccuuuuaucugaucucuaucuuccuucaccucgugaaaauuccgacccauagacacaucgugggcaagagcugccccaagccucaucggcugaaccacaugggcauuuguuccugcgggcuguacaaacagcccggagucccugugcgcuggaagagauga

SEQ ID NO: 40062 - RNA, 1476 nt, Artificial Sequence
  derived and/or modified CDS sequence (opt5) from LASV(G502-SLE-2009;Clade IV)__AIT17126__GPCmut12
augggccagaucgugaccuucuuucaagaggucccccacguuauugaagaggugaugaacaucgugcugauugcccucagcauccuggcuguccuuaaggggcuguacaauuucgccacaugcggacucgugggccugcuuacguuucugcuccugugugggagauccugcaccacaggacuguauaaaggcguuuacgaacuccagacccuggagcuuaacauggaaacacugaauauguguaugccucucucuugcaccaagaacaauagccaucacuauauuaugguggggaacgagacaggacuggagcuuacccugacgaauaccuccaucaucaaccauaaauucuguaaucucucugacgcgcacaagaaaaaccuguacgaucaugcucugaugagcauuaucuccacauuucaccucucuauuccgaauuucaaccaguaugaagccaugagcugcgacuuuaauggcggcaagaucuccguccaguacaaccugagccacucuuaugccggggaugcugccgaccauuguggaaccguggcuaauggcguucuucaaacauucaugcggauggccuggggaggguccuacauugcgcuggauagcggccgcgggagaugggacugcaucaugaccucuuaccaguaucucauuauccagaacacgacaugggaggaucacugucaguuuucccggcccagcccuaucggauaccugggccuucugucucaacgcaccagagacauuuauaucucccggcgccuccugggcacauucaccuggacccugagcgauuccgaagggaaggacacacccggaggcuacugccucacgagauggaugcugauugaggccgagcuuaaauguuuugggaacaccgcuguggccaagugcaaugaaaaacaugaugaggaguucugcgacaugcugcggcucuuugauuucuguaagcaggcuauccagcgccugaaagccgaagcgcagaugucuauucaacuuaucaacaaggccgucaaugcucugaucaacgaccagcucgugaugaagaaucaccugagagacauuaugggaaucccuuauugcaacuacagccgguauuguuaccugaaucacacaaccacaggccgcaccucccuccccaaaugcugucuggugagcaacgggucuuaccuuaaugaaacgcauuucuccgaugacauugagcagcaagccgauaacaugaucacagagaugcugcagaaggaauauauggagagacagggaaaaaccccucucggccuggucgaccuguuuguuuucagcaccucuuuuuaccuuauuagcaucuuccuccaccuggugaagaucccgacacaucggcacauugugggcaaauccugccccaagccucaucgccugaaucacauggggaucuguucuugcggacucuauaaacagcccggcgucccugugaaguggaagagauga

SEQ ID NO: 40063 - RNA, 1476 nt, Artificial Sequence
  derived and/or modified CDS sequence (opt5) from LASV(G733-SLE-2010;Clade IV)__AIT17154__GPCmut12
augggccagaucgugaccuucuuucaagaggucccccacguuauugaagaggugaugaacaucgugcugauugcccucagcauccuggcuguccuuaaggggcuguacaauuucgccacaugcggaauugugggccucguuuccuuucugcuucugugugggagaucuugcacgaccagccucuauaaaggaguguacgaacugcagacacuggagcucaacauggaaacccugaauauguguaugccucuuuccugcacaaagaacaauucucaucacuauaucauggucggcaacgagaccgggcuggagcucacacugaccaauacgagcaucauuaaccauaaauucuguaaucuuuccgacgcgcacaagaaaaaccuguacgaucaugcucucaugucuaucauuagcaccuuucaccuguccaucccgaauuucaaccaguaugaagccaugagcugcgacuuuaauggaggcaagauuucugugcaguacaaccugucccacagcuaugccggcgaugcugccaaucauugugggacaaucgcuaacggaguucuccaaaccuucaugcggauggccuggggcgggucuuacauugcgcuggacuccggacgcgauagaugggacugcaucaugacaagcuaccaguaucuuaucauucagaacaccacgugggaggaucacugucaguuuucucggcccuccccuaucggcuaccuggggcuccugagccaacgcacaagagacauuuauaucucccggcgccuucugggaaccuucacauggacccucucugauagcgaaggcaaggacacccccggcggguacugccugacaagauggaugcugauugaggccgagcucaaauguuuuggaaauacggcuguggccaagugcaacgaaaaacaugaugaggaguucugcgacaugcugcggcuuuuugauuucuguaagcaggcuauccagcgccugaaagccgaagcgcagauguccauccaacucauuaauaaggccgucaacgcucugaucaaugaccagcuuauuaugaagaaccaccugagagacaucaugggcauuccuuauugcaauuacagcaaauauuguuaccucaaccacaccacaaccgggaagacaucucugcccaaaugcugucugguguccaauggaagcuaccucaacgaaacccauuucucugaugacaucgagcagcaagccgauaauaugaucacggagaugcugcagaaggaauauauggagcggcagggcaaaacaccucuugggcugguggaccucuuugucuucagcaccuccuuuuaccugauuucuaucuuccugcaccuuguuaagauuccgacccaucgccacguggugggaaaaagcugccccaagccucauagacucaaccacaugggcaucuguuccugcggccuguaugggcagcccggagucccugugaaguggaaacgguga

SEQ ID NO: 40064 - RNA, 1476 nt, Artificial Sequence
  derived and/or modified CDS sequence (opt5) from MOPV/LASV reassortant(IGS-1;Clade IV)__AFY05576__GPCmut12
augggccagaucgugaccuucuuucaagaggucccccacguuauugaagaggugaugaacaucgugcugauugcccucagcguccuggcugugcuuaaggggcuguacaauuucgccacaugcggacucguuggccuggugacguuucuucugcucugugggagauccugcaccacaucucuguauaaaggagucuacgaacugcagacccucgagcugaacauggaaacacuuaauauguguaugccucugagcugcaccaagaacaauucccaucacuauaucauggugggcaacgagacagggcucgagcugacccuuacgaauaccucuauuaucaaccauaaauucuguaaucugagcgacgcgcacaagaaaaaccucuacgaucaugcucugauguccaucauuucuacauuucaccugagcaucccgaauuucaaccaguaugaagccauguccugcgacuuuaauggaggcaagauuagcguucaguacaaccucucucacuccuaugccggcgaugcugccaaucauugugggaccguggcuaacggaguccugcaaacauucaugcggauggccuggggcgggagcuacaucgcgcuugacucuggacgcggcaacugggauugcauuaugaccuccuaccaguaucugaucauucagaauacgacaugggaggaccacugucaguuuagcagacccucuccuaucggguaccucggacugcuuucccaacggacccgcgauaucuauauuagcagacggcugcucggcacauucaccuggacccuguccgacucugaaggcgaggauacacccgggggauacugccugacgcgcuggaugcucaucgaggccgaacugaaguguuuuggcaacaccgcuguggccaaaugcaaugagaagcaugacgaagaguucugcgauaugcuuagacuguuugacuucuguaaacaggcuauucagcggcucaaggccgaagcgcagaugagcauccaacugauuaacaaagccgugaaugcucuuaucaacgaucagcugaucaugaagaaucaccuccgcgacauuauggggaucccuuauugcaacuacuccaaguauuguuaccugaaucacacaaccacaggaagaaccagccugcccaaaugcugucucgucucuaacggcuccuaccugaaugagacgcauuucagcgacgauauugagcagcaagccgacaacaugaucacagaaaugcuucagaaggaguauauggaacggcaggggaaaaccccucugggacucguugaucuguuuguguucucuaccagcuuuuaccugauuuccaucuuccuucaccucgugaagaucccgacacaucgccacauugucggcaaaucuugccccaagccucauagacugaaucacaugggcaucuguagcugcgggcuguauaaacagcccggagugccuguuaaguggaagcgguga

SEQ ID NO: 40065 - RNA, 1476 nt, Artificial Sequence
  derived and/or modified CDS sequence (opt5) from LASV(LM765-SLE-2012;Clade IV)__AIT17814__GPCmut12
augggccagaucgugaccuucuuucaagaggucccccacguuauugaagaggugaugaacaucgugcugauugcccucagcauccuggcuguccuuaaggggcuguacaauuucgccacaugcggacucgugggccugguuacguuucuucugcucugugggagauccugcaccacaucucuguauaaaggaguguacgaacugcagacccucgagcugaacauggaaacacuuaauauguguaugccucugagcugcaccaagaacaauucccaucacuauauuauggucggcaacgagacagggcucgagcugacccuuacgaauaccucuaucaucgaccauaaauucuguaaccugagcgaugcgcaccggaagaaucucuacgaccaugcucugauguccauuaucucuacauuucaccugagcauuccgaacuucaaucaguaugaagccauguccugcgauuuuaacggaggcaaaaucagcgugcaguacaaucucucucacuccuaugccaaggacgcugccgaucauuguggcaccguugcuaacggggugcugcaaacauucaugcgcauggccuggggaggcagcuacauugcgcuugacucugggagaggacggugggauugcaucaugaccuccuaccaguaucugauuauccagaauacgacaugggaggaccacugucaguuuagccgccccucuccuaucggcuaccucgggcugcuuucccaaagaacccgggauauuuauaucagccgcagacugcucggaacauucaccuggacccuguccgacucugaaggcaaggauacacccggcggguacugccugacgcgguggaugcucauugaggccgagcugaaauguuuuggaaacaccgcugucgccaagugcaacgaaaaacaugacgaggaguucugcgauaugcuucgccuguuugacuucuguaagcaggcuauccagagacucaaagccgaagcgcagaugagcauucaacugaucaauaaggccgugaacgcucuuaucaaugaccagcugauuaugaagaaccaccuccgggauaucaugggcauuccuuauugcaauuacuccaaauauuguuaccugaaccacacaaccacagggaagaccagccugcccaaaugcugucucgugucuaauggauccuaccugaacgaaacgcauuucagcgacgauaucgagcagcaagccgacaauaugauuacagagaugcuucagaaggaauauauggagcgccagggcaaaaccccucuggggcucgucgaucuguuuguuuucucuaccagcuuuuaccugaucuccaucuuccuucaccucgugaagauuccgacacauagacacaucgugggaaaacccugcccuaagccccaucggcugaaccacaugggcauuuguucuugcggccuguauaagcagccugggguccccgugaaauggaagcgcuga

SEQ ID NO: 40066 - RNA, 1476 nt, Artificial Sequence
  derived and/or modified CDS sequence (opt5) from LASV(LM776-SLE-2012;Clade IV)__AIT17824__GPCmut12
augggccagaucgugaccuucuuucaagaggucccccacguuauugaagaggugaugaacaucgugcugauugcccucagcauccuggcuguccuuaaggggcuguacaauuucgccacaugcggacucgugggccugguuacguuucuucugcucugugggagauccugcaccacaucuguguauaaaggagucuacgaacugcagacccuggagcucaacauggaaacacugaauauguguaugccucuuagcugcaccaagaacaauucccaucacuauauuauggugggcaacgagacagggcuggagcucacccugacgaauaccucuaucaucaaccauaaauucuguaaucuuagcgacgcgcacaagaaaaaccuguacgaucaugcucucauguccauuaucucuacauuucaccugagcauuccgaauuucaaccaguaugaagccauguccugcgacuuuaauggaggcaagaucagcguucaguacaaccugucucacuccuaugccggcgaugcugccaaucauugugggaccguggcuaacggaguccuccaaacauucaugcggauggccuggggcgggagcuacauugcgcuggacucuggacacggcaagugggauugcaucaugaccuccuaccaguaucuuauuauccagaacacgacaugggaggaccauugucaguuuagccgccccucuccuaucggguaccugggacuccugucccaaagaacccgggauauuuauaucagccgcagacuucugggcacauucaccuggacccucuccgacucugaaggcaaagauacacccgggggauacugccugacgcgguggaugcugauugaggccgagcucaaguguuuuggcaauaccgcuguggccaaaugcaacgaaaagcacgacgaggaguucugcgauaugcugcgccuuuuugacuucuguaaacaggcuauccagagacugaaggccgaagcgcagaugagcauucaacucaucaauaaggccgugaacgcucugaucaaugaucagcuuauuaugaaaaaccaucugcgggacaucauggggauuccuuauugcaauuacuccaaguauuguuaccucaaccacacaaccacaggaaaaaccagccugcccaagugcugucuggucucuaauggcuccuaccucaacgaaacgcacuucagcgacgauaucgagcagcaagccgacaauaugauuacagagaugcugcagaaagaauauauggagcgccaggggaagaccccucuuggacugguugaucucuuuguguucucuaccagcuuuuaccugaucuccaucuuccugcaucuugugaaaauuccgacacacagacauaucgucggcaagucuugccccaagccucaccggcucaaccacaugggcauuuguagcugcgggcuguauaaacagcccggagugccuguucgcuggaagagauga

SEQ ID NO: 40067 - RNA, 1476 nt, Artificial Sequence
  derived and/or modified CDS sequence (opt5) from LASV(Mad39;Clade IV)__ANH09722__GPCmut12
augggccagaucgugaccuucuuucaagaggucccccacguuauugaagaggugaugaacaucgugcugauugcccucagcauccuggcuguccuuaaggggcuguacaauguggccacaugcggacucauuggccugguuacguuccuucugcucugugggagauccugcaccacaacccuguauaaaggaguguacgaacugcaggcgcucgagcugaacauggaaacacuuaauauguguaugccucugucuugcaccaagaacaauagccaucacuauauccgggucggcaacgagacagggcucgagcugacccuuacgaauaccucccugaucaaccauaaauuuuguaaucucucugacgcucacaagaaaaaccuguacgaucaugcccugaugagcauuaucuccacauuccaccucucuauuccgaauuuuaaccaguaugaagccaugagcugcgacuucaaugauggaaagaucuccgugcaguacaaccugagccacaccuaugcuggcgacacagccaaucauuguggcaccguugcuaacggggugcuucaaacguuuaugcgcauggccuggggaggcucuuacauugcgcuggauuccgggagaggaggcugggacugcaucaugacaagcuaccaguaucucauuauccagaacaccacaugggaggaucacugucaguucucucggcccuccccuaucggguaccugggacuucugagccaacgcaccagagacauuuauaucucucggcgccuccugggcaccuuuacauggacgcuguccgauagcgaaggcaaggacacccccgggggauacugccucacaagauggaugcugauugaggccgagcuuaaauguuucggcaauaccgcugucgccaagugcaacgaaaaacaugaugaggaauuuugcgacaugcugcgccucuucgauuuuuguaagcaggcuauccagcggcugaaagccgaggcgcagauguccauucaacuuaucaauaaggccgugaacgcucugaucaaugaccagcucauuaugaagaaccaccugagagacaucauggggauuccuuauugcaauuacucuaaauauuguuaccugaaccacacagugaccggaaagacgagccuccccaaaugcugucuggucuccaauggcagcuaccuuaacgaaacacauuucucugaugacaucgagcagcaagccgauaauaugauuaccgagaugcugcagaaggaauauauggagcggcaggggaaaaccccucucggacugguugaccuguucguguuuuccaccagcuucuaccuuaucucuaucuuucuccaccuggugaagauuccgacacaucgccacgucgugggcaaacccugcccuaagccccauagacugaaccacaugggcaucuguagcugcggguucuauaagcagccuggaguucccgugcgguggaaacgcuga

SEQ ID NO: 40068 - RNA, 1476 nt, Artificial Sequence
  derived and/or modified CDS sequence (opt5) from LASV(Z0947-SLE-2011;Clade IV)__AIT17840__GPCmut12
augggccagaucgugaccuucuuucaagaggucccccacguuauugaagaggugaugaacaucgugcugauugcccucagcauccuggcuguccuuaaggggcuguacaauuucgccacaugcggacucgugggccugguuacguuucuucugcucugugggagauccugcaccauuucucuguauaaaggaguguacgaacugcagacacucgagcugaacauggaaacccuuaauauguguaugccucugagcugcacaaagaacaauucccaucacuauaucauggucggcaacgagaccgggcucgagcugacacuuaccaauacgucuaucauuaaccauaaauucuguaaucugagcgacgcgcacaagaaaaaccucuacgaucaugcucugauguccaucauuucuaccuuucaccugagcaucccgaauuucaaccaguaugaagccauguccugcgacuuuaauggaggcaagauuagcgugcaguacaaccucucucacuccuaugccggcgaugcugccaaucauugugggacaguugcuaacggagugcugcaaaccuucaugcggauggccuggggcgggagcuacaucgcgcuugacucuggacgcgauagaugggacugcauuaugacauccuaccaguaucugaucauccagaacaccacgugggaggaucacugucaguuuagccggcccucuccuauuggcuaccucgggcugcuuucccaacgcacaagagacaucuauauuagccggcgccugcucggaaccuucacauggacccuguccgauucugaaggcaaggacacccccggcggguacugccugacaagauggaugcucaucgaggccgagcugaaauguuuuggaaauacggcugucgccaagugcaacgaaaaacaugaugaggaguucugcgacaugcuucggcuguuugauuucuguaagcaggcuauucagcgccucaaagccgaagcgcagaugagcauccaacugaucaauaaggccgugaacgcucuuauuaaugaccagcugaucaugaagaaccaccucagagacauuaugggcaucccuuauugcaauuacuccaaauauuguuaccugaaccacaccacaaccgggaagacaagccugcccaaaugcugucucgugucuaauggauccuaccugaacgaaacccauuucagcgaugacauugagcagcaagccgauaauaugaucacggagaugcuucagaaggaauauauggagcggcagggcaaaacaccucuggggcucgucgaccuguuuguuuucucuaccagcuuuuaccugaucuccauuuuccuucaccucgugaagaucccgacccaucgccacauugugggaaaacccugcccuaagccccauagacugaaccacaugggcaucuguucuugcggccuguauaagcagccugggguccccgugaaauggaagcgguga

SEQ ID NO: 40069 - RNA, 1717 nt, Artificial Sequence
  mRNA product Design a-1 (hSL-A64-N5) comprising derived and/or modified sequence from LASV(Josiah;Clade IV)__NP_694870__GPCmut12 (opt1)
aggagagucccgcagucggcguccagcggcucugcuuguucgugugugugucguugcaggccuuauucaagcuuaccaugggccagaucgugaccuucuuccaggaggucccccacgugaucgaggaggugaugaacaucguccugaucgcccucagcgugcuggccgugcugaaggggcucuacaacuucgcgaccugcggccuggucgggcuggugacguuccuccugcugugcggccgcuccugcaccaccagccucuacaaggggguguacgagcugcagacccuggagcucaacauggagacgcugaacaugugcaugccgcuguccugcaccaagaacaacagccaccacuacaucauggucggcaacgagaccggccucgagcugacgcugaccaacaccuccaucaucaaccacaaguucugcaaccucagcgacgcccacaagaagaaccuguacgaccacgcccugauguccaucaucagcaccuuccaccucuccauccccaacuucaaccaguacgaggccaugagcugcgacuucaacgggggcaagaucuccgugcaguacaaccugagccacuccuacgccggggacgcggccaaccacugcggcacgguggccaacgggguccugcagaccuucaugcggauggccuggggcggcagcuacaucgcgcucgacuccgggcgcggcaacugggacugcaucaugaccagcuaccaguaccugaucauccagaacaccacgugggaggaccacugccaguucucccggcccagccccaucggguaccugggccuccugucccagcgcacccgggacaucuacaucagccgccggcugcucggcaccuucaccuggacgcugagcgacuccgaggggaaggacaccccgggcggguacugccugacccgcuggaugcucaucgaggccgagcugaagugcuucggcaacaccgccguggccaagugcaacgagaagcacgacgaggaguucugcgacaugcugcggcuguucgacuucugcaagcaggccauccagcgccugaaggcggaggcccagaugagcauccagcugaucaacaaggccgugaacgcccucaucaacgaccagcugaucaugaagaaccaccuccgggacaucauggggauccccuacugcaacuacuccaaguacugcuaccucaaccacacgaccaccggccgcaccagccugcccaagugcugccuggucuccaacggcagcuaccucaacgagacgcacuucuccgacgacaucgagcagcaggccgacaacaugaucaccgagaugcugcagaaggaguacauggagcggcaggggaagacgccccugggccucguggaccuguucguguucagcaccuccuucuaccugaucagcaucuuccugcaccucgucaagaucccgacccaccgccacaucguggggaaguccugccccaagccccaccggcugaaccacaugggcaucugcagcugcgggcuguacaagcagcccggcgugccggucaaguggaagcgcugaggacuagucccuguucccagagcccacuuuuuuuucuuuuuuugaaauaaaauagccugucuuucagaucucaaaggcucuuuucagagccaccaaaaaaaaaaaaaaaaaaaaaaaaaaaaaaaaaaaaaaaaaaaaaaaaaaaaaaaaaaaaaaaaagaauu

SEQ ID NO: 40070 - RNA, 1714 nt, Artificial Sequence
  mRNA product Design a-1 (hSL-A64-N5) comprising derived and/or modified sequence from LASV(LP;Clade I)__AAF86701__GPCmut12 (opt1)
aggagagucccgcagucggcguccagcggcucugcuuguucgugugugugucguugcaggccuuauucaagcuuaccaugggccagaucaucaccuucuuccaggaggugccccacgucaucgaggaggugaugaacaucgugcugaucgcccucagccugcuggccauccucaaggggcuguacaacaucgcgaccugcggcaucaucgggcuggucgccuuccucuuccugugcggcaaguccugcagccugacgcucaagggcggguacgagcugcagacccuggagcucaacauggagacccugaacaugugcaugccgcuguccugcacgaagaacagcucccaccacuacauccgcgugggcaacgagaccgggcucgagcugacccugaccaacacgagcaucaucaaccacaaguucugcaaccucuccgacgcccacaagaagaaccuguacgaccacgcccugaugagcaucaucuccaccuuccaccucagcauccccaacuucaaccaguacgaggccauguccugcgacuucaacggcgggaagaucagcgugcaguacaaccugucccacagcuacgcgggcgacgccgccgagcacugcgggaccgucgccaacggcgugcugcagaccuucaugcggauggcguggggcgggcgcuacaucgcccucgacuccggcaaggggaacugggacugcaucaugacgagcuaccaguaccugaucauccagaacaccaccugggaggaccacugccaguucucccggcccagccccaucggcuaccugggccuccugucccagcgcacccgggacaucuacaucagccgccggcugcucgggacguucaccuggacccugagcgacuccgagggcaacgagacccccgggggcuacugccugacgcgcuggaugcucaucgaggccgagcugaagugcuucgggaacaccgccguggccaagugcaacgagaagcacgacgaggaguucugcgacaugcugcggcuguucgacuucugcaagcaggcgauccgccggcugaaggccgaggcccagaugagcauccagcugaucaacaaggccgucaacgcccucaucaacgaccagcugaucaugaagaaccaccuccgcgacaucaugggcauccccuacugcaacuacuccaaguacugcuaccucaaccacaccagcuccggccggaccagccugcccaagugcugccugaucuccaacgggagcuaccucaacgagacgcaguucuccgacgacaucgagcagcaggcggacaacaugaucaccgagaugcugcagaaggaguacaucgagcgccagggcaagaccccgcuggggcucguggacaucuucaucuucagcaccuccuucuaccugaucagcaucuuccugcaccugaucaagaucccgacgcaccggcacaucgugggcaagcccugccccaagccccaccgccucaaccacaugggggucugcuccugcggccuguacaagcacccgggcgugcccaccaaguggaagcggugaggacuagucccuguucccagagcccacuuuuuuuucuuuuuuugaaauaaaauagccugucuuucagaucucaaaggcucuuuucagagccaccaaaaaaaaaaaaaaaaaaaaaaaaaaaaaaaaaaaaaaaaaaaaaaaaaaaaaaaaaaaaaaaaagaauu

SEQ ID NO: 40071 - RNA, 1714 nt, Artificial Sequence
  mRNA product Design a-1 (hSL-A64-N5) comprising derived and/or modified sequence from LASV(803213;Clade II)__AAF86703__GPCmut12 (opt1)
aggagagucccgcagucggcguccagcggcucugcuuguucgugugugugucguugcaggccuuauucaagcuuaccaugggccagaucaucaccuucuuccaggaggugccccacgucaucgaggaggugaugaacaucgugcugaucgcccucagccugcuggccauccucaaggggaucuacaacgucgcgaccugcggccuguucgggcugaucuccuuccuccugcugugcggccgcagcugcuccgugacguacaaggggguguacgagcuccagacccuggagcugaacauggccaaccucaacaugugcaugccgcugagcugcaccaagaacaacucccaccacuacaucauggucggcaacgagacgggccuggagcucacccugaccaacaccagcaucaucaaccacaaguucugcaaccuguccgacgcccacaagaagaaccucuacgaccacgcccugaugagcaucaucuccacguuccaccugagcauccccaacuucaaccaguacgaggccauguccugcgacuucaacgggggcaagaucagcgugcaguacaaccucucccacagcuucgcgguggacgccgccaaccacugcgggaccaucgccaacggcguccugcagaccuucaugcggauggcguggggcggguccuacaucgcccuggacagcggcaaggggaacugggacugcaucaugaccuccuaccaguaccucaucauccagaacacgaccugggaggaccacugccaguucagccgccccucccccaucggcuaccuggggcugcucagccagcggacccgcgacaucuacaucagccggcgccugcugggcaccuucacguggacccucuccgacagcgagggcaacgaggcccccgggggcuacugccugacccgguggaugcugaucgaggccgagcucaagugcuucgggaacaccgccguggcgaagugcaacgagaagcacgacgaggaguucugcgacaugcugcgccuguucgacuucugcaagcaggccaucaagcggcucaagacggaggcccagauguccauccagcugaucaacaaggccgugaacgcccugaucaacgaccagcucaucaugaagaaccaccuccgcgacaucaugggcauccccuacugcaacuacagccgguacugcuaccugaaccacaccgucaccgggaagaccucccugccccgcugcugccuggugagcaacggcuccuaccugaacgagacgcacuucagcgacgacaucgagcagcaggcggacaacaugaucaccgagaugcuccagaaggaguacauggaccggcagggcaagaccccgcuggggcugguggaccucuucgucuucuccaccagcuucuaccugaucuccaucuuccugcaccuggugaagaucccgacgcaccgccacaucgugggcaagcccugccccaagccccaccggcucaaccacauggggaucugcagcugcggccuguacaagcacccggggguccccgugaaguggaagcgcugaggacuagucccuguucccagagcccacuuuuuuuucuuuuuuugaaauaaaauagccugucuuucagaucucaaaggcucuuuucagagccaccaaaaaaaaaaaaaaaaaaaaaaaaaaaaaaaaaaaaaaaaaaaaaaaaaaaaaaaaaaaaaaaaagaauu

SEQ ID NO: 40072 - RNA, 1714 nt, Artificial Sequence
  mRNA product Design a-1 (hSL-A64-N5) comprising derived and/or modified sequence from LASV(GA391;Clade III)__CAA36645__GPCmut12 (opt1)
aggagagucccgcagucggcguccagcggcucugcuuguucgugugugugucguugcaggccuuauucaagcuuaccaugggccagaucgugaccuucuuccaggaggucccccacgugaucgaggaggugaugaacaucguccugaucgcccucagcauccuggccauccugaaggggcucuacaacguggcgaccugcggccugaucgggcuggugacguuccuccugcuguccggccgcagcugcucccucaucuacaaggggaccuacgagcugcagacccuggagcucaacauggagacccugaacaugugcaugccgcugagcugcaccaagaacaacucccaccacuacauccgggucggcaacgagaccggccucgagcugacccugacgaacaccagcauccucaaccacaaguucugcaaccuguccgacgcccacaagcgcaaccuguacgaccacagccucauguccaucaucagcaccuuccaccuguccauccccaacuucaaccaguacgaggccaugagcugcgacuucaacgggggcaagaucaccgugcaguacaaccugucccacagcuucgccguggacgccgcggggcacugcggcacgcucgccaacgggguccugcagaccuucaugcggauggccuggggcggcuccuacaucgcccuggacagcgggcgcggcaacugggacugcaucaugaccuccuaccaguaccucaucauccagaacaccacgugggacgaccacugccaguucagccggcccucccccaucggguaccugggccugcucagccagcgcacccgggacaucuacaucagccgccggcugcugggcaccuucaccuggacgcucuccgacagcgaggggaacgagaccccgggcggguacugccugacccgcuggaugcugaucgaggcggagcucaagugcuucggcaacaccgccguggccaagugcaacgagaagcacgacgaggaguucugcgacaugcugcggcuguucgacuucugcaagcaggccauccgccggcucaagacggaggcccagauguccauccagcugaucaacaaggcggugaacgcccugaucaacgaccagcucaucaugaagaaccaccuccgcgacaucauggggauccccuacugcaacuacagccgguacugcuaccugaaccacaccuccaccggcaagaccagccugccccgcugcugccugaucuccaacggcagcuaccugaacgagacgaaguucuccgacgacaucgagcagcaggccgacaacaugaucaccgagaugcuccagaaggaguacaucgaccggcaggggaagacgccccugggccuggucgaccuguucguguucagcaccuccuucuaccucaucagcaucuuccugcaccuggugaagaucccgacccaccgccacaucgucgggaagcccugccccaagccccaccggcucaaccacaugggcaucugcuccugcgggcuguacaagcagccgggcgugcccgugcgcuggaagcggugaggacuagucccuguucccagagcccacuuuuuuuucuuuuuuugaaauaaaauagccugucuuucagaucucaaaggcucuuuucagagccaccaaaaaaaaaaaaaaaaaaaaaaaaaaaaaaaaaaaaaaaaaaaaaaaaaaaaaaaaaaaaaaaaagaauu

SEQ ID NO: 40073 - RNA, 1717 nt, Artificial Sequence
  mRNA product Design a-1 (hSL-A64-N5) comprising derived and/or modified sequence from LASV(AV;Clade V)__CCA30314__GPCmut12 (opt1)
aggagagucccgcagucggcguccagcggcucugcuuguucgugugugugucguugcaggccuuauucaagcuuaccaugggccagaucgugaccuucuuccaggaggucccccacgugaucgaggaggugaugaacaucguccugaucgcccucagcauccuggccgugcugaaggggcucuacaacaucgcgaccugcggccugaucgggcugaucacguuccuccugcugugcggccgcuccugcagcuccaaccucuacaaggggguguacgagcugcagagccuggaccucaacauggagacccugaacaugugcaugccgcuguccugcaccaagaacaacagccaccacuacauccgggucggcaacgacacgggccucgagcugacccugaccaacaccuccauccucaaccacaaguucugcaaccugagcgacgcccacaagaaggaccuguacgaccacgcccucauguccaucaucagcacguuccaccuguccauccccaacuucaaccaguacgaggccaugagcugcgacuucaacgggggcaagaucuccgugcaguacaaccugagccacuccuacgccaucgacgcggccaaccacugcgggaccguggccaacggcauccuccagaccuucaugcgcauggccuggggcgggagcuacaucgcgcuggacuccggccgggggaacugggacugcaucaugaccagcuaccaguaccugaucauccagaacacgaccugggagaaccacugccaguucucccgccccagccccaucggcuaccucgggcugcugagccagcggacccgcgacaucuacaucucccggcgccuccugggcaccuucacguggacccugagcgacuccgagggcaacgccacccccgggggcuacugccucacccgguggaugcugaucgaggccgagcugaagugcuucgggaacacggccgucgccaagugcaacgagaagcacgacgaggaguucugcgacaugcuccgccuguucgacuucugcaagcaggcgaucagccggcugaaguccgaggcccagaugagcauccagcucaucaacaaggccgugaacgcccugaucaacgaccagcugaucaugaagaaccaccuccgcgacaucaugggcauccccuacugcaacuacuccaaguacugcuaccugaaccacaccaucaccgggaagaccagccugcccaagugcugccucguguccaacggcagcuaccugaacgagacgcacuucuccgacgacaucgagcagcaggccgacaacaugaucaccgagaugcugcagaaggaguacauggagcggcagggcaagaccccgcucgggcuggucgaccuguucguguucagcaccuccuucuaccugaucagcaucuuccuccgccuggugaagaucccgacgcaccggcacaucgucggcaagcccugccccaagccccaccgccugaaccacauggggaucugcuccugcggccucuacaagcagccgggggugcccgugcgguggaagcgcugaggacuagucccuguucccagagcccacuuuuuuuucuuuuuuugaaauaaaauagccugucuuucagaucucaaaggcucuuuucagagccaccaaaaaaaaaaaaaaaaaaaaaaaaaaaaaaaaaaaaaaaaaaaaaaaaaaaaaaaaaaaaaaaaagaauu

SEQ ID NO: 40074 - RNA, 1714 nt, Artificial Sequence
  mRNA product Design a-1 (hSL-A64-N5) comprising derived and/or modified sequence from LASV(Togo/2016/7082;Clade VI)__AMR44577__GPCmut12 (opt1)
aggagagucccgcagucggcguccagcggcucugcuuguucgugugugugucguugcaggccuuauucaagcuuaccaugggccagaucaucaccuucuuccaggaggugccccacgucaucgaggaggugaugaacaucgugcugaucgcccucagccugcuggccauccucaagggggucuacaacguggcgaccugcggcaucaucgggcuggugacguuccuguuccucugcggccgcuccugcagccugaucuacaagggguccuacgagcugcagacccucgagcugaacauggagacccugaacaugugcaugccgcucagcugcacgaagaacuccagccaccacuacauccgggucggcaacgagaccggccuggagcugacccucaccaacacguccaucaucaaccacaaguucugcaaccugagcgacgcccacaagcgcaaccuguacgaccacgcccucauguccauccugagcaccuuccaccuguccauccccaacuucaaccaguacgaggccaugagcugcgacuucaacgggggcaagaucuccgugcaguacaaccucagccacgccuacgcgguggacgccgccgagcacugcgggaccgucgccaacggcgugcugcagaccuucaugcggauggcguggggcggguccuacaucgcccuggacagcggccgcgggaacugggacugcaucaugacguccuaccaguaccucaucauccagaacaccaccugggaggaccacugccaguucagccggcccucccccaucggcuaccuggggcugcucagccagcgcacccgggacaucuacaucagccgccggcugcugggcacguucaccuggacccucuccgacagcgagggcaacgagacccccgggggcuacugccugacgcgcuggaugcugaucgaggccgagcucaagugcuucgggaacaccgccguggccaagugcaacgagaagcacgacgaggaguucugcgacaugcugcggcuguucgacuucugcaagcaggcgauccagcgccucaaguccgaggcccagaugagcauccagcugaucaacaaggccgucaacgcccugaucaacgaccagcucaucaugaagaaccaccuccgggacaugaugggcauccccuacugcaacuacuccaaguacugcuaccugaaccacaccagcuccgggcgcaccagccugcccaagugcugccugguguccaacggcagcuaccugaacgagacgcacuucuccgacgacaucgagcagcaggccgacaacaugaucaccgagaugcuccagaaggaguacaucgaccggcagggcaagaccccgcuggggcugguggaccucuucgucuucagcaccuccuucuaccugaucagcaucuuccugcaccugaucaagaucccgacgcaccgccacaucgugggcaagcccugccccaagccccaccggcucaaccacauggggaucugcuccugcggccuguacaagcagccgggggugcccacccgcuggaagcggugaggacuagucccuguucccagagcccacuuuuuuuucuuuuuuugaaauaaaauagccugucuuucagaucucaaaggcucuuuucagagccaccaaaaaaaaaaaaaaaaaaaaaaaaaaaaaaaaaaaaaaaaaaaaaaaaaaaaaaaaaaaaaaaaagaauu

SEQ ID NO: 40075 - RNA, 1714 nt, Artificial Sequence
  mRNA product Design a-1 (hSL-A64-N5) comprising derived and/or modified sequence from LASV(KAK-428;Clade n.d. (VII))__ANH09740__GPCmut12 (opt1)
aggagagucccgcagucggcguccagcggcucugcuuguucgugugugugucguugcaggccuuauucaagcuuaccaugggccagaucgugaccuucuuccaggaggucccccacgugaucgaggaggugaugaacaucguccugaucgcccucagccugcuggccauccucaaggggcuguacaacuucgcgaccugcggcgugaucgggcugaucacguuccuccugcugugcggccgcuccugcagcgccaccuacaaggggcaguacgagcuccagacccuggagcugaacauggagucccucaacaugugcaugccgcugagcugcacgaagaacaacucccaccacuacauccgggccggcaacaacaccggccuggagcucacccugaccaacacgagcaucaucucccacaaguucugcaaccugagcgacgcccacaagaagaaccucuacgaccacacccugauguccaucaucaccaccuuccaccugagcauccccaacuucaaccaguacgaggccauguccugcgacuucaacgggggcaagaucagcauccaguacaaccucucccacagcuacgcgggggacgccgcccagcacugcggcacgguggccaacgggguccugcagaccuucaugcgcauggcguggggcggcuccuaccuggcccucgacagcgggcggcgcggcugggacugcaucaucuccagcuaccaguaccugaucauccagaacaccaccugggacgaccacugccaguucucccggcccagccccaucggguaccugggcuucgugagccagaagacgcgcgacaucuacaucucccggcgccuccugggcaccuucaccuggacccugagcgacuccgaggggcacgacaugccgggcggguacugccucacgcgguggaugcugaucgaggccgaccugaagugcuucggcaacaccgccguggccaagugcaacgagaagcacgacgaggaguucugcgacauguggcgccucuucgacuucugcaagcaggcgauccagcggcugaaggccgaggcccagaugaacauccagcugaucaacaaggccgucaacgcccucaucaacgaccagcugaugaugaagaaccaccuccgcgacaucauggggauccccuacugcaacuacagcaaguucugcuaccugaacaacaccaccacgggccggaccucccugccccgcugcugccugaucagcaacggcuccuaccucaacgagacccacuucagcgacgacaucgagcagcaggcggacaacaugaucaccgagaugcugcagaaggaguacauggaccggcaggggaagacgccccugggccucguggaccuguucguguucuccaccagcuucuaccugaucaccaucuuccuccaccuggucaagaucccgacccaccgccacaucguggggaagcccugccccaagccccaccggcugaaccacaugggcaucugcuccugcgggcuguacaagcagccgggcgugcccguccgcuggaagcggugaggacuagucccuguucccagagcccacuuuuuuuucuuuuuuugaaauaaaauagccugucuuucagaucucaaaggcucuuuucagagccaccaaaaaaaaaaaaaaaaaaaaaaaaaaaaaaaaaaaaaaaaaaaaaaaaaaaaaaaaaaaaaaaaagaauu

SEQ ID NO: 40076 - RNA, 1714 nt, Artificial Sequence; identical to SEQ ID NO: 40070
  mRNA product Design a-1 (hSL-A64-N5) comprising derived and/or modified sequence from LASV(Pinneo-NIG-1969;Clade I)__AIT17836__GPCmut12 (opt1)

SEQ ID NO: 40077 - RNA, 1714 nt, Artificial Sequence
  mRNA product Design a-1 (hSL-A64-N5) comprising derived and/or modified sequence from LASV(ISTH0009-NIG-2011;Clade II)__AIT17404__GPCmut12 (opt1)
aggagagucccgcagucggcguccagcggcucugcuuguucgugugugugucguugcaggccuuauucaagcuuaccaugggccagaucaucaccuucuuccaggaggugccccacgucaucgaggaggugaugaacaucgugcugaucgcccucagccugcuggccauccucaaggggaucuacaacgucgcgaccugcggccuguucgggcugguguccuuccuccugcugugcggccgcagcugcuccacgaccuacaaggggguguacgagcuccagacccuggagcuggacauggccagccucaacaugugcaugccgcuguccugcacgaagaacaacagccaccacuacaucauggucggcaacgagaccggccuggagcucacccugaccaacacguccaucaucaaccacaaguucugcaaccugagcgacgcccacaagaagaaccucuacgaccacgcccugauguccaucaucagcaccuuccaccuguccauccccaacuucaaccaguacgaggccaugagcugcgacuucaacgggggcaagaucuccgugcaguacaaccucagccacgcguacgccguggacgccgccaaccacugcgggaccaucgcgaacggcguccugcagaccuucaugcggauggccuggggcggguccuacaucgcccuggacagcggcaagggguccugggacugcaucaugacgagcuaccaguaccucaucauccagaacaccaccugggaggaccacugccaguucucccgccccagccccaucggcuaccuggggcugcucagccagcggacccgcgacaucuacaucucccggcgccugcugggcacguucaccuggacccucagcgacuccgagggcaacgagacccccgggggcuacugccugacgcgguggaugcugaucgaggccgagcucaagugcuucgggaacaccgccguggcgaagugcaacgagaagcacgacgaggaguucugcgacaugcugcgccuguucgacuucugcaagcaggccauccggcgccucaagaccgaggcccagaugagcauccagcugaucaacaaggccgugaacgcccugaucaacgaccagcucaucaugaagaaccaccuccgggacaucaugggcaucccguacugcaacuacuccaaguacugcuaccugaaccacaccgucacggggaagaccagccugccccgcugcugccugguguccaacggcagcuaccugaacgagacccacuucuccgacgacaucgagcagcaggcggacaacaugaucaccgagcuccugcagaaggaguacauggaccggcagggcaagacgccccuggggcucguggaccuguucgucuucagcaccuccuucuaccugaucagcaucuuccugcaccucaucaagaucccgacccaccgccacaucaccggcaagcccugccccaagccccaccggcugaaccacauggggaucugcuccugcggccuguacaagcacccgggggugcccgugaaguggaagcgcugaggacuagucccuguucccagagcccacuuuuuuuucuuuuuuugaaauaaaauagccugucuuucagaucucaaaggcucuuuucagagccaccaaaaaaaaaaaaaaaaaaaaaaaaaaaaaaaaaaaaaaaaaaaaaaaaaaaaaaaaaaaaaaaaagaauu

SEQ ID NO: 40078 - RNA, 1714 nt, Artificial Sequence
  mRNA product Design a-1 (hSL-A64-N5) comprising derived and/or modified sequence from LASV(ISTH2010-NIG-2012;Clade II)__AIT17482__GPCmut12 (opt1)
aggagagucccgcagucggcguccagcggcucugcuuguucgugugugugucguugcaggccuuauucaagcuuaccaugggccagaucaucaccuucuuccaggaggugccccacgucaucgaggaggugaugaacaucgugcugaucgcccucagccugcuggccauccucaaggggaucuacaacgucgcgaccugcggccuguucgggcugguguccuuccuccugcugugcggccgcagcugcuccacgaccuacaaggggguguacgagcuccagacccuggagcuggacauggccagccucaacaugugcaugccgcuguccugcacgaagaacaacagccaccacuacaucauggucggcaacgagaccggccuggagcucacccugaccaacacguccaucaucaaccacaaguucugcaaccugagcgacgcccacaagaagaaccucuacgaccacgcccugauguccaucaucagcaccuuccaccuguccauccccaacuucaaccaguacgaggccaugagcugcgacuucaacgggggcaagaucuccgugcaguacaaccucagccacgcguacgccguggacgccgccaaccacugcgggaccaucgcgaacggcguccugcagaccuucaugcggauggccuggggcggguccuacaucgcccuggacagcggcaagggguccugggacugcaucaugacgagcuaccaguaccucaucauccagaacaucaccugggaggaccacugccaguucucccgccccagccccaucggcuaccuggggcugcucagccagcggacccgcgacaucuacaucucccggcgccugcugggcaccuucacguggacccucagcgacuccgagggcaacgagacccccgggggcuacugccugacccgguggaugcugaucgaggccgagcucaagugcuucgggaacacggccguggcgaagugcaacgagaagcacgacgaggaguucugcgacaugcugcgccuguucgacuucugcaagcaggccauccggcgccucaagaccgaggcccagaugagcauccagcugaucaacaaggccgugaacgcccugaucaacgaccagcucaucaugaagaaccaccuccgggacaucaugggcauccccuacugcaacuacuccaaguacugcuaccugaaccacaccgucaccgggaagacgagccugccccgcugcugccugguguccaacggcagcuaccugaacgagacccacuucuccgacgacaucgagcagcaggcggacaacaugaucaccgagcuccugcagaaggaguacaucgaccggcagggcaagaccccgcuggggcucguggaccuguucgucuucagcacguccuucuaccugaucagcaucuuccugcaccucgugaagaucccgacccaccgccacguggucggcaagcccugccccaagccccaccggcugaaccacauggggaucugcuccugcggccuguacaagcacccgggggugcccgugaaguggaagcgcugaggacuagucccuguucccagagcccacuuuuuuuucuuuuuuugaaauaaaauagccugucuuucagaucucaaaggcucuuuucagagccaccaaaaaaaaaaaaaaaaaaaaaaaaaaaaaaaaaaaaaaaaaaaaaaaaaaaaaaaaaaaaaaaaagaauu

SEQ ID NO: 40079 - RNA, 1714 nt, Artificial Sequence
  mRNA product Design a-1 (hSL-A64-N5) comprising derived and/or modified sequence from LASV(Lassa virus/H.sapiens-wt/NGA/2015/ISTH_0543;Clade II)__AVO03639__GPCmut12 (opt1)
aggagagucccgcagucggcguccagcggcucugcuuguucgugugugugucguugcaggccuuauucaagcuuaccaugggccagaucaucaccuucuuccaggaggugccccacgucaucgaggaggugaugaacaucgugcugaucgcccucagccugcuggccauccucaaggggaucuacaacgucgcgaccugcggccuguucgggcugguguccuuccuccugcugugcggccgcagcugcuccacgaccuacaaggggguguacgagcuccagacccuggagcuggacauggccaaccucaacaugugcaugccgcugagcugcacgaagaacaacucccaccacuacaucauggucggcaacgagaccggccuggagcucacccugaccaacacgagcaucaucaaccacaaguucugcaaccuguccgacgcccacaagaagaaccucuacgaccacgcccugaugagcaucaucuccaccuuccaccugagcauccccaacuucaaccaguacgaggccauguccugcgacuucaacgggggcaagaucagcgugcaguacaaccucucccacaccuacgcgguggacgccgccaaccacugcgggaccaucgccaacggcguccugcagacguucaugcggauggcguggggcgggagcuacaucgcccuggacuccggcaaggggagcugggacugcaucaugaccuccuaccaguaccucgugauccagaacaccaccugggaggaccacugccaguucagccgccccucccccaucggcuaccuggggcugcucagccagcggacgcgcgacaucuacaucagccggcgccugcugggcaccuucaccuggacccucuccgacagcgagggcaacgagacgcccgggggcuacugccugacccgguggaugcugaucgaggccgagcucaagugcuucgggaacaccgccguggccaagugcaacgagaagcacgacgaggaguucugcgacaugcugcgccuguucgacuucugcaagcaggcgauccggcgccucaagaccgaggcccagauguccauccagcugaucaacaaggccgucaacgcccugaucaacgaccagcucaucaugaagaaccaccuccgggacaucaugggcauccccuacugcaacuacagcaaguacugcuaccugaaccacacggugaccgggaagaccucccugccccgcugcugccuggugagcaacggcuccuaccugaacgagacccacuucagcgacgacaucgagcagcaggccgacaacaugaucacggagcuccugcagaaggaguacaucgaccggcagggcaagaccccgcuggggcucgucgaccuguucguguucuccaccagcuucuaccugaucuccaucuuccugcaccucgugaagaucccgacccaccgccacaucacgggcaagcccugccccaagccccaccggcugaaccacauggggaucugcagcugcggccuguacaagcacccggggguccccgugaaguggaagcgcugaggacuagucccuguucccagagcccacuuuuuuuucuuuuuuugaaauaaaauagccugucuuucagaucucaaaggcucuuuucagagccaccaaaaaaaaaaaaaaaaaaaaaaaaaaaaaaaaaaaaaaaaaaaaaaaaaaaaaaaaaaaaaaaaagaauu

SEQ ID NO: 40080 - RNA, 1714 nt, Artificial Sequence
  mRNA product Design a-1 (hSL-A64-N5) comprising derived and/or modified sequence from LASV(Lassa virus/H.sapiens-wt/NGA/2016/ISTH_0009;Clade II)__AVO03571__GPCmut12 (opt1)
aggagagucccgcagucggcguccagcggcucugcuuguucgugugugugucguugcaggccuuauucaagcuuaccaugggccagaucaucaccuucuuccaggaggugccccacgucaucgaggaggugaugaacaucgugcugaucgcccucagccugcuggccauccucaaggggaucuacaacgucgcgaccugcggccugcuggggcucguguccuuccugcugcucugcggccgcagcugcuccacgaccuacaaggggguguacgagcugcagacccuggagcucgacauggccagccugaacaugugcaugccgcuguccugcacgaagaacaacagccaccacuacaucauggucggcaacgagaccggccucgagcugacccugaccaacacguccaucaucaaccacaaguucugcaaccucagcgacgcccacaagaagaaccuguacgaccacgcccugauguccaucaucagcaccuuccaccucuccauccccaacuucaaccaguacgaggccaugagcugcgacuucaacgggggccggaucuccgugcaguacaaccugagccacuccuacgcgguggacgccgccaaccacugcgggaccaucgccaacggcguccugcagaccuucaugcgcauggcguggggcgggagcuacaucgcccucgacuccggcaaggggagcugggacugcaucaugacguccuaccaguaccugaucauccagaacaccaccugggaggaccacugccaguucagccggcccagccccaucggcuaccuggggcuccugucccagcgcacccgggacaucuacaucagccgccggcugcucggcacguucaccuggacccuguccgacagcgagggcaacgagacccccgggggcuacugccugacgcgcuggaugcucaucgaggccgagcugaagugcuucgggaacaccgccguggccaagugcaacgagaagcacgacgaggaguucugcgacaugcugcggcuguucgacuucugcaagcaggcgauccgccggcugaagaccgaggcccagauguccauccagcugaucaacaaggccgugaacgcccucaucaacgaccagcugaucaugaagaaccaccuccgcgacaucaugggcaucccguacugcaacuacagcaaguacugcuaccucaaccacaccgucacggggaagaccucccugccccggugcugccuggugagcaacggcuccuaccucaacgagacccacuucagcgacgacaucgagcagcaggccgacaacaugaucaccgagcugcugcagaaggaguacaucgaccgccagggcaagacgccccucgggcugguggaccuguucgucuucuccaccagcuucuaccugaucuccaucuuccuccaccuggugaagaucccgacccaccggcacaucaccggcaagcccugccccaagccccaccgccugaaccacauggggaucugcagcugcggccucuacaaccacccgggggugcccgucaaguggaagcggugaggacuagucccuguucccagagcccacuuuuuuuucuuuuuuugaaauaaaauagccugucuuucagaucucaaaggcucuuuucagagccaccaaaaaaaaaaaaaaaaaaaaaaaaaaaaaaaaaaaaaaaaaaaaaaaaaaaaaaaaaaaaaaaaagaauu

SEQ ID NO: 40081 - RNA, 1714 nt, Artificial Sequence
  mRNA product Design a-1 (hSL-A64-N5) comprising derived and/or modified sequence from LASV(Lassa virus/H.sapiens-wt/NGA/2016/ISTH_0017;Clade II)__AVO03567__GPCmut12 (opt1)
aggagagucccgcagucggcguccagcggcucugcuuguucgugugugugucguugcaggccuuauucaagcuuaccaugggccagaucaucaccuucuuccaggaggugccccacgucaucgaggaggugaugaacaucgugcugaucgcccucagccugcuggccauccucaaggggaucuacaacgucgcgaccugcggccuguucgggcugguguccuuccuccugcugugcggccgcagcugcuccacgaccuacaaggggguguacgagcuccagacccuggagcuggacauggccagccucaacaugugcaugccgcuguccugcacgaagaacaacagccaccacuacaucauggucggcaacgagaccggccuggagcucacccugaccaacacguccaucaucaaccacaaguucugcaaccugagcgacgcccacaagaagaaccucuacgaccacgcccugauguccaucaucagcaccuuccaccuguccauccccaacuucaaccaguacgaggccaugagcugcgacuucaacgggggcaagaucuccgugcaguacaaccucagccacaccuacgcgaucgacgccgccaaccacugcgggaccaucgccaacggcgugcugcagacguucaugcggauggcguggggcggguccuacaucgcccuggacagcggcaagggguccugggacugcaucaugaccagcuaccaguaccucaucauccagaacaccaccugggaggaccacugccaguucucccgccccagccccaucggcuaccuggggcugcucagccagcggacgcgcgacaucuacaucucccggcgccugcugggcaccuucaccuggacccucagcgacuccgagggcaacgagacgcccgggggcuacugccugacccgguggaugcugaucgaggccgagcucaagugcuucgggaacaccgccgucgccaagugcaacgagaagcacgacgaggaguucugcgacaugcugcgccuguucgacuucugcaagcaggcgauccggcgccucaagaccgaggcccagaugagcauccagcugaucaacaaggccgugaacgcccugaucaacgaccagcucaucaugaagaaccaccuccgggacaucaugggcauccccuacugcaacuacuccaaguacugcuaccugaaccacacggugaccgggaagaccagccugccccgcugcugccuggucuccaacggcagcuaccugaacgagacccacuucuccgacgacaucgagcagcaggccgacaacaugaucacggagcuccugcagaaggaguacauggaccggcagggcaagaccccgcuggggcucguggaccuguucguguucagcaccuccuucuaccugaucagcaucuuccugcaccucguccgcaucccgacccaccggcacgugaucggcaagcccugccccaagccccaccgccugaaccacauggggaucugcuccugcggccuguacaagcacccgggggugcccgucaaguggaagcggugaggacuagucccuguucccagagcccacuuuuuuuucuuuuuuugaaauaaaauagccugucuuucagaucucaaaggcucuuuucagagccaccaaaaaaaaaaaaaaaaaaaaaaaaaaaaaaaaaaaaaaaaaaaaaaaaaaaaaaaaaaaaaaaaagaauu

SEQ ID NO: 40082 - RNA, 1714 nt, Artificial Sequence
  mRNA product Design a-1 (hSL-A64-N5) comprising derived and/or modified sequence from LASV(Lassa virus/H.sapiens-wt/NGA/2018/ISTH_0959;Clade II)__AVV65099__GPCmut12 (opt1)
aggagagucccgcagucggcguccagcggcucugcuuguucgugugugugucguugcaggccuuauucaagcuuaccaugggccagaucaucaccuucuuccaggaggugccccacgucaucgaggaggugaugaacaucgugcugaucgcccucagccugcuggccauccucaaggggaucuacaacgucgugaccugcggccuguucgggcugguguccuuccuccugcugugcggccgcagcugcuccacgaccuacaagggggucuacgagcuccagacccuggagcuggacauggcgagccucaacaugugcaugccgcuguccugcacgaagaacaacagccaccacuacaucauggugggcaacgagaccggccuggagcucacccugaccaacacguccaucaucaaccacaaguucugcaaccugagcgacgcccacaagaagaaccucuacgaccacgcccugauguccaucaucagcaccuuccaccuguccauccccaacuucaaccaguacgaggccaugagcugcgacuucaacgggggcaagaucuccgugcaguacaaccucagccacgccuacgcgaucgacgccgccaaccacugcgggaccaucgccaacggcguccugcagaccuucaugcggauggcguggggcggguccuacaucgcccuggacagcggcaagggguccugggacugcaucaugacgagcuaccaguaccucaucauccagaacaccaccugggaggaccacugccaguucucccgccccagccccaucggcuaccuggggcugcucagccagcggacccgcgacaucuacaucucccggcgccugcugggcacguucaccuggacccucagcgacuccgagggcaacgagacccccgggggcuacugccugacgcgguggaugcugaucgaggccgagcucaagugcuucgggaacaccgccguggccaagugcaacgagaagcacgacgaggaguucugcgacaugcugcgccuguucgacuucugcaagcaggcgauccggcgccucaagaccgaggcccagaugagcauccagcugaucaacaaggccgugaacgcccugaucaacgaccagcucaucaugaagaaccaccuccgggacaucaugggcaucccguacugcaacuacuccaaguacugcuaccugaaccacaccgucacggggaagaccagccugccccgcugcugccugguguccaacggcagcuaccugaacgagacccacuucuccgacgacaucgagcagcaggccgacaacaugaucaccgagcuccugcagaaggaguacaucgaccggcagggcaagacgccccuggggcucguggaccuguucgucuucagcaccuccuucuaccugaucagcaucuuccugcaccucgugaagaucccgacccaccgccacgugaucggcaagcccugccccaagccccaccggcugaaccacauggggaucugcuccugcggccuguacaagcacccggggguccccgugaaguggaagcgcugaggacuagucccuguucccagagcccacuuuuuuuucuuuuuuugaaauaaaauagccugucuuucagaucucaaaggcucuuuucagagccaccaaaaaaaaaaaaaaaaaaaaaaaaaaaaaaaaaaaaaaaaaaaaaaaaaaaaaaaaaaaaaaaaagaauu

SEQ ID NO: 40083 - RNA, 1714 nt, Artificial Sequence
  mRNA product Design a-1 (hSL-A64-N5) comprising derived and/or modified sequence from LASV(LASV003-NIG-2008;Clade II)__AIT17580__GPCmut12 (opt1)
aggagagucccgcagucggcguccagcggcucugcuuguucgugugugugucguugcaggccuuauucaagcuuaccaugggccagaucaucaccuucuuccaggaggugccccacgucaucgaggaggugaugaacaucgugcugaucgcccucagccugcuggccauccucaaggggaucuacaacgucgcgaccugcggccuguucgggcugguguccuuccuccugcugugcggccgcagcugcuccacgaccuacaaggggguguacgagcuccagacccuggagcuggacauggccagccucaacaugugcaugccgcuguccugcacgaagaacaacagccaccacuacaucauggucggcaacgagaccggccuggagcucacccugaccaacacguccaucaucaaccacaaguucugcaaccugagcgacgcccacaagaagaaccucuacgaccacgcccugauguccaucaucagcaccuuccaccuguccauccccaacuucaaccaguacgaggccaugagcugcgacuucaacgggggcaagaucuccgugcaguacaaccucagccacaccuacgcgguggacgccgccaaccacugcgggaccaucgccaacggcguccugcagacguucaugcggauggcguggggcggguccuacaucgcccuggacagcggcaagggguccugggacugcaucaugaccagcuaccaguaccucaucauccagaacaccaccugggaggaccacugccaguucucccgccccagccccaucggcuaccuggggcugcucagccagcggacgcgcgacaucuacaucucccggcgccugcugggcaccuucaccuggacccucagcgacuccgagagcaacgagacgccgggcggguacugccugacccgguggaugcugaucgaggccgagcucaagugcuucggcaacaccgccguggccaagugcaacgagaagcacgacgaggaguucugcgacaugcugcgccuguucgacuucugcaagcaggcgauccggcgccucaaggccgaggcccagauguccauccagcugaucaacaaggccgugaacgcccugaucaacgaccagcucaucaugaagaaccaccuccgggacaucauggggauccccuacugcaacuacagcaaguacugcuaccugaaccacaccgucacgggccgcaccucccugccccggugcugccuggugagcaacggguccuaccugaacgagacccacuucagcgacgacaucgagcagcaggcggacaacaugaucaccgagcuccugcagaaggaguacauggaccgccagggcaagacgccccugggccucguggaccuguucgucuucuccaccagcuucuaccugaucuccaucuuccugcaccucgugaagaucccgacccaccggcacgugaucgggaagcccugccccaagccccaccgccugaaccacaugggcaucugcagcugcgggcuguacaagcacccgggcguccccgugaaguggaagcggugaggacuagucccuguucccagagcccacuuuuuuuucuuuuuuugaaauaaaauagccugucuuucagaucucaaaggcucuuuucagagccaccaaaaaaaaaaaaaaaaaaaaaaaaaaaaaaaaaaaaaaaaaaaaaaaaaaaaaaaaaaaaaaaaagaauu

SEQ ID NO: 40084 - RNA, 1714 nt, Artificial Sequence
  mRNA product Design a-1 (hSL-A64-N5) comprising derived and/or modified sequence from LASV(LASV035-NIG-2009;Clade II)__AIT17588__GPCmut12 (opt1)
aggagagucccgcagucggcguccagcggcucugcuuguucgugugugugucguugcaggccuuauucaagcuuaccaugggccagaucaucaccuucuuccaggaggugccccacgucaucgaggaggugaugaacaucgugcugaucgcccucagccugcuggccauccucaaggggaucuacaacgucgcgaccugcggccuguucgggcugguguccuuccuccugcugugcggccgcagcugcuccacgaccuacaaggggguguacgagcuccagacccuggagcuggacauggccagccucaacaugugcaugccgcuguccugcacgaagaacaacagccaccacuacaucauggucggcaacgagaccggccuggagcucacccugaccaacacguccaucaucaaccacaaguucugcaaccugagcgacgcccacaagaagaaccucuacgaccacgcccugauguccaucaucagcaccuuccaccuguccauccccaacuucaaccaguacgaggccaugagcugcgacuucaacgggggcaagaucuccgugcaguacaaccucagccacgcguacgccguggacgccgccaaccacugcgggaccaucgcgaacggcguccugcagaccuucaugcggauggccuggggcggguccuacaucgcccuggacagcggcaagggguccugggacugcaucaugacgagcuaccaguaccucaucauccagaacaccaccugggaggaccacugccaguucucccgccccagccccaucggcuaccuggggcugcucagccagcggacccgcgacaucuacaucucccggcgccugcugggcacguucaccuggacccucagcgacuccgagggcaacgagacccccgggggcuacugccugacgcgguggaugcugaucgaggccgagcucaagugcuucgggaacaccgccguggcgaagugcaacgagaagcacgacgaggaguucugcgacaugcugcgccuguucgacuucugcaagcaggccauccggcgccucaaggccgaggcccagaugagcauccagcugaucaacaaggccgugaacgcgcugaucaacgaccagcucaucaugaagaaccaccuccgggacaucaugggcauccccuacugcaacuacuccaaguacugcuaccugaaccacaccgucaccgggaagacgagccugccccgcugcugccugguguccaacggcagcuaccugaacgagacccacuucuccgacgacaucgagcagcaggccgacaacaugaucaccgagcuccugcagaaggaguacaucgaccggcagggcaagaccccgcuggggcucguggaccuguucgucuucagcacguccuucuaccugaucagcaucuuccugcaccucgugaagaucccgacccaccgccacgugaucggcaagcccugccccaagccccaccggcugaaccacauggggaucugcuccugcggccuguacaagcacccggggguccccgugaaguggaagcgcugaggacuagucccuguucccagagcccacuuuuuuuucuuuuuuugaaauaaaauagccugucuuucagaucucaaaggcucuuuucagagccaccaaaaaaaaaaaaaaaaaaaaaaaaaaaaaaaaaaaaaaaaaaaaaaaaaaaaaaaaaaaaaaaaagaauu

SEQ ID NO: 40085 - RNA, 1714 nt, Artificial Sequence
  mRNA product Design a-1 (hSL-A64-N5) comprising derived and/or modified sequence from LASV(LASV1000-NIG-2009;Clade II)__AIT17782__GPCmut12 (opt1)
aggagagucccgcagucggcguccagcggcucugcuuguucgugugugugucguugcaggccuuauucaagcuuaccaugggccagaucaucaccuucuuccaggaggugccccacgucaucgaggaggugaugaacaucgugcugaucgcccucagccugcuggccauccucaaggggaucuacaacgucgcgaccugcggccuguucgggcugguguccuuccuccugcugugcggccgcagcugcuccacgaccuacaaggggguguacgagcuccagacccuggagcuggacauggccagccucaacaugugcaugccgcuguccugcacgaagaacaacagccaccacuacaucauggucggcaacgagaccggccuggagcucacccugaccaacacguccaucaucaaccacaaguucugcaaccugagcgacgcccacaagaagaaccucuacgaccacgcccugauguccaucaucagcaccuuccaccuguccauccccaacuucaaccaguacgaggccaugagcugcgacuucaacgggggcaagaucuccgugcaguacaaccucagccacaccuacgcgguggacgccgccaaccacugcgggaccaucgccaacggcguccugcagacguucaugcggauggcguggggcggguccuacaucgcccuggacagcggcaagggguccugggacugcaucaugaccagcuaccaguaccucaucauccagaacaccaccugggaggaccacugccaguucucccgccccagccccaucggcuaccuggggcugcucagccagcggacgcgcgacaucuacaucucccggcgccugcugggcaccuucaccuggacccucagcgacuccgagggcaacgagacgcccgggggcuacugccugacccgguggaugcugaucgaggccgagcucaagugcuucgggaacaccgccguggccaagugcaacgagaagcacgacgaggaguucugcgacaugcugcgccuguucgacuucugcaagcaggcgaucaagcggcucaagaccgaggcccagaugagcauccagcugaucaacaaggccgugaacgcccugaucaacgaccagcucaucaugaagaaccaccuccgcgacaucaugggcauccccuacugcaacuacuccaaguacugcuaccugaaccacacggucaccgggaagaccagccugccccggugcugccugguguccaacggcagcuaccugaacgagacccacuucuccgacgacaucgagcagcaggccgacaacaugaucacggagcuccugcagaaggaguacaucgaccgccagggcaagaccccgcuggggcucguggaccuguucgucuucagcaccuccuucuaccugaucagcaucuuccugcaccucgugaagaucccgacccaccggcacguggucggcaagcccugccccaagccccaccgccugaaccacauggggaucugcuccugcggccuguacaagcacccgggggugcccgugaaguggaagcggugaggacuagucccuguucccagagcccacuuuuuuuucuuuuuuugaaauaaaauagccugucuuucagaucucaaaggcucuuuucagagccaccaaaaaaaaaaaaaaaaaaaaaaaaaaaaaaaaaaaaaaaaaaaaaaaaaaaaaaaaaaaaaaaaagaauu

SEQ ID NO: 40086 - RNA, 1714 nt, Artificial Sequence
  mRNA product Design a-1 (hSL-A64-N5) comprising derived and/or modified sequence from LASV(LASV221-NIG-2010;Clade II)__AIT17624__GPCmut12 (opt1)
aggagagucccgcagucggcguccagcggcucugcuuguucgugugugugucguugcaggccuuauucaagcuuaccaugggccagaucaucaccuucuuccaggaggugccccacgucaucgaggaggugaugaacaucgugcugaucgcccucagccugcuggccauccucaaggggaucuacaacgucgcgaccugcggccuguucgggcugguguccuuccuccugcugugcggccgcagcugcuccacgaccuacaaggggguguacgagcuccagacccuggagcuggacauggccagccucaacaugugcaugccgcuguccugcacgaagaacaacagccaccacuacaucauggucggcaacgagaccggccuggagcucacccugaccaacacguccaucaucaaccacaaguucugcaaccugagcgacgcccacaagaagaaccucuacgaccacgcccugauguccaucaucagcaccuuccaccuguccauccccaacuucaaccaguacgaggccaugagcugcgacuucaacgggggcaagaucuccgugcaguacaaccucagccacaccuacgcgaucgacgccgccaaccacugcgggaccaucgccaacggcgugcugcagacguucaugcggauggcguggggcggguccuacaucgcccuggacagcggcaagggguccugggacugcaucaugaccagcuaccaguaccucaucauccagaacaccaccugggaggaccacugccaguucucccgccccagccccaucggcuaccuggggcugcucagccagcggacgcgcgacaucuacaucucccggcgccugcugggcaccuucaccuggacccucagcgacuccgagggcaacgagacgcccgggggcuacugccugacccgguggaugcugaucgaggccgagcucaagugcuucgggaacaccgccgucgccaagugcaacgagaagcacgacgaggaguucugcgacaugcugcgccuguucgacuucugcaagcaggcgauccggcgccucaagaccgaggcccagaugagcauccagcugaucaacaaggccgugaacgcccugaucaacgaccagcucaucaugaagaaccaccuccgggacaucaugggcauccccuacugcaacuacuccaaguacugcuaccugaaccacacggugaccgggaagaccagccugccccgcugcugccuggucuccaacggcagcuaccugaacgagacccacuucuccgacgacaucgagcagcaggccgacaacaugaucacggagaugcuccagaaggaguacauggaccggcagggcaagaccccgcuggggcugguggaccucuucguguucagcaccuccuucuaccugaucagcaucuuccugcaccuggucaagaucccgacccaccgccacgugaucggcaagcccugccccaagccccaccggcucaaccacauggggaucugcuccugcggccuguacaagcacccgggggugcccgucaaguggaagcgcugaggacuagucccuguucccagagcccacuuuuuuuucuuuuuuugaaauaaaauagccugucuuucagaucucaaaggcucuuuucagagccaccaaaaaaaaaaaaaaaaaaaaaaaaaaaaaaaaaaaaaaaaaaaaaaaaaaaaaaaaaaaaaaaaagaauu

SEQ ID NO: 40087 - RNA, 1714 nt, Artificial Sequence
  mRNA product Design a-1 (hSL-A64-N5) comprising derived and/or modified sequence from LASV(LASV237-NIG-2010;Clade II)__AIT17638__GPCmut12 (opt1)
aggagagucccgcagucggcguccagcggcucugcuuguucgugugugugucguugcaggccuuauucaagcuuaccaugggccagaucaucaccuucuuccaggaggugccccacgucaucgaggaggugaugaacaucgugcugaucgcccucagccugcuggccauccucaaggggaucuacaacgucgcgaccugcggccuguucgggcugguguccuuccuccugcugugcggccgcagcugcuccacgaccuacaaggggguguacgagcuccagacccuggagcuggacauggccagccucaacaugugcaugccgcuguccugcacgaagaacaacagccaccacuacaucauggucggcaacgagaccggccuggagcucacccugaccaacacguccaucaucaaccacaaguucugcaaccugagcgacgcccacaagaaggaccucuacgaccacgcccugauguccaucaucagcaccuuccaccuguccauccccaacuucaaccaguacgaggccaugagcugcgacuucaacgggggcaagaucuccgugcaguacaaccucagccacaccuacgcgguggacgccgccaaccacugcgggaccaucgccaacggcguccugcagacguucaugcggauggcguggggcggguccuacaucgcccuggacagcggcaagggguccugggacugcaucaugaccagcuaccaguaccucaucauccagaacaccaccugggaggaccacugccaguucucccgccccagccccaucggcuaccuggggcugcucagccagcggacgcgcgacaucuacaucucccggcgccugcugggcaccuucaccuggacccucagcgacuccgagggcaacgagacgcccgggggcuacugccugacccgguggaugcugaucgaggccgagcucaagugcuucgggaacaccgccguggccaagugcaacgagaagcacgacgaggaguucugcgacaugcugcgccuguucgacuucugcaagcaggcgauccggcgccucaagaccgaggcccagaugagcauccagcugaucaacaaggccgugaacgcccugaucaacgaccagcucaucaugaagaaccaccuccgggacaucaugggcauccccuacugcaacuacuccaaguacugcuaccugaaccacacggucaccgggaagaccagccugccccgcugcugccugguguccaacggcagcuaccugaacgagacccacuucuccgacgacaucgagcagcaggccgacaacaugaucacggagcuccugcagaaggaguacauggaccggcagggcaagaccccgcuggggcucguggaccuguucgucuucagcaccuccuucuaccugaucagcaucuuccugcaccucaucaagaucccgacccaccgccacaucacgggcaagcccugccccaagccccaccggcugaaccacauggggaucugcuccugcggccuguacaagcacccgggggugcccgugaaguggaagcgcugaggacuagucccuguucccagagcccacuuuuuuuucuuuuuuugaaauaaaauagccugucuuucagaucucaaaggcucuuuucagagccaccaaaaaaaaaaaaaaaaaaaaaaaaaaaaaaaaaaaaaaaaaaaaaaaaaaaaaaaaaaaaaaaaagaauu

SEQ ID NO: 40088 - RNA, 1714 nt, Artificial Sequence
  mRNA product Design a-1 (hSL-A64-N5) comprising derived and/or modified sequence from LASV(LASV253-NIG-2011;Clade II)__AIT17670__GPCmut12 (opt1)
aggagagucccgcagucggcguccagcggcucugcuuguucgugugugugucguugcaggccuuauucaagcuuaccaugggccagaucaucaccuucuuccaggaggugccccacgucaucgaggaggugaugaacaucgugcugaucgcccucagccugcuggccauccucaaggggaucuacaacgucgcgaccugcggccuguucgggcugguguccuuccuccugcugugcggccgcagcugcuccacgaccuacaaggggguguacgagcuccagacccuggagcuggacauggccagccucaacaugugcaugccgcuguccugcacgaagaacaacagccaccacuacaucauggucggcaacgagaccggccuggagcucacccugaccaacacguccaucaucaaccacaaguucugcaaccugagcgacgcccacaagaagaaccucuacgaccacgcccugauguccaucaucagcaccuuccaccuguccauccccaacuucaaccaguacgaggccaugagcugcgacuucaacgggggcaagaucuccgugcaguacaaccucagccacaccuacgcgguggacgccgccaaccacugcgggaccaucgccaacggcguccugcagacguucaugcggauggcguggggcggguccuacaucgcccuggacagcggcaagggguccugggacugcaucaugaccagcuaccaguaccucaucauccagaacaccaccugggaggaccacugccaguucucccgccccagccccaucggcuaccuggggcugcucagccagcggacgcgcgacaucuacaucucccggcgccugcugggcaccuucaccuggacccucagcgacuccgagggcaacgagacgcccgggggcuacugccugacccgguggaugcugaucgaggccgagcucaagugcuucgggaacaccgccguggccaagugcaacgagaagcacgacgaggaguucugcgacaugcugcgccuguucgacuucugcaagcaggcgauccggcgccucaaggccgaggcccagaugagcauccagcugaucaacaaggccgugaacgcccugaucaacgaccagcucaucaugaagaaccaccuccgggacaucaugggcaucccguacugcaacuacuccaaguacugcuaccugaaccacaccgucacggggcgcaccagccugccccggugcugccugguguccaacggcagcuaccugaacgagacccacuucuccgacgacaucgagcagcaggcggacaacaugaucaccgagcuccugcagaaggaguacaucgaccgccagggcaagacgccccuggggcucguggaccuguucgucuucagcaccuccuucuaccugaucagcaucuuccugcaccucgugaagaucccgacccaccggcacaucaucggcaagcccugccccaagccccaccgccugaaccacauggggaucugcuccugcggccuguacaagcacccgggggugcccgucaaguggaagcggugaggacuagucccuguucccagagcccacuuuuuuuucuuuuuuugaaauaaaauagccugucuuucagaucucaaaggcucuuuucagagccaccaaaaaaaaaaaaaaaaaaaaaaaaaaaaaaaaaaaaaaaaaaaaaaaaaaaaaaaaaaaaaaaaagaauu

SEQ ID NO: 40089 - RNA, 1714 nt, Artificial Sequence
  mRNA product Design a-1 (hSL-A64-N5) comprising derived and/or modified sequence from LASV(LASV254-NIG-2011;Clade II)__AIT17674__GPCmut12 (opt1)
aggagagucccgcagucggcguccagcggcucugcuuguucgugugugugucguugcaggccuuauucaagcuuaccaugggccagaucaucaccuucuuccaggaggugccccacgucaucgaggaggugaugaacaucgugcugaucgcccucagccugcuggccauccucaaggggaucuacaacgucgcgaccugcggccuguucgggcugguguccuuccuccugcugugcggccgcagcugcuccacgaccuacaaggggguguacgagcuccagacccuggagcuggacaugaccaaccucaacaugugcaugccgcugagcugcaccaagaacaacucccaccacuacaucauggucggcaacgagaccggccuggagcucacccugacgaacaccagcaucaucaaccacaaguucugcaaccuguccgacgcccacaagaagaaccucuacaaccacgcccugaugagcaucaucuccaccuuccaccugagcauccccaacuucaaccaguacgaggccauguccugcgacuucaacgggggcaagaucagcgugcaguacaaccucucccacagcuacgccguggacgcggccaaccacugcgggaccaucgccaacggcguccugcagacguucaugcggauggccuggggcggguccuacaucgcgcuggacagcggcaaggggaacugggacugcaucaugaccuccuaccaguaccucaucauccagaacaccaccugggaggaccacugccaguucagccgccccucccccaucggcuaccuggggcugcucagccagcggacgcgcgacaucuacaucagccggcgccugcugggcaccuucaccuggacccucuccgacagcgagggcaacgagacgcccgggggcuacugccugacccgguggaugcugaucgaggccgagcucaagugcuucgggaacaccgccguggccaagugcaacgagaagcacgacgaggaguucugcgacaugcugcgccuguucgacuucugcaagcaggccauccggcgccucaagaccgaggcgcaggccaacauccagcugaucaacaaggccgugaacgcccugaucaacgaccagcucaucaugaagaaccaccuccgggacaucaugggcauccccuacugcaacuacuccaaguacugcuaccugaaccacacggucaccgggaagaccagccugccccgcugcugccugguguccaacggcagcuaccugaacgagacccacuucuccgacgacaucgagcagcaggccgacaacaugaucacggagcuccugcagaaggaguacauggaccggcagggcaagaccccgcuggggcucguggaccuguucgucuucagcaccuccuucuaccugaucagcaucuuccugcaccucgugaagaucccgacccaccgccacgugaucggcaagcccugccccaagccccaccggcugaaccacauggggaucugcuccugcggccuguacaagcacccggggguccccgugaaguggaagcgcugaggacuagucccuguucccagagcccacuuuuuuuucuuuuuuugaaauaaaauagccugucuuucagaucucaaaggcucuuuucagagccaccaaaaaaaaaaaaaaaaaaaaaaaaaaaaaaaaaaaaaaaaaaaaaaaaaaaaaaaaaaaaaaaaagaauu

SEQ ID NO: 40090 - RNA, 1714 nt, Artificial Sequence
  mRNA product Design a-1 (hSL-A64-N5) comprising derived and/or modified sequence from LASV(Nig08-A19;Clade III)__ADU56618__GPCmut12 (opt1)
aggagagucccgcagucggcguccagcggcucugcuuguucgugugugugucguugcaggccuuauucaagcuuaccaugggccagaucgugaccuucuuccaggaggucccccacgugaucgaggaggugaugaacaucguccugaucgcccucagcauccuggccauccugaaggggcucuacaacaucgcgaccugcggccugaucgggcuggugacguuccuccugcuguccggccgcagcugcuccaugaccuacaaggggguguacgagcuccagacccuggagcugaacaugaacacccucaacaugugcaugccgcugagcugcaccaagaacaacucccaccacuacaucauggucggcaacgagaccggccuggagcucacccugacgaacaccagccugcuccaccacaaguucugcaaccuguccgacgcccacaagaagaaccuguacgaccacacccucaugagcaucaucuccaccuuccaccugagcauccccaacuucaaccaguacgaggccauguccugcgacuucaacgggggcaagaucacggugcaguacaaccugagccacuccuacgccaucgacgccgcgaaccacugcgggaccguggccaacggcguccuccagaccuucaugcggauggccuggggcgggagcuacaucgcccuggacuccggccgcgggaagugggacugcaucaugaccagcuaccaguaccugaucauccagaacacgaccugggaggaccacugccaguucucccggcccagccccaucggcuaccucgggcugcugucccagcgcacccgggacaucuacaucagccgccggcuccugggcaccuucacguggacccugagcgacuccgagggcaacgagacccccgggggcuacugccucacccgcuggaugcugaucgaggcggagcugaagugcuucgggaacacggccguggccaagugcaacgagaagcacgacgaggaguucugcgacaugcuccggcuguucgacuucugcaagcaggccauccgccggcugaaggccgaggcgcagaugagcauccagcucaucaacaaggccgugaacgcccugaucaacgaccagcugaucaugaagaaccaccuccgcgacaucaugggcauccccuacugcaacuacuccaaguacugcuaccugaaccacaccagcaccgggcggaccucccugccccgcugcugccucgucagcaacggcuccuaccugaacgagacgcacuucagcgacgacaucgagcagcaggccgacaacaugaucaccgagaugcugcagaaggaguaccucgaccggcagggcaagaccccgcuggggcugguggaccuguucguguucuccaccagcuucuaccucaucuccaucuuccugcaccuggucaagaucccgacgcaccgccacaucgugggcaagcccugccccaagccccaccggcucaaccacauggggaucugcagcugcggccuguacaagcagccgggggugcccguccgcuggaagcggugaggacuagucccuguucccagagcccacuuuuuuuucuuuuuuugaaauaaaauagccugucuuucagaucucaaaggcucuuuucagagccaccaaaaaaaaaaaaaaaaaaaaaaaaaaaaaaaaaaaaaaaaaaaaaaaaaaaaaaaaaaaaaaaaagaauu

SEQ ID NO: 40091 - RNA, 1717 nt, Artificial Sequence
  mRNA product Design a-1 (hSL-A64-N5) comprising derived and/or modified sequence from LASV(G1180-SLE-2010;Clade IV)__AIT17168__GPCmut12 (opt1)
aggagagucccgcagucggcguccagcggcucugcuuguucgugugugugucguugcaggccuuauucaagcuuaccaugggccagaucgugaccuucuuccaggaggucccccacgugaucgaggaggugaugaacaucguccugaucgcccucagcauccuggccgugcugaaggggcucuacaacuucgcgaccugcggccugguggggcugcucaccuuccugcugcucugcggccgcuccugcaccgccagccgguacaagggggucuacgagcugcagacccuggagcucaacauggagacccugaacaugugcaugccgcuguccugcaccaagaacaacagccaccacuacaucauggugggcaacgagaccggccucgagcugacccugacgaacaccuccaucaucaaccacaaguucugcaaccucagcgacgcccacaagaagaaccuguacgaccacgcccugauguccaucaucagcaccuuccaccucuccauccccaacuucaaccaguacgaggccaugagcugcgacuucaacgggggcaagaucuccgugcaguacaaccugagccacuccuacgcgggggacgccgccaaccacugcggcaccgucgccaacggggugcugcagacguucaugcgcauggcguggggcggcagcuacaucgcccucgacuccgggcacggcagcugggacugcaucaugaccuccuaccaguaccugaucauccagaacaccaccugggaggaccacugccaguucagccggcccucccccaucggguaccugggccuccugagccagcgcacgcgggacaucuacaucagccgccggcugcucggcaccuucaccuggacccuguccgacagcgaggggaaggacacgccgggcggguacugccugacccgcuggaugcucaucgaggccgagcugaagugcuucggcaacaccgccguggccaagugcaacgagaagcacgacgaggaguucugcgacaugcugcggcuguucgacuucugcaagcaggcgauccagcgccugaaggccgaggcccagauguccauccagcugaucaacaaggccgucaacgcccucaucaacgaccagcugaucaugaagaaccaccuccgggacaucauggggauccccuacugcaacuacagcaaguacugcuaccucaaccacaccacgaccggcaagaccucccugcccaagugcugccuggugagcaacggcuccuaccucaacgagacccacuucagcgacgacaucgagcagcaggcggacaacaugaucacggagaugcugcagaaggaguacauggagcgccaggggaagacgccccugggccucguggaccuguucgucuucuccaccagcuucuaccugaucuccaucuuccugcaccucgugaagaucccgacccaccggcacaucgugggcaagagcugccccaagccccaccgccugaaccacauggggaucugcuccugcgggcuguacaagcagcccggcgucccggugaaguggaagcggugaggacuagucccuguucccagagcccacuuuuuuuucuuuuuuugaaauaaaauagccugucuuucagaucucaaaggcucuuuucagagccaccaaaaaaaaaaaaaaaaaaaaaaaaaaaaaaaaaaaaaaaaaaaaaaaaaaaaaaaaaaaaaaaaagaauu

SEQ ID NO: 40092 - RNA, 1717 nt, Artificial Sequence
  mRNA product Design a-1 (hSL-A64-N5) comprising derived and/or modified sequence from LASV(G1442-SLE-2011;Clade IV)__AIT17180__GPCmut12 (opt1)
aggagagucccgcagucggcguccagcggcucugcuuguucgugugugugucguugcaggccuuauucaagcuuaccaugggccagaucgugaccuucuuccaggaggucccccacgugaucgaggaggugaugaacaucguccugaucgcccucagcauccuggccgugcugaaggggcucuacaacguggcgaccugcggccugaucgggcuggucacguuccuccugcugugcggccgcuccugcaccaccacccucuacaaggggguguacgagcugcagacgcuggagcucaacauggagacccugaacaugugcaugccgcugagcugcaccaagaacaacucccaccacuacauccgggugggcaacgagacgggccucgagcugacccugaccaacaccagcaucaucaaccacaaguucugcaaccucuccgacgcccacaagaagaaccuguacgaccacgcccugaugagcaucaucuccacguuccaccucagcauccccaacuucaaccaguacgaggccauguccugcgacuucaacgggggcaagaucagcguccaguacaaccugucccacagcuacgccggggacgcggccaaccacugcggcaccguggccaacggggugcugcagaccuucaugcgcauggccuggggcggcuccuacaucgcgcucgacagcgggcggggcaacugggacugcaucaugaccuccuaccaguaccugaucauccagaacacgaccugggacgaccacugccaguucagccgccccucccccaucggguaccugggccuccugagccagcggacccgcgacgucuacaucucccggcgccugcucggcaccuucacguggacccugagcgacagcgaggggaaggacaccccgggcggguacugccugacccgguggaugcucaucgaggccgagcugaagugcuucggcaacacggccguggccaagugcaacgagaagcacgacgaggaguucugcgacaugcugcgccucuucgacuucugcaagcaggccauccagcggcugaaggcggaggcccagauguccauccagcugaucaacaaggccgugaacgcccucaucaacgaccagcugaucaugaagaaccaccuccgcgacaucauggggauccccuacugcaacuacagcaaguacugcuaccugaacaacaccgccaccggcaagaccucccugcccaagugcugccugaucagcaacggcuccuaccucaacgagacgcacuucagcgacgacaucgagcaggaggcggacaacaugaucaccgagaugcugcagaaggaguacauggagcggcaggggaagacgccccugggccucgucgaccuguucguguucuccaccagcuucuaccugaucuccaucuuccugcaccucgugaagaucccgacccaccgccacaucgucggcaagagcugccccaagccccaccggcugaaccacauggggaucugcuccugcgggcuguacaagcagcccggcgugccggugcgcuggaagcggugaggacuagucccuguucccagagcccacuuuuuuuucuuuuuuugaaauaaaauagccugucuuucagaucucaaaggcucuuuucagagccaccaaaaaaaaaaaaaaaaaaaaaaaaaaaaaaaaaaaaaaaaaaaaaaaaaaaaaaaaaaaaaaaaagaauu

SEQ ID NO: 40093 - RNA, 1717 nt, Artificial Sequence
  mRNA product Design a-1 (hSL-A64-N5) comprising derived and/or modified sequence from LASV(G3010-SLE-2013;Clade IV)__AIT17344__GPCmut12 (opt1)
aggagagucccgcagucggcguccagcggcucugcuuguucgugugugugucguugcaggccuuauucaagcuuaccaugggccagaucgugaccuucuuccaggaggucccccacgugaucgaggaggugaugaacaucguccugaucgcccucagcauccuggccgugcugaaggggcucuacaacuucgcgaccugcggccugguggggcuggucacguuccuccugcugugcggccgcuccugcaccaccagccucuacaaggggguguacgagcugcagacccuggagcucaacauggagacgcugaacaugugcaugccgcuguccugcaccaagaacaacagccaccacuacaucauggugggcaacgagaccggccucgagcugacgcugaccaacaccuccaucaucaaccacaaguucugcaaccucagcgacgcccacaagaagaaccuguacaaccacgcccugauguccaucaucagcaccuuccaccucuccauccccaacuucaaccaguacgaggccaugagcugcgacuucaacgggggcaagaucuccguccaguacaaccugagccacuccuacgccggggacgcggccagccacugcggcacgguggccaacggggugcugcagaccuucaugcggauggccuggggcggcuccuacaucgcgcucgacagcggguacggcaagugggacugcaucaugaccuccuaccaguaccugaucauccagaacaccacgugggaggaccacugccaguucagccgccccucccccaucggguaccugggccuccugagccagcggacccgcgacaucuacaucagccggcgccugcucggcaccuucaccuggacgcuguccgacagcgaggggaaggacaccccgggcggguacugccugacccgguggaugcucaucgaggccgagcugaagugcuucggcaacaccgccgucgccaagugcaacgagaagcacgacgaggaguucugcgacaugcugcgccucuucgacuucugcaagcaggccauccagcggcugaagacggaggcgcagauguccauccagcugaucaacaaggccgugaacgcccucaucaacgaccagcugaucaugaagaaccaccuccgcgacaucauggggauccccuacugcaacuacagcaaguacugcuaccugaaccacaccaccaccggcaagacgucccugcccaagugcugccuggugagcaacggcuccuaccucaacgagacccacuucagcgacgacaucgagcagcaggccgacaacaugaucaccgagaugcugcagaaggaguacauggagcggcaggggaagacgccccugggccucgucgaccuguucguguucuccaccagcuucuaccugaucuccaucuuccugcaccucgugaagaucccgacccaccgccacaucgucggcaagagcugccccaagccccaccggcugaaccacauggggaucugcuccugcgggcuguacaagcagcccggcgugccggugcgcuggaagcggugaggacuagucccuguucccagagcccacuuuuuuuucuuuuuuugaaauaaaauagccugucuuucagaucucaaaggcucuuuucagagccaccaaaaaaaaaaaaaaaaaaaaaaaaaaaaaaaaaaaaaaaaaaaaaaaaaaaaaaaaaaaaaaaaagaauu

SEQ ID NO: 40094 - RNA, 1717 nt, Artificial Sequence
  mRNA product Design a-1 (hSL-A64-N5) comprising derived and/or modified sequence from LASV(G502-SLE-2009;Clade IV)__AIT17126__GPCmut12 (opt1)
aggagagucccgcagucggcguccagcggcucugcuuguucgugugugugucguugcaggccuuauucaagcuuaccaugggccagaucgugaccuucuuccaggaggucccccacgugaucgaggaggugaugaacaucguccugaucgcccucagcauccuggccgugcugaaggggcucuacaacuucgcgaccugcggccugguggggcugcucacguuccugcugcucugcggccgcuccugcaccaccgggcuguacaagggcgucuacgagcugcagacccucgagcugaacauggagacgcugaacaugugcaugccgcucagcugcaccaagaacaacucccaccacuacaucauggugggcaacgagaccgggcuggagcugacgcucaccaacaccagcaucaucaaccacaaguucugcaaccuguccgacgcccacaagaagaaccuguacgaccacgcccucaugagcaucaucuccaccuuccaccugagcauccccaacuucaaccaguacgaggccauguccugcgacuucaacggcgggaagaucagcgugcaguacaaccugucccacagcuacgccggcgacgcggccgaccacugcgggacggucgccaacggcgugcuccagaccuucaugcggauggccuggggcggguccuacaucgcgcuggacagcggccgcgggcggugggacugcaucaugaccuccuaccaguaccugaucauccagaacaccacgugggaggaccacugccaguucagccgccccucccccaucggcuaccucggccugcugagccagcggacccgcgacaucuacaucucccggcgccuccuggggaccuucaccuggacgcugagcgacagcgagggcaaggacacccccgggggcuacugccucacccgguggaugcugaucgaggccgagcugaagugcuucgggaacaccgccguggccaagugcaacgagaagcacgacgaggaguucugcgacaugcuccgccuguucgacuucugcaagcaggccauccagcggcugaaggcggaggcccagauguccauccagcucaucaacaaggccgucaacgcccugaucaacgaccagcuggugaugaagaaccaccuccgcgacaucaugggcauccccuacugcaacuacagccgguacugcuaccugaaccacacgaccaccggccgcaccucccugcccaagugcugccucgugagcaacggguccuaccugaacgagacgcacuucagcgacgacaucgagcagcaggccgacaacaugaucaccgagaugcugcagaaggaguacauggagcggcagggcaagaccccgcucgggcuggucgaccuguucguguucuccaccagcuucuaccugaucuccaucuuccuccaccuggugaagaucccgacgcaccgccacaucgucggcaagagcugccccaagccccaccggcugaaccacauggggaucugcuccugcggccucuacaagcagcccggcgugccggugaaguggaagcgcugaggacuagucccuguucccagagcccacuuuuuuuucuuuuuuugaaauaaaauagccugucuuucagaucucaaaggcucuuuucagagccaccaaaaaaaaaaaaaaaaaaaaaaaaaaaaaaaaaaaaaaaaaaaaaaaaaaaaaaaaaaaaaaaaagaauu

SEQ ID NO: 40095 - RNA, 1717 nt, Artificial Sequence
  mRNA product Design a-1 (hSL-A64-N5) comprising derived and/or modified sequence from LASV(G733-SLE-2010;Clade IV)__AIT17154__GPCmut12 (opt1)
aggagagucccgcagucggcguccagcggcucugcuuguucgugugugugucguugcaggccuuauucaagcuuaccaugggccagaucgugaccuucuuccaggaggucccccacgugaucgaggaggugaugaacaucguccugaucgcccucagcauccuggccgugcugaaggggcucuacaacuucgcgaccugcggcaucguggggcuggucuccuuccugcuccugugcggccgcagcugcacgaccucccuguacaaggggguguacgagcuccagacccuggagcugaacauggagacccucaacaugugcaugccgcugagcugcaccaagaacaacucccaccacuacaucauggugggcaacgagaccggccuggagcucacccugacgaacaccagcaucaucaaccacaaguucugcaaccuguccgacgcccacaagaagaaccucuacgaccacgcccugaugagcaucaucuccaccuuccaccugagcauccccaacuucaaccaguacgaggccauguccugcgacuucaacgggggcaagaucagcguccaguacaaccucucccacagcuacgccggggacgcggccaaccacugcggcaccaucgccaacggggugcugcagacguucaugcggauggccuggggcggcuccuacaucgcgcuggacagcgggcgcgaccggugggacugcaucaugaccuccuaccaguaccucaucauccagaacaccaccugggaggaccacugccaguucagccgccccucccccaucggcuaccuggggcugcucagccagcggacgcgcgacaucuacaucagccggcgccugcugggcaccuucaccuggacccucuccgacagcgagggcaaggacacgcccgggggcuacugccugacccgguggaugcugaucgaggccgagcucaagugcuucgggaacaccgccguggccaagugcaacgagaagcacgacgaggaguucugcgacaugcugcgccuguucgacuucugcaagcaggccauccagcggcucaaggcggaggcccagauguccauccagcugaucaacaaggccgucaacgcccugaucaacgaccagcucaucaugaagaaccaccuccgcgacaucaugggcauccccuacugcaacuacagcaaguacugcuaccugaaccacaccacgaccgggaagaccucccugcccaagugcugccuggugagcaacggcuccuaccugaacgagacccacuucagcgacgacaucgagcagcaggccgacaacaugaucacggagaugcuccagaaggaguacauggagcggcagggcaagaccccgcuggggcugguggaccucuucgucuucuccaccagcuucuaccugaucuccaucuuccugcaccuggugaagaucccgacccaccgccacguggucggcaagagcugccccaagccccaccggcucaaccacauggggaucugcuccugcggccuguacgggcagcccggcgugccggugaaguggaagcgcugaggacuagucccuguucccagagcccacuuuuuuuucuuuuuuugaaauaaaauagccugucuuucagaucucaaaggcucuuuucagagccaccaaaaaaaaaaaaaaaaaaaaaaaaaaaaaaaaaaaaaaaaaaaaaaaaaaaaaaaaaaaaaaaaagaauu

SEQ ID NO: 40096 - RNA, 1717 nt, Artificial Sequence
  mRNA product Design a-1 (hSL-A64-N5) comprising derived and/or modified sequence from MOPV/LASV reassortant(IGS-1;Clade IV)__AFY05576__GPCmut12 (opt1)
aggagagucccgcagucggcguccagcggcucugcuuguucgugugugugucguugcaggccuuauucaagcuuaccaugggccagaucgugaccuucuuccaggaggucccccacgugaucgaggaggugaugaacaucguccugaucgcccucagcgugcuggccgugcugaaggggcucuacaacuucgcgaccugcggccuggucgggcuggugacguuccuccugcugugcggccgcuccugcaccaccagccucuacaaggggguguacgagcugcagacccuggagcucaacauggagacgcugaacaugugcaugccgcuguccugcaccaagaacaacagccaccacuacaucauggucggcaacgagaccggccucgagcugacgcugaccaacaccuccaucaucaaccacaaguucugcaaccucagcgacgcccacaagaagaaccuguacgaccacgcccugauguccaucaucagcaccuuccaccucuccauccccaacuucaaccaguacgaggccaugagcugcgacuucaacgggggcaagaucuccgugcaguacaaccugagccacuccuacgccggggacgcggccaaccacugcggcacgguggccaacgggguccugcagaccuucaugcggauggccuggggcggcagcuacaucgcgcucgacuccgggcgcggcaacugggacugcaucaugaccagcuaccaguaccugaucauccagaacaccacgugggaggaccacugccaguucucccggcccagccccaucggguaccugggccuccugucccagcgcacccgggacaucuacaucagccgccggcugcucggcaccuucaccuggacgcugagcgacuccgagggggaggacaccccgggcggguacugccugacccgcuggaugcucaucgaggccgagcugaagugcuucggcaacaccgccguggccaagugcaacgagaagcacgacgaggaguucugcgacaugcugcggcuguucgacuucugcaagcaggccauccagcgccugaaggcggaggcccagaugagcauccagcugaucaacaaggccgugaacgcccucaucaacgaccagcugaucaugaagaaccaccuccgggacaucauggggauccccuacugcaacuacuccaaguacugcuaccucaaccacacgaccaccggccgcaccagccugcccaagugcugccuggucuccaacggcagcuaccucaacgagacgcacuucuccgacgacaucgagcagcaggccgacaacaugaucaccgagaugcugcagaaggaguacauggagcggcaggggaagacgccccugggccucguggaccuguucguguucagcaccuccuucuaccugaucagcaucuuccugcaccucgucaagaucccgacccaccgccacaucguggggaaguccugccccaagccccaccggcugaaccacaugggcaucugcagcugcgggcuguacaagcagcccggcgugccggucaaguggaagcgcugaggacuagucccuguucccagagcccacuuuuuuuucuuuuuuugaaauaaaauagccugucuuucagaucucaaaggcucuuuucagagccaccaaaaaaaaaaaaaaaaaaaaaaaaaaaaaaaaaaaaaaaaaaaaaaaaaaaaaaaaaaaaaaaaagaauu

SEQ ID NO: 40097 - RNA, 1717 nt, Artificial Sequence
  mRNA product Design a-1 (hSL-A64-N5) comprising derived and/or modified sequence from LASV(LM765-SLE-2012;Clade IV)__AIT17814__GPCmut12 (opt1)
aggagagucccgcagucggcguccagcggcucugcuuguucgugugugugucguugcaggccuuauucaagcuuaccaugggccagaucgugaccuucuuccaggaggucccccacgugaucgaggaggugaugaacaucguccugaucgcccucagcauccuggccgugcugaaggggcucuacaacuucgcgaccugcggccugguggggcuggucacguuccuccugcugugcggccgcuccugcaccaccagccucuacaaggggguguacgagcugcagacccuggagcucaacauggagacgcugaacaugugcaugccgcuguccugcaccaagaacaacagccaccacuacaucauggugggcaacgagaccggccucgagcugacgcugaccaacaccuccaucaucgaccacaaguucugcaaccucagcgacgcccaccggaagaaccuguacgaccacgcccugauguccaucaucagcaccuuccaccucuccauccccaacuucaaccaguacgaggccaugagcugcgacuucaacgggggcaagaucuccguccaguacaaccugagccacuccuacgccaaggacgcggccgaccacugcgggacgguggccaacggcgugcugcagaccuucaugcgcauggccuggggcgggagcuacaucgcgcucgacuccggccgggggcgcugggacugcaucaugaccagcuaccaguaccugaucauccagaacaccacgugggaggaccacugccaguucucccggcccagccccaucggcuaccuggggcuccugucccagcgcacccgggacaucuacaucagccgccggcugcucggcaccuucaccuggacgcugagcgacuccgagggcaaggacacccccgggggcuacugccugacccgcuggaugcucaucgaggccgagcugaagugcuucgggaacaccgccgucgccaagugcaacgagaagcacgacgaggaguucugcgacaugcugcggcuguucgacuucugcaagcaggccauccagcgccugaaggcggaggcccagaugagcauccagcugaucaacaaggccgugaacgcccucaucaacgaccagcugaucaugaagaaccaccuccgggacaucaugggcauccccuacugcaacuacuccaaguacugcuaccucaaccacacgaccaccgggaagaccagccugcccaagugcugccugguguccaacggcagcuaccucaacgagacgcacuucuccgacgacaucgagcagcaggccgacaacaugaucaccgagaugcugcagaaggaguacauggagcgccagggcaagaccccgcuggggcucgucgaccuguucguguucagcaccuccuucuaccugaucagcaucuuccugcaccucgugaagaucccgacgcaccggcacaucgucggcaagcccugccccaagccccaccgccugaaccacauggggaucugcuccugcggccuguacaagcagccgggggugcccgugaaguggaagcggugaggacuagucccuguucccagagcccacuuuuuuuucuuuuuuugaaauaaaauagccugucuuucagaucucaaaggcucuuuucagagccaccaaaaaaaaaaaaaaaaaaaaaaaaaaaaaaaaaaaaaaaaaaaaaaaaaaaaaaaaaaaaaaaaagaauu

SEQ ID NO: 40098 - RNA, 1717 nt, Artificial Sequence
  mRNA product Design a-1 (hSL-A64-N5) comprising derived and/or modified sequence from LASV(LM776-SLE-2012;Clade IV)__AIT17824__GPCmut12 (opt1)
aggagagucccgcagucggcguccagcggcucugcuuguucgugugugugucguugcaggccuuauucaagcuuaccaugggccagaucgugaccuucuuccaggaggucccccacgugaucgaggaggugaugaacaucguccugaucgcccucagcauccuggccgugcugaaggggcucuacaacuucgcgaccugcggccugguggggcuggucacguuccuccugcugugcggccgcuccugcaccaccagcguguacaaggggguguacgagcuccagacccuggagcugaacauggagacgcucaacaugugcaugccgcuguccugcaccaagaacaacagccaccacuacaucauggucggcaacgagaccggccuggagcucacgcugaccaacaccuccaucaucaaccacaaguucugcaaccugagcgacgcccacaagaagaaccucuacgaccacgcccugauguccaucaucagcaccuuccaccuguccauccccaacuucaaccaguacgaggccaugagcugcgacuucaacgggggcaagaucuccgugcaguacaaccucagccacuccuacgccggggacgcggccaaccacugcggcacgguggccaacgggguccugcagaccuucaugcggauggccuggggcggcagcuacaucgcgcuggacuccgggcacggcaagugggacugcaucaugaccagcuaccaguaccucaucauccagaacaccacgugggaggaccacugccaguucucccgccccagccccaucggguaccugggccugcucucccagcggacccgcgacaucuacaucagccggcgccugcugggcaccuucaccuggacgcucagcgacuccgaggggaaggacaccccgggcggguacugccugacccgguggaugcugaucgaggccgagcucaagugcuucggcaacaccgccguggccaagugcaacgagaagcacgacgaggaguucugcgacaugcugcgccuguucgacuucugcaagcaggccauccagcggcucaaggcggaggcccagaugagcauccagcugaucaacaaggccgugaacgcccugaucaacgaccagcucaucaugaagaaccaccuccgcgacaucauggggauccccuacugcaacuacuccaaguacugcuaccugaaccacacgaccaccggcaagaccagccugcccaagugcugccuggucuccaacggcagcuaccugaacgagacgcacuucuccgacgacaucgagcagcaggccgacaacaugaucaccgagaugcuccagaaggaguacauggagcggcaggggaagacgccccugggccugguggaccucuucguguucagcaccuccuucuaccugaucagcaucuuccugcaccuggucaagaucccgacccaccgccacaucguggggaaguccugccccaagccccaccggcucaaccacaugggcaucugcagcugcgggcuguacaagcagcccggcgugccgguccgcuggaagcggugaggacuagucccuguucccagagcccacuuuuuuuucuuuuuuugaaauaaaauagccugucuuucagaucucaaaggcucuuuucagagccaccaaaaaaaaaaaaaaaaaaaaaaaaaaaaaaaaaaaaaaaaaaaaaaaaaaaaaaaaaaaaaaaaagaauu

SEQ ID NO: 40099 - RNA, 1717 nt, Artificial Sequence
  mRNA product Design a-1 (hSL-A64-N5) comprising derived and/or modified sequence from LASV(Mad39;Clade IV)__ANH09722__GPCmut12 (opt1)
aggagagucccgcagucggcguccagcggcucugcuuguucgugugugugucguugcaggccuuauucaagcuuaccaugggccagaucgugaccuucuuccaggaggucccccacgugaucgaggaggugaugaacaucguccugaucgcccucagcauccuggccgugcugaaggggcucuacaacguggcgaccugcggccugaucgggcuggucacguuccuccugcugugcggccgcuccugcaccaccacccucuacaaggggguguacgagcugcaggcccuggagcucaacauggagacgcugaacaugugcaugccgcugagcugcaccaagaacaacucccaccacuacauccgggugggcaacgagaccggccucgagcugacgcugaccaacaccagccucaucaaccacaaguucugcaaccuguccgacgcccacaagaagaaccuguacgaccacgcccucaugagcaucaucuccaccuuccaccugagcauccccaacuucaaccaguacgaggccauguccugcgacuucaacgacgggaagaucagcguccaguacaaccugucccacacguacgcgggcgacaccgccaaccacugcgggaccguggccaacggcgugcuccagaccuucaugcgcauggccuggggcgggagcuacaucgcgcuggacuccggccgcgggggcugggacugcaucaugacgagcuaccaguaccugaucauccagaacaccaccugggaggaccacugccaguucucccggcccagccccaucggguaccucggccugcugucccagcggacccgcgacaucuacaucagccggcgccuccugggcacguucaccuggacccuguccgacagcgaggggaaggacaccccgggcggguacugccucacgcgguggaugcugaucgaggccgagcugaagugcuucggcaacaccgccgucgccaagugcaacgagaagcacgacgaggaguucugcgacaugcuccgccuguucgacuucugcaagcaggccauccagcggcugaaggcggaggcccagaugagcauccagcucaucaacaaggccgugaacgcccugaucaacgaccagcugaucaugaagaaccaccuccgcgacaucauggggauccccuacugcaacuacuccaaguacugcuaccugaaccacaccgugaccggcaagacgagccugcccaagugcugccucgucuccaacggcagcuaccugaacgagacccacuucuccgacgacaucgagcagcaggccgacaacaugaucaccgagaugcugcagaaggaguacauggagcggcaggggaagacgccccucggccugguggaccuguucguguucagcaccuccuucuaccugaucagcaucuuccuccaccuggucaagaucccgacccaccgccacgugguggggaagcccugccccaagccccaccggcugaaccacaugggcaucugcuccugcggguucuacaagcagccgggcguccccgugcgcuggaagcggugaggacuagucccuguucccagagcccacuuuuuuuucuuuuuuugaaauaaaauagccugucuuucagaucucaaaggcucuuuucagagccaccaaaaaaaaaaaaaaaaaaaaaaaaaaaaaaaaaaaaaaaaaaaaaaaaaaaaaaaaaaaaaaaaagaauu

SEQ ID NO: 40100 - RNA, 1717 nt, Artificial Sequence
  mRNA product Design a-1 (hSL-A64-N5) comprising derived and/or modified sequence from LASV(Z0947-SLE-2011;Clade IV)__AIT17840__GPCmut12 (opt1)
aggagagucccgcagucggcguccagcggcucugcuuguucgugugugugucguugcaggccuuauucaagcuuaccaugggccagaucgugaccuucuuccaggaggucccccacgugaucgaggaggugaugaacaucguccugaucgcccucagcauccuggccgugcugaaggggcucuacaacuucgcgaccugcggccugguggggcuggucacguuccuccugcugugcggccgcuccugcaccaucagccucuacaaggggguguacgagcugcagacccuggagcucaacauggagacccugaacaugugcaugccgcuguccugcaccaagaacaacagccaccacuacaucauggugggcaacgagaccggccucgagcugacccugacgaacaccuccaucaucaaccacaaguucugcaaccucagcgacgcccacaagaagaaccuguacgaccacgcccugauguccaucaucagcaccuuccaccucuccauccccaacuucaaccaguacgaggccaugagcugcgacuucaacgggggcaagaucuccguccaguacaaccugagccacuccuacgccggggacgcggccaaccacugcggcaccguggccaacggggugcugcagacguucaugcggauggccuggggcggcagcuacaucgcgcucgacuccgggcgcgaccggugggacugcaucaugaccagcuaccaguaccugaucauccagaacaccaccugggaggaccacugccaguucucccgccccagccccaucggcuaccuggggcuccugucccagcggacgcgcgacaucuacaucagccggcgccugcucggcaccuucaccuggacccugagcgacuccgagggcaaggacacgcccgggggcuacugccugacccgguggaugcucaucgaggccgagcugaagugcuucgggaacaccgccgucgccaagugcaacgagaagcacgacgaggaguucugcgacaugcugcgccucuucgacuucugcaagcaggccauccagcggcugaaggcggaggcccagaugagcauccagcugaucaacaaggccgugaacgcccucaucaacgaccagcugaucaugaagaaccaccuccgcgacaucaugggcauccccuacugcaacuacuccaaguacugcuaccugaaccacaccacgaccgggaagaccagccugcccaagugcugccugguguccaacggcagcuaccucaacgagacccacuucuccgacgacaucgagcagcaggccgacaacaugaucacggagaugcugcagaaggaguacauggagcggcagggcaagaccccgcuggggcucgucgaccuguucguguucagcaccuccuucuaccugaucagcaucuuccugcaccucgugaagaucccgacccaccgccacaucgucggcaagcccugccccaagccccaccggcugaaccacauggggaucugcuccugcggccuguacaagcagccgggggugcccgugaaguggaagcgcugaggacuagucccuguucccagagcccacuuuuuuuucuuuuuuugaaauaaaauagccugucuuucagaucucaaaggcucuuuucagagccaccaaaaaaaaaaaaaaaaaaaaaaaaaaaaaaaaaaaaaaaaaaaaaaaaaaaaaaaaaaaaaaaaagaauu

SEQ ID NO: 40101 - RNA, 1717 nt, Artificial Sequence
  mRNA product Design a-1 (hSL-A64-N5) comprising derived and/or modified sequence from LASV(Josiah;Clade IV)__NP_694870__GPCmut12 (opt1)
aggagagucccgcagucggcguccagcggcucugcuuguucgugugugugucguugcaggccuuauucaagcuuaccaugggccagaucgugaccuucuuccaggaggucccccacgugaucgaggaggugaugaacaucguccugaucgcccucagcgugcuggccgugcugaaggggcucuacaacuucgcgaccugcggccuggucgggcuggugaccuuccuccugcugugcggccgcuccugcaccaccagccucuacaaggggguguacgagcugcagacccuggagcucaacauggagacgcugaacaugugcaugccgcuguccugcaccaagaacaacagccaccacuacaucauggucggcaacgagaccggccucgagcugacccugacgaacaccuccaucaucaaccacaaguucugcaaccucagcgacgcccacaagaagaaccuguacgaccacgcccugauguccaucaucagcaccuuccaccucuccauccccaacuucaaccaguacgaggccaugagcugcgacuucaacgggggcaagaucuccgugcaguacaaccugagccacuccuacgccggggacgcggccaaccacugcggcaccguggccaacgggguccugcagacguucaugcggauggccuggggcggcagcuacaucgcgcucgacuccgggcgcggcaacugggacugcaucaugaccagcuaccaguaccugaucauccagaacaccaccugggaggaccacugccaguucucccggcccagccccaucggguaccugggccuccugucccagcgcacgcgggacaucuacaucagccgccggcugcucggcaccuucaccuggacccugagcgacuccgaggggaaggacacgccgggcggguacugccugacccgcuggaugcucaucgaggccgagcugaagugcuucggcaacaccgccguggccaagugcaacgagaagcacgacgaggaguucugcgacaugcugcggcuguucgacuucugcaagcaggccauccagcgccugaaggcggaggcccagaugagcauccagcugaucaacaaggccgugaacgcccucaucaacgaccagcugaucaugaagaaccaccuccgggacaucauggggauccccuacugcaacuacuccaaguacugcuaccucaaccacaccacgaccggccgcaccagccugcccaagugcugccuggucuccaacggcagcuaccucaacgagacccacuucuccgacgacaucgagcagcaggccgacaacaugaucacggagaugcugcagaaggaguacauggagcggcaggggaagacgccccugggccugguggaccucuucguguucagcaccuccuucuaccugaucagcaucuuccugcaccucgucaagaucccgacccaccgccacaucguggggaaguccugccccaagccccaccggcugaaccacaugggcaucugcagcugcgggcuguacaagcagcccggcgugccggucaaguggaagcgcugaggacuagucccuguucccagagcccacuuuuuuuucuuuuuuugaaauaaaauagccugucuuucagaucucaaaggcucuuuucagagccaccaaaaaaaaaaaaaaaaaaaaaaaaaaaaaaaaaaaaaaaaaaaaaaaaaaaaaaaaaaaaaaaaagaauu

SEQ ID NO: 40102 - RNA, 1714 nt, Artificial Sequence
  mRNA product Design a-1 (hSL-A64-N5) comprising derived and/or modified sequence from LASV(LP;Clade I)__AAF86701__GPCmut12 (opt1)
aggagagucccgcagucggcguccagcggcucugcuuguucgugugugugucguugcaggccuuauucaagcuuaccaugggccagaucaucaccuucuuccaggaggugccccacgucaucgaggaggugaugaacaucgugcugaucgcccucagccugcuggccauccucaaggggcuguacaacaucgcgaccugcggcaucaucgggcuggucgccuuccucuuccugugcggcaaguccugcagccugacgcucaagggcggguacgagcugcagacccuggagcucaacauggagacccugaacaugugcaugccgcuguccugcaccaagaacagcucccaccacuacauccgcgugggcaacgagacggggcucgagcugacccugaccaacaccagcaucaucaaccacaaguucugcaaccucuccgacgcccacaagaagaaccuguacgaccacgcccugaugagcaucaucuccacguuccaccucagcauccccaacuucaaccaguacgaggccauguccugcgacuucaacggcgggaagaucagcgugcaguacaaccugucccacagcuacgcgggcgacgccgccgagcacugcgggaccgucgccaacggcgugcugcagaccuucaugcggauggcguggggcgggcgcuacaucgcccucgacuccggcaaggggaacugggacugcaucaugaccagcuaccaguaccugaucauccagaacacgaccugggaggaccacugccaguucucccggcccagccccaucggcuaccugggccuccugucccagcgcacccgggacaucuacaucagccgccggcugcucgggaccuucacguggacccugagcgacuccgagggcaacgagacccccgggggcuacugccugacccgcuggaugcucaucgaggccgagcugaagugcuucgggaacacggccguggccaagugcaacgagaagcacgacgaggaguucugcgacaugcugcggcuguucgacuucugcaagcaggcgauccgccggcugaaggccgaggcccagaugagcauccagcugaucaacaaggccgucaacgcccucaucaacgaccagcugaucaugaagaaccaccuccgcgacaucaugggcauccccuacugcaacuacuccaaguacugcuaccucaaccacaccagcuccggccggaccagccugcccaagugcugccugaucuccaacgggagcuaccucaacgagacccaguucuccgacgacaucgagcagcaggcggacaacaugaucacggagaugcugcagaaggaguacaucgagcgccagggcaagaccccgcuggggcugguggacaucuucaucuucagcaccuccuucuaccucaucagcaucuuccugcaccugaucaagaucccgacccaccggcacaucgugggcaagcccugccccaagccccaccgccucaaccacaugggggucugcuccugcggccuguacaagcacccgggcgugcccacgaaguggaagcggugaggacuagucccuguucccagagcccacuuuuuuuucuuuuuuugaaauaaaauagccugucuuucagaucucaaaggcucuuuucagagccaccaaaaaaaaaaaaaaaaaaaaaaaaaaaaaaaaaaaaaaaaaaaaaaaaaaaaaaaaaaaaaaaaagaauu

SEQ ID NO: 40103 - RNA, 1714 nt, Artificial Sequence
  mRNA product Design a-1 (hSL-A64-N5) comprising derived and/or modified sequence from LASV(803213;Clade II)__AAF86703__GPCmut12 (opt1)
aggagagucccgcagucggcguccagcggcucugcuuguucgugugugugucguugcaggccuuauucaagcuuaccaugggccagaucaucaccuucuuccaggaggugccccacgucaucgaggaggugaugaacaucgugcugaucgcccucagccugcuggccauccucaaggggaucuacaacgucgcgaccugcggccuguucgggcugaucuccuuccuccugcugugcggccgcagcugcuccgugacguacaaggggguguacgagcuccagacccuggagcugaacauggccaaccucaacaugugcaugccgcugagcugcaccaagaacaacucccaccacuacaucauggucggcaacgagaccggccuggagcucacgcugaccaacaccagcaucaucaaccacaaguucugcaaccuguccgacgcccacaagaagaaccucuacgaccacgcccugaugagcaucaucuccaccuuccaccugagcauccccaacuucaaccaguacgaggccauguccugcgacuucaacgggggcaagaucagcgugcaguacaaccucucccacagcuucgcgguggacgccgccaaccacugcgggacgaucgccaacggcguccugcagaccuucaugcggauggcguggggcggguccuacaucgcccuggacagcggcaaggggaacugggacugcaucaugaccuccuaccaguaccucaucauccagaacaccacgugggaggaccacugccaguucagccgccccucccccaucggcuaccuggggcugcucagccagcggacccgcgacaucuacaucagccggcgccugcugggcaccuucaccuggacgcucuccgacagcgagggcaacgaggcccccgggggcuacugccugacccgguggaugcugaucgaggccgagcucaagugcuucgggaacaccgccguggcgaagugcaacgagaagcacgacgaggaguucugcgacaugcugcgccuguucgacuucugcaagcaggccaucaagcggcucaagaccgaggcccagauguccauccagcugaucaacaaggccgugaacgcccugaucaacgaccagcucaucaugaagaaccaccuccgcgacaucaugggcauccccuacugcaacuacagccgguacugcuaccugaaccacacggucaccgggaagaccucccugccccgcugcugccuggugagcaacggcuccuaccugaacgagacccacuucagcgacgacaucgagcagcaggcggacaacaugaucacggagaugcuccagaaggaguacauggaccggcagggcaagaccccgcuggggcugguggaccuguucgucuucuccaccagcuucuaccucaucuccaucuuccugcaccuggugaagaucccgacccaccgccacaucgugggcaagcccugccccaagccccaccggcucaaccacauggggaucugcagcugcggccuguacaagcacccggggguccccgugaaguggaagcgcugaggacuagucccuguucccagagcccacuuuuuuuucuuuuuuugaaauaaaauagccugucuuucagaucucaaaggcucuuuucagagccaccaaaaaaaaaaaaaaaaaaaaaaaaaaaaaaaaaaaaaaaaaaaaaaaaaaaaaaaaaaaaaaaaagaauu

SEQ ID NO: 40104 - RNA, 1714 nt, Artificial Sequence
  mRNA product Design a-1 (hSL-A64-N5) comprising derived and/or modified sequence from LASV(GA391;Clade III)__CAA36645__GPCmut12 (opt1)
aggagagucccgcagucggcguccagcggcucugcuuguucgugugugugucguugcaggccuuauucaagcuuaccaugggccagaucgugaccuucuuccaggaggucccccacgugaucgaggaggugaugaacaucguccugaucgcccucagcauccuggccauccugaaggggcucuacaacguggcgaccugcggccugaucgggcuggugaccuuccuccugcuguccggccgcagcugcucccucaucuacaaggggaccuacgagcugcagacccuggagcucaacauggagacccugaacaugugcaugccgcugagcugcacgaagaacaacucccaccacuacauccgggucggcaacgagaccggccucgagcugacccugaccaacacgagcauccucaaccacaaguucugcaaccuguccgacgcccacaagcgcaaccuguacgaccacagccucauguccaucaucagcaccuuccaccuguccauccccaacuucaaccaguacgaggccaugagcugcgacuucaacgggggcaagaucaccgugcaguacaaccugucccacagcuucgccguggacgccgcggggcacugcggcacccucgccaacgggguccugcagacguucaugcggauggccuggggcggcuccuacaucgcccuggacagcgggcgcggcaacugggacugcaucaugaccuccuaccaguaccucaucauccagaacaccaccugggacgaccacugccaguucagccggcccucccccaucggguaccugggccugcucagccagcgcacgcgggacaucuacaucagccgccggcugcugggcaccuucaccuggacccucuccgacagcgaggggaacgagacgccgggcggguacugccugacccgcuggaugcugaucgaggcggagcucaagugcuucggcaacaccgccguggccaagugcaacgagaagcacgacgaggaguucugcgacaugcugcggcuguucgacuucugcaagcaggccauccgccggcucaagaccgaggcccagauguccauccagcugaucaacaaggcggugaacgcccugaucaacgaccagcucaucaugaagaaccaccuccgcgacaucauggggauccccuacugcaacuacagccgguacugcuaccugaaccacacguccaccggcaagaccagccugccccgcugcugccugaucuccaacggcagcuaccugaacgagaccaaguucuccgacgacaucgagcagcaggccgacaacaugaucacggagaugcugcagaaggaguacaucgaccggcaggggaagacgccccucggccuggucgaccuguucguguucagcaccuccuucuaccucaucagcaucuuccugcaccuggugaagaucccgacccaccgccacaucgucgggaagcccugccccaagccccaccggcucaaccacaugggcaucugcuccugcgggcuguacaagcagccgggcgugcccgugcgcuggaagcggugaggacuagucccuguucccagagcccacuuuuuuuucuuuuuuugaaauaaaauagccugucuuucagaucucaaaggcucuuuucagagccaccaaaaaaaaaaaaaaaaaaaaaaaaaaaaaaaaaaaaaaaaaaaaaaaaaaaaaaaaaaaaaaaaagaauu

SEQ ID NO: 40105 - RNA, 1717 nt, Artificial Sequence
  mRNA product Design a-1 (hSL-A64-N5) comprising derived and/or modified sequence from LASV(AV;Clade V)__CCA30314__GPCmut12 (opt1)
aggagagucccgcagucggcguccagcggcucugcuuguucgugugugugucguugcaggccuuauucaagcuuaccaugggccagaucgugaccuucuuccaggaggucccccacgugaucgaggaggugaugaacaucguccugaucgcccucagcauccuggccgugcugaaggggcucuacaacaucgcgaccugcggccugaucgggcugaucacguuccuccugcugugcggccgcuccugcagcuccaaccucuacaaggggguguacgagcugcagagccuggaccucaacauggagacccugaacaugugcaugccgcuguccugcaccaagaacaacagccaccacuacauccgggucggcaacgacaccggccucgagcugacgcugaccaacaccuccauccucaaccacaaguucugcaaccugagcgacgcccacaagaaggaccuguacgaccacgcccucauguccaucaucagcaccuuccaccuguccauccccaacuucaaccaguacgaggccaugagcugcgacuucaacgggggcaagaucuccgugcaguacaaccugagccacuccuacgccaucgacgcggccaaccacugcgggacgguggccaacggcauccuccagaccuucaugcgcauggccuggggcgggagcuacaucgcgcuggacuccggccgggggaacugggacugcaucaugaccagcuaccaguaccugaucauccagaacaccacgugggagaaccacugccaguucucccgccccagccccaucggcuaccucgggcugcugagccagcggacccgcgacaucuacaucucccggcgccuccugggcaccuucaccuggacgcugagcgacuccgagggcaacgccacccccgggggcuacugccucacccgguggaugcugaucgaggccgagcugaagugcuucgggaacaccgccgucgccaagugcaacgagaagcacgacgaggaguucugcgacaugcuccgccuguucgacuucugcaagcaggcgaucagccggcugaaguccgaggcccagaugagcauccagcucaucaacaaggccgugaacgcccugaucaacgaccagcugaucaugaagaaccaccuccgcgacaucaugggcauccccuacugcaacuacuccaaguacugcuaccugaaccacacgaucaccgggaagaccagccugcccaagugcugccucguguccaacggcagcuaccugaacgagacccacuucuccgacgacaucgagcagcaggccgacaacaugaucacggagaugcugcagaaggaguacauggagcggcagggcaagaccccgcuggggcucgucgaccuguucguguucagcaccuccuucuaccugaucagcaucuuccuccgccuggugaagaucccgacccaccggcacaucgucggcaagcccugccccaagccccaccgccugaaccacauggggaucugcuccugcggccucuacaagcagccgggggugcccgugcgguggaagcgcugaggacuagucccuguucccagagcccacuuuuuuuucuuuuuuugaaauaaaauagccugucuuucagaucucaaaggcucuuuucagagccaccaaaaaaaaaaaaaaaaaaaaaaaaaaaaaaaaaaaaaaaaaaaaaaaaaaaaaaaaaaaaaaaaagaauu

SEQ ID NO: 40106 - RNA, 1714 nt, Artificial Sequence
  mRNA product Design a-1 (hSL-A64-N5) comprising derived and/or modified sequence from LASV(Togo/2016/7082;Clade VI)__AMR44577__GPCmut12 (opt1)
aggagagucccgcagucggcguccagcggcucugcuuguucgugugugugucguugcaggccuuauucaagcuuaccaugggccagaucaucaccuucuuccaggaggugccccacgucaucgaggaggugaugaacaucgugcugaucgcccucagccugcuggccauccucaagggggucuacaacguggcgaccugcggcaucaucgggcuggugacguuccuguuccucugcggccgcuccugcagccugaucuacaagggguccuacgagcugcagacccucgagcugaacauggagacccugaacaugugcaugccgcucagcugcaccaagaacuccagccaccacuacauccgggucggcaacgagacgggccuggagcugacccucaccaacaccuccaucaucaaccacaaguucugcaaccugagcgacgcccacaagcgcaaccuguacgaccacgcccucauguccauccugagcacguuccaccuguccauccccaacuucaaccaguacgaggccaugagcugcgacuucaacgggggcaagaucuccgugcaguacaaccucagccacgccuacgcgguggacgccgccgagcacugcgggaccgucgccaacggcgugcugcagaccuucaugcggauggcguggggcggguccuacaucgcccuggacagcggccgcgggaacugggacugcaucaugaccuccuaccaguaccucaucauccagaacacgaccugggaggaccacugccaguucagccggcccucccccaucggcuaccuggggcugcucagccagcgcacccgggacaucuacaucagccgccggcugcugggcaccuucacguggacccucuccgacagcgagggcaacgagacccccgggggcuacugccugacccgcuggaugcugaucgaggccgagcucaagugcuucgggaacacggccguggccaagugcaacgagaagcacgacgaggaguucugcgacaugcugcggcuguucgacuucugcaagcaggcgauccagcgccucaaguccgaggcccagaugagcauccagcugaucaacaaggccgucaacgcccugaucaacgaccagcucaucaugaagaaccaccuccgggacaugaugggcauccccuacugcaacuacuccaaguacugcuaccugaaccacaccagcuccgggcgcaccagccugcccaagugcugccugguguccaacggcagcuaccugaacgagacccacuucuccgacgacaucgagcagcaggccgacaacaugaucacggagaugcuccagaaggaguacaucgaccggcagggcaagaccccgcuggggcugguggaccuguucgucuucagcaccuccuucuaccucaucagcaucuuccugcaccugaucaagaucccgacccaccgccacaucgugggcaagcccugccccaagccccaccggcucaaccacauggggaucugcuccugcggccuguacaagcagccgggggugcccacgcgcuggaagcggugaggacuagucccuguucccagagcccacuuuuuuuucuuuuuuugaaauaaaauagccugucuuucagaucucaaaggcucuuuucagagccaccaaaaaaaaaaaaaaaaaaaaaaaaaaaaaaaaaaaaaaaaaaaaaaaaaaaaaaaaaaaaaaaaagaauu

SEQ ID NO: 40107 - RNA, 1714 nt, Artificial Sequence
  mRNA product Design a-1 (hSL-A64-N5) comprising derived and/or modified sequence from LASV(KAK-428;Clade n.d. (VII))__ANH09740__GPCmut12 (opt1)
aggagagucccgcagucggcguccagcggcucugcuuguucgugugugugucguugcaggccuuauucaagcuuaccaugggccagaucgugaccuucuuccaggaggucccccacgugaucgaggaggugaugaacaucguccugaucgcccucagccugcuggccauccucaaggggcuguacaacuucgcgaccugcggcgugaucgggcugaucacguuccuccugcugugcggccgcuccugcagcgccaccuacaaggggcaguacgagcuccagacccuggagcugaacauggagucccucaacaugugcaugccgcugagcugcaccaagaacaacucccaccacuacauccgggccggcaacaacacgggccuggagcucacccugaccaacaccagcaucaucucccacaaguucugcaaccugagcgacgcccacaagaagaaccucuacgaccacacgcugauguccaucaucaccaccuuccaccugagcauccccaacuucaaccaguacgaggccauguccugcgacuucaacgggggcaagaucagcauccaguacaaccucucccacagcuacgcgggggacgccgcccagcacugcggcaccguggccaacgggguccugcagacguucaugcgcauggcguggggcggcuccuaccuggcccucgacagcgggcggcgcggcugggacugcaucaucuccagcuaccaguaccugaucauccagaacaccaccugggacgaccacugccaguucucccggcccagccccaucggguaccugggcuucgugagccagaagacccgcgacaucuacaucucccggcgccuccugggcacguucaccuggacccugagcgacuccgaggggcacgacaugccgggcggguacugccucacccgguggaugcugaucgaggccgaccugaagugcuucggcaacacggccguggccaagugcaacgagaagcacgacgaggaguucugcgacauguggcgccucuucgacuucugcaagcaggcgauccagcggcugaaggccgaggcccagaugaacauccagcugaucaacaaggccgucaacgcccucaucaacgaccagcugaugaugaagaaccaccuccgcgacaucauggggauccccuacugcaacuacagcaaguucugcuaccugaacaacaccaccaccggccggacgucccugccccgcugcugccugaucagcaacggcuccuaccucaacgagacccacuucagcgacgacaucgagcagcaggcggacaacaugaucaccgagaugcugcagaaggaguacauggaccggcaggggaagacgccccugggccucguggaccuguucguguucuccaccagcuucuaccugaucaccaucuuccugcaccucgucaagaucccgacccaccgccacaucguggggaagcccugccccaagccccaccggcugaaccacaugggcaucugcuccugcgggcuguacaagcagccgggcgugcccguccgcuggaagcggugaggacuagucccuguucccagagcccacuuuuuuuucuuuuuuugaaauaaaauagccugucuuucagaucucaaaggcucuuuucagagccaccaaaaaaaaaaaaaaaaaaaaaaaaaaaaaaaaaaaaaaaaaaaaaaaaaaaaaaaaaaaaaaaaagaauu

SEQ ID NO: 40108 - RNA, 1714 nt, Artificial Sequence; identical to SEQ ID NO: 40102
  mRNA product Design a-1 (hSL-A64-N5) comprising derived and/or modified sequence from LASV(Pinneo-NIG-1969;Clade I)__AIT17836__GPCmut12 (opt1)

SEQ ID NO: 40109 - RNA, 1714 nt, Artificial Sequence
  mRNA product Design a-1 (hSL-A64-N5) comprising derived and/or modified sequence from LASV(ISTH0009-NIG-2011;Clade II)__AIT17404__GPCmut12 (opt1)
aggagagucccgcagucggcguccagcggcucugcuuguucgugugugugucguugcaggccuuauucaagcuuaccaugggccagaucaucaccuucuuccaggaggugccccacgucaucgaggaggugaugaacaucgugcugaucgcccucagccugcuggccauccucaaggggaucuacaacgucgcgaccugcggccuguucgggcugguguccuuccuccugcugugcggccgcagcugcuccacgaccuacaaggggguguacgagcuccagacccuggagcuggacauggccagccucaacaugugcaugccgcuguccugcaccaagaacaacagccaccacuacaucauggucggcaacgagacgggccuggagcucacccugaccaacaccuccaucaucaaccacaaguucugcaaccugagcgacgcccacaagaagaaccucuacgaccacgcccugauguccaucaucagcacguuccaccuguccauccccaacuucaaccaguacgaggccaugagcugcgacuucaacgggggcaagaucuccgugcaguacaaccucagccacgcguacgccguggacgccgccaaccacugcgggaccaucgcgaacggcguccugcagaccuucaugcggauggccuggggcggguccuacaucgcccuggacagcggcaagggguccugggacugcaucaugaccagcuaccaguaccucaucauccagaacacgaccugggaggaccacugccaguucucccgccccagccccaucggcuaccuggggcugcucagccagcggacccgcgacaucuacaucucccggcgccugcugggcaccuucacguggacccucagcgacuccgagggcaacgagacccccgggggcuacugccugacccgguggaugcugaucgaggccgagcucaagugcuucgggaacacggccguggcgaagugcaacgagaagcacgacgaggaguucugcgacaugcugcgccuguucgacuucugcaagcaggccauccggcgccucaagaccgaggcccagaugagcauccagcugaucaacaaggccgugaacgcccugaucaacgaccagcucaucaugaagaaccaccuccgggacaucaugggcauccccuacugcaacuacuccaaguacugcuaccugaaccacaccgucaccgggaagacgagccugccccgcugcugccugguguccaacggcagcuaccugaacgagacccacuucuccgacgacaucgagcagcaggcggacaacaugaucaccgagcuccugcagaaggaguacauggaccggcagggcaagaccccgcuggggcugguggaccucuucgucuucagcacguccuucuaccugaucagcaucuuccugcaccucaucaagaucccgacccaccgccacaucaccggcaagcccugccccaagccccaccggcugaaccacauggggaucugcuccugcggccuguacaagcacccgggggugcccgugaaguggaagcgcugaggacuagucccuguucccagagcccacuuuuuuuucuuuuuuugaaauaaaauagccugucuuucagaucucaaaggcucuuuucagagccaccaaaaaaaaaaaaaaaaaaaaaaaaaaaaaaaaaaaaaaaaaaaaaaaaaaaaaaaaaaaaaaaaagaauu

SEQ ID NO: 40110 - RNA, 1714 nt, Artificial Sequence
  mRNA product Design a-1 (hSL-A64-N5) comprising derived and/or modified sequence from LASV(ISTH2010-NIG-2012;Clade II)__AIT17482__GPCmut12 (opt1)
aggagagucccgcagucggcguccagcggcucugcuuguucgugugugugucguugcaggccuuauucaagcuuaccaugggccagaucaucaccuucuuccaggaggugccccacgucaucgaggaggugaugaacaucgugcugaucgcccucagccugcuggccauccucaaggggaucuacaacgucgcgaccugcggccuguucgggcugguguccuuccuccugcugugcggccgcagcugcuccacgaccuacaaggggguguacgagcuccagacccuggagcuggacauggccagccucaacaugugcaugccgcuguccugcaccaagaacaacagccaccacuacaucauggucggcaacgagacgggccuggagcucacccugaccaacaccuccaucaucaaccacaaguucugcaaccugagcgacgcccacaagaagaaccucuacgaccacgcccugauguccaucaucagcacguuccaccuguccauccccaacuucaaccaguacgaggccaugagcugcgacuucaacgggggcaagaucuccgugcaguacaaccucagccacgcguacgccguggacgccgccaaccacugcgggaccaucgcgaacggcguccugcagaccuucaugcggauggccuggggcggguccuacaucgcccuggacagcggcaagggguccugggacugcaucaugaccagcuaccaguaccucaucauccagaacaucacgugggaggaccacugccaguucucccgccccagccccaucggcuaccuggggcugcucagccagcggacccgcgacaucuacaucucccggcgccugcugggcaccuucaccuggacgcucagcgacuccgagggcaacgagacccccgggggcuacugccugacccgguggaugcugaucgaggccgagcucaagugcuucgggaacaccgccguggcgaagugcaacgagaagcacgacgaggaguucugcgacaugcugcgccuguucgacuucugcaagcaggccauccggcgccucaagacggaggcccagaugagcauccagcugaucaacaaggccgugaacgcccugaucaacgaccagcucaucaugaagaaccaccuccgggacaucaugggcauccccuacugcaacuacuccaaguacugcuaccugaaccacaccgucaccgggaagaccagccugccccgcugcugccugguguccaacggcagcuaccugaacgagacgcacuucuccgacgacaucgagcagcaggcggacaacaugaucaccgagcuccugcagaaggaguacaucgaccggcagggcaagaccccgcuggggcugguggaccucuucgucuucagcaccuccuucuaccugaucagcaucuuccugcaccucgugaagaucccgacgcaccgccacguggucggcaagcccugccccaagccccaccggcugaaccacauggggaucugcuccugcggccuguacaagcacccgggggugcccgugaaguggaagcgcugaggacuagucccuguucccagagcccacuuuuuuuucuuuuuuugaaauaaaauagccugucuuucagaucucaaaggcucuuuucagagccaccaaaaaaaaaaaaaaaaaaaaaaaaaaaaaaaaaaaaaaaaaaaaaaaaaaaaaaaaaaaaaaaaagaauu

SEQ ID NO: 40111 - RNA, 1714 nt, Artificial Sequence
  mRNA product Design a-1 (hSL-A64-N5) comprising derived and/or modified sequence from LASV(Lassa virus/H.sapiens-wt/NGA/2015/ISTH_0543;Clade II)__AVO03639__GPCmut12 (opt1)
aggagagucccgcagucggcguccagcggcucugcuuguucgugugugugucguugcaggccuuauucaagcuuaccaugggccagaucaucaccuucuuccaggaggugccccacgucaucgaggaggugaugaacaucgugcugaucgcccucagccugcuggccauccucaaggggaucuacaacgucgcgaccugcggccuguucgggcugguguccuuccuccugcugugcggccgcagcugcuccacgaccuacaaggggguguacgagcuccagacccuggagcuggacauggccaaccucaacaugugcaugccgcugagcugcaccaagaacaacucccaccacuacaucauggucggcaacgagacgggccuggagcucacccugaccaacaccagcaucaucaaccacaaguucugcaaccuguccgacgcccacaagaagaaccucuacgaccacgcccugaugagcaucaucuccacguuccaccugagcauccccaacuucaaccaguacgaggccauguccugcgacuucaacgggggcaagaucagcgugcaguacaaccucucccacaccuacgcgguggacgccgccaaccacugcgggaccaucgccaacggcguccugcagaccuucaugcggauggcguggggcgggagcuacaucgcccuggacuccggcaaggggagcugggacugcaucaugacguccuaccaguaccucgugauccagaacaccaccugggaggaccacugccaguucagccgccccucccccaucggcuaccuggggcugcucagccagcggacccgcgacaucuacaucagccggcgccugcugggcacguucaccuggacccucuccgacagcgagggcaacgagacccccgggggcuacugccugacgcgguggaugcugaucgaggccgagcucaagugcuucgggaacaccgccguggccaagugcaacgagaagcacgacgaggaguucugcgacaugcugcgccuguucgacuucugcaagcaggcgauccggcgccucaagaccgaggcccagauguccauccagcugaucaacaaggccgucaacgcccugaucaacgaccagcucaucaugaagaaccaccuccgggacaucaugggcaucccguacugcaacuacagcaaguacugcuaccugaaccacaccgugacggggaagaccucccugccccgcugcugccuggugagcaacggcuccuaccugaacgagacccacuucagcgacgacaucgagcagcaggccgacaacaugaucaccgagcuccugcagaaggaguacaucgaccggcagggcaagacgccccuggggcuggucgaccucuucguguucuccaccagcuucuaccugaucuccaucuuccugcaccucgugaagaucccgacccaccgccacaucaccggcaagcccugccccaagccccaccggcugaaccacauggggaucugcagcugcggccuguacaagcacccggggguccccgugaaguggaagcgcugaggacuagucccuguucccagagcccacuuuuuuuucuuuuuuugaaauaaaauagccugucuuucagaucucaaaggcucuuuucagagccaccaaaaaaaaaaaaaaaaaaaaaaaaaaaaaaaaaaaaaaaaaaaaaaaaaaaaaaaaaaaaaaaaagaauu

SEQ ID NO: 40112 - RNA, 1714 nt, Artificial Sequence
  mRNA product Design a-1 (hSL-A64-N5) comprising derived and/or modified sequence from LASV(Lassa virus/H.sapiens-wt/NGA/2016/ISTH_0009;Clade II)__AVO03571__GPCmut12 (opt1)
aggagagucccgcagucggcguccagcggcucugcuuguucgugugugugucguugcaggccuuauucaagcuuaccaugggccagaucaucaccuucuuccaggaggugccccacgucaucgaggaggugaugaacaucgugcugaucgcccucagccugcuggccauccucaaggggaucuacaacgucgcgaccugcggccugcuggggcucguguccuuccugcugcucugcggccgcagcugcuccacgaccuacaaggggguguacgagcugcagacccuggagcucgacauggccagccugaacaugugcaugccgcuguccugcaccaagaacaacagccaccacuacaucauggucggcaacgagacgggccucgagcugacccugaccaacaccuccaucaucaaccacaaguucugcaaccucagcgacgcccacaagaagaaccuguacgaccacgcccugauguccaucaucagcacguuccaccucuccauccccaacuucaaccaguacgaggccaugagcugcgacuucaacgggggccggaucuccgugcaguacaaccugagccacuccuacgcgguggacgccgccaaccacugcgggaccaucgccaacggcguccugcagaccuucaugcgcauggcguggggcgggagcuacaucgcccucgacuccggcaaggggagcugggacugcaucaugaccuccuaccaguaccugaucauccagaacacgaccugggaggaccacugccaguucagccggcccagccccaucggcuaccuggggcuccugucccagcgcacccgggacaucuacaucagccgccggcugcucggcaccuucacguggacccuguccgacagcgagggcaacgagacccccgggggcuacugccugacccgcuggaugcucaucgaggccgagcugaagugcuucgggaacacggccguggccaagugcaacgagaagcacgacgaggaguucugcgacaugcugcggcuguucgacuucugcaagcaggcgauccgccggcugaagaccgaggcccagauguccauccagcugaucaacaaggccgugaacgcccucaucaacgaccagcugaucaugaagaaccaccuccgcgacaucaugggcauccccuacugcaacuacagcaaguacugcuaccucaaccacaccgucaccgggaagacgucccugccccggugcugccuggugagcaacggcuccuaccucaacgagacccacuucagcgacgacaucgagcagcaggccgacaacaugaucaccgagcugcugcagaaggaguacaucgaccgccagggcaagaccccgcuggggcucguggaccuguucgucuucuccacgagcuucuaccugaucuccaucuuccuccaccuggugaagaucccgacccaccggcacaucaccggcaagcccugccccaagccccaccgccugaaccacauggggaucugcagcugcggccucuacaaccacccgggggugcccgucaaguggaagcggugaggacuagucccuguucccagagcccacuuuuuuuucuuuuuuugaaauaaaauagccugucuuucagaucucaaaggcucuuuucagagccaccaaaaaaaaaaaaaaaaaaaaaaaaaaaaaaaaaaaaaaaaaaaaaaaaaaaaaaaaaaaaaaaaagaauu

SEQ ID NO: 40113 - RNA, 1714 nt, Artificial Sequence
  mRNA product Design a-1 (hSL-A64-N5) comprising derived and/or modified sequence from LASV(Lassa virus/H.sapiens-wt/NGA/2016/ISTH_0017;Clade II)__AVO03567__GPCmut12 (opt1)
aggagagucccgcagucggcguccagcggcucugcuuguucgugugugugucguugcaggccuuauucaagcuuaccaugggccagaucaucaccuucuuccaggaggugccccacgucaucgaggaggugaugaacaucgugcugaucgcccucagccugcuggccauccucaaggggaucuacaacgucgcgaccugcggccuguucgggcugguguccuuccuccugcugugcggccgcagcugcuccacgaccuacaaggggguguacgagcuccagacccuggagcuggacauggccagccucaacaugugcaugccgcuguccugcaccaagaacaacagccaccacuacaucauggucggcaacgagacgggccuggagcucacccugaccaacaccuccaucaucaaccacaaguucugcaaccugagcgacgcccacaagaagaaccucuacgaccacgcccugauguccaucaucagcacguuccaccuguccauccccaacuucaaccaguacgaggccaugagcugcgacuucaacgggggcaagaucuccgugcaguacaaccucagccacaccuacgcgaucgacgccgccaaccacugcgggaccaucgccaacggcgugcugcagaccuucaugcggauggcguggggcggguccuacaucgcccuggacagcggcaagggguccugggacugcaucaugacgagcuaccaguaccucaucauccagaacaccaccugggaggaccacugccaguucucccgccccagccccaucggcuaccuggggcugcucagccagcggacccgcgacaucuacaucucccggcgccugcugggcacguucaccuggacccucagcgacuccgagggcaacgagacccccgggggcuacugccugacgcgguggaugcugaucgaggccgagcucaagugcuucgggaacaccgccgucgccaagugcaacgagaagcacgacgaggaguucugcgacaugcugcgccuguucgacuucugcaagcaggcgauccggcgccucaagaccgaggcccagaugagcauccagcugaucaacaaggccgugaacgcccugaucaacgaccagcucaucaugaagaaccaccuccgggacaucaugggcaucccguacugcaacuacuccaaguacugcuaccugaaccacaccgugacggggaagaccagccugccccgcugcugccuggucuccaacggcagcuaccugaacgagacccacuucuccgacgacaucgagcagcaggccgacaacaugaucaccgagcuccugcagaaggaguacauggaccggcagggcaagacgccccuggggcugguggaccucuucguguucagcaccuccuucuaccugaucagcaucuuccugcaccucguccgcaucccgacccaccggcacgugaucggcaagcccugccccaagccccaccgccugaaccacauggggaucugcuccugcggccuguacaagcacccgggggugcccgucaaguggaagcggugaggacuagucccuguucccagagcccacuuuuuuuucuuuuuuugaaauaaaauagccugucuuucagaucucaaaggcucuuuucagagccaccaaaaaaaaaaaaaaaaaaaaaaaaaaaaaaaaaaaaaaaaaaaaaaaaaaaaaaaaaaaaaaaaagaauu

SEQ ID NO: 40114 - RNA, 1714 nt, Artificial Sequence
  mRNA product Design a-1 (hSL-A64-N5) comprising derived and/or modified sequence from LASV(Lassa virus/H.sapiens-wt/NGA/2018/ISTH_0959;Clade II)__AVV65099__GPCmut12 (opt1)
aggagagucccgcagucggcguccagcggcucugcuuguucgugugugugucguugcaggccuuauucaagcuuaccaugggccagaucaucaccuucuuccaggaggugccccacgucaucgaggaggugaugaacaucgugcugaucgcccucagccugcuggccauccucaaggggaucuacaacgucgugaccugcggccuguucgggcugguguccuuccuccugcugugcggccgcagcugcuccacgaccuacaagggggucuacgagcuccagacccuggagcuggacauggcgagccucaacaugugcaugccgcuguccugcaccaagaacaacagccaccacuacaucauggugggcaacgagacgggccuggagcucacccugaccaacaccuccaucaucaaccacaaguucugcaaccugagcgacgcccacaagaagaaccucuacgaccacgcccugauguccaucaucagcacguuccaccuguccauccccaacuucaaccaguacgaggccaugagcugcgacuucaacgggggcaagaucuccgugcaguacaaccucagccacgccuacgcgaucgacgccgccaaccacugcgggaccaucgccaacggcguccugcagaccuucaugcggauggcguggggcggguccuacaucgcccuggacagcggcaagggguccugggacugcaucaugaccagcuaccaguaccucaucauccagaacacgaccugggaggaccacugccaguucucccgccccagccccaucggcuaccuggggcugcucagccagcggacccgcgacaucuacaucucccggcgccugcugggcaccuucacguggacccucagcgacuccgagggcaacgagacccccgggggcuacugccugacccgguggaugcugaucgaggccgagcucaagugcuucgggaacacggccguggccaagugcaacgagaagcacgacgaggaguucugcgacaugcugcgccuguucgacuucugcaagcaggcgauccggcgccucaagaccgaggcccagaugagcauccagcugaucaacaaggccgugaacgcccugaucaacgaccagcucaucaugaagaaccaccuccgggacaucaugggcauccccuacugcaacuacuccaaguacugcuaccugaaccacaccgucaccgggaagacgagccugccccgcugcugccugguguccaacggcagcuaccugaacgagacccacuucuccgacgacaucgagcagcaggccgacaacaugaucaccgagcuccugcagaaggaguacaucgaccggcagggcaagaccccgcuggggcugguggaccucuucgucuucagcacguccuucuaccugaucagcaucuuccugcaccucgugaagaucccgacccaccgccacgugaucggcaagcccugccccaagccccaccggcugaaccacauggggaucugcuccugcggccuguacaagcacccggggguccccgugaaguggaagcgcugaggacuagucccuguucccagagcccacuuuuuuuucuuuuuuugaaauaaaauagccugucuuucagaucucaaaggcucuuuucagagccaccaaaaaaaaaaaaaaaaaaaaaaaaaaaaaaaaaaaaaaaaaaaaaaaaaaaaaaaaaaaaaaaaagaauu

SEQ ID NO: 40115 - RNA, 1714 nt, Artificial Sequence
  mRNA product Design a-1 (hSL-A64-N5) comprising derived and/or modified sequence from LASV(LASV003-NIG-2008;Clade II)__AIT17580__GPCmut12 (opt1)
aggagagucccgcagucggcguccagcggcucugcuuguucgugugugugucguugcaggccuuauucaagcuuaccaugggccagaucaucaccuucuuccaggaggugccccacgucaucgaggaggugaugaacaucgugcugaucgcccucagccugcuggccauccucaaggggaucuacaacgucgcgaccugcggccuguucgggcugguguccuuccuccugcugugcggccgcagcugcuccacgaccuacaaggggguguacgagcuccagacccuggagcuggacauggccagccucaacaugugcaugccgcuguccugcaccaagaacaacagccaccacuacaucauggucggcaacgagacgggccuggagcucacccugaccaacaccuccaucaucaaccacaaguucugcaaccugagcgacgcccacaagaagaaccucuacgaccacgcccugauguccaucaucagcacguuccaccuguccauccccaacuucaaccaguacgaggccaugagcugcgacuucaacgggggcaagaucuccgugcaguacaaccucagccacaccuacgcgguggacgccgccaaccacugcgggaccaucgccaacggcguccugcagaccuucaugcggauggcguggggcggguccuacaucgcccuggacagcggcaagggguccugggacugcaucaugacgagcuaccaguaccucaucauccagaacaccaccugggaggaccacugccaguucucccgccccagccccaucggcuaccuggggcugcucagccagcggacccgcgacaucuacaucucccggcgccugcugggcacguucaccuggacccucagcgacuccgagagcaacgagaccccgggcggguacugccugacgcgguggaugcugaucgaggccgagcucaagugcuucggcaacaccgccguggccaagugcaacgagaagcacgacgaggaguucugcgacaugcugcgccuguucgacuucugcaagcaggcgauccggcgccucaaggccgaggcccagauguccauccagcugaucaacaaggccgugaacgcccugaucaacgaccagcucaucaugaagaaccaccuccgggacaucauggggauccccuacugcaacuacagcaaguacugcuaccugaaccacaccgucaccggccgcacgucccugccccggugcugccuggugagcaacggguccuaccugaacgagacccacuucagcgacgacaucgagcagcaggcggacaacaugaucaccgagcuccugcagaaggaguacauggaccgccagggcaagacgccccugggccugguggaccucuucgucuucuccaccagcuucuaccugaucuccaucuuccugcaccucgugaagaucccgacccaccggcacgugaucgggaagcccugccccaagccccaccgccugaaccacaugggcaucugcagcugcgggcuguacaagcacccgggcguccccgugaaguggaagcggugaggacuagucccuguucccagagcccacuuuuuuuucuuuuuuugaaauaaaauagccugucuuucagaucucaaaggcucuuuucagagccaccaaaaaaaaaaaaaaaaaaaaaaaaaaaaaaaaaaaaaaaaaaaaaaaaaaaaaaaaaaaaaaaaagaauu

SEQ ID NO: 40116 - RNA, 1714 nt, Artificial Sequence
  mRNA product Design a-1 (hSL-A64-N5) comprising derived and/or modified sequence from LASV(LASV035-NIG-2009;Clade II)__AIT17588__GPCmut12 (opt1)
aggagagucccgcagucggcguccagcggcucugcuuguucgugugugugucguugcaggccuuauucaagcuuaccaugggccagaucaucaccuucuuccaggaggugccccacgucaucgaggaggugaugaacaucgugcugaucgcccucagccugcuggccauccucaaggggaucuacaacgucgcgaccugcggccuguucgggcugguguccuuccuccugcugugcggccgcagcugcuccacgaccuacaaggggguguacgagcuccagacccuggagcuggacauggccagccucaacaugugcaugccgcuguccugcaccaagaacaacagccaccacuacaucauggucggcaacgagacgggccuggagcucacccugaccaacaccuccaucaucaaccacaaguucugcaaccugagcgacgcccacaagaagaaccucuacgaccacgcccugauguccaucaucagcacguuccaccuguccauccccaacuucaaccaguacgaggccaugagcugcgacuucaacgggggcaagaucuccgugcaguacaaccucagccacgcguacgccguggacgccgccaaccacugcgggaccaucgcgaacggcguccugcagaccuucaugcggauggccuggggcggguccuacaucgcccuggacagcggcaagggguccugggacugcaucaugaccagcuaccaguaccucaucauccagaacacgaccugggaggaccacugccaguucucccgccccagccccaucggcuaccuggggcugcucagccagcggacccgcgacaucuacaucucccggcgccugcugggcaccuucacguggacccucagcgacuccgagggcaacgagacccccgggggcuacugccugacccgguggaugcugaucgaggccgagcucaagugcuucgggaacacggccguggcgaagugcaacgagaagcacgacgaggaguucugcgacaugcugcgccuguucgacuucugcaagcaggccauccggcgccucaaggccgaggcccagaugagcauccagcugaucaacaaggccgugaacgcgcugaucaacgaccagcucaucaugaagaaccaccuccgggacaucaugggcauccccuacugcaacuacuccaaguacugcuaccugaaccacaccgucaccgggaagaccagccugccccgcugcugccugguguccaacggcagcuaccugaacgagacgcacuucuccgacgacaucgagcagcaggccgacaacaugaucaccgagcuccugcagaaggaguacaucgaccggcagggcaagaccccgcuggggcugguggaccucuucgucuucagcaccuccuucuaccugaucagcaucuuccugcaccucgugaagaucccgacgcaccgccacgugaucggcaagcccugccccaagccccaccggcugaaccacauggggaucugcuccugcggccuguacaagcacccggggguccccgugaaguggaagcgcugaggacuagucccuguucccagagcccacuuuuuuuucuuuuuuugaaauaaaauagccugucuuucagaucucaaaggcucuuuucagagccaccaaaaaaaaaaaaaaaaaaaaaaaaaaaaaaaaaaaaaaaaaaaaaaaaaaaaaaaaaaaaaaaaagaauu

SEQ ID NO: 40117 - RNA, 1714 nt, Artificial Sequence
  mRNA product Design a-1 (hSL-A64-N5) comprising derived and/or modified sequence from LASV(LASV1000-NIG-2009;Clade II)__AIT17782__GPCmut12 (opt1)
aggagagucccgcagucggcguccagcggcucugcuuguucgugugugugucguugcaggccuuauucaagcuuaccaugggccagaucaucaccuucuuccaggaggugccccacgucaucgaggaggugaugaacaucgugcugaucgcccucagccugcuggccauccucaaggggaucuacaacgucgcgaccugcggccuguucgggcugguguccuuccuccugcugugcggccgcagcugcuccacgaccuacaaggggguguacgagcuccagacccuggagcuggacauggccagccucaacaugugcaugccgcuguccugcaccaagaacaacagccaccacuacaucauggucggcaacgagacgggccuggagcucacccugaccaacaccuccaucaucaaccacaaguucugcaaccugagcgacgcccacaagaagaaccucuacgaccacgcccugauguccaucaucagcacguuccaccuguccauccccaacuucaaccaguacgaggccaugagcugcgacuucaacgggggcaagaucuccgugcaguacaaccucagccacaccuacgcgguggacgccgccaaccacugcgggaccaucgccaacggcguccugcagaccuucaugcggauggcguggggcggguccuacaucgcccuggacagcggcaagggguccugggacugcaucaugacgagcuaccaguaccucaucauccagaacaccaccugggaggaccacugccaguucucccgccccagccccaucggcuaccuggggcugcucagccagcggacccgcgacaucuacaucucccggcgccugcugggcacguucaccuggacccucagcgacuccgagggcaacgagacccccgggggcuacugccugacgcgguggaugcugaucgaggccgagcucaagugcuucgggaacaccgccguggccaagugcaacgagaagcacgacgaggaguucugcgacaugcugcgccuguucgacuucugcaagcaggcgaucaagcggcucaagaccgaggcccagaugagcauccagcugaucaacaaggccgugaacgcccugaucaacgaccagcucaucaugaagaaccaccuccgcgacaucaugggcaucccguacugcaacuacuccaaguacugcuaccugaaccacaccgucacggggaagaccagccugccccggugcugccugguguccaacggcagcuaccugaacgagacccacuucuccgacgacaucgagcagcaggccgacaacaugaucaccgagcuccugcagaaggaguacaucgaccgccagggcaagacgccccuggggcugguggaccucuucgucuucagcaccuccuucuaccugaucagcaucuuccugcaccucgugaagaucccgacccaccggcacguggucggcaagcccugccccaagccccaccgccugaaccacauggggaucugcuccugcggccuguacaagcacccgggggugcccgugaaguggaagcggugaggacuagucccuguucccagagcccacuuuuuuuucuuuuuuugaaauaaaauagccugucuuucagaucucaaaggcucuuuucagagccaccaaaaaaaaaaaaaaaaaaaaaaaaaaaaaaaaaaaaaaaaaaaaaaaaaaaaaaaaaaaaaaaaagaauu

SEQ ID NO: 40118 - RNA, 1714 nt, Artificial Sequence
  mRNA product Design a-1 (hSL-A64-N5) comprising derived and/or modified sequence from LASV(LASV221-NIG-2010;Clade II)__AIT17624__GPCmut12 (opt1)
aggagagucccgcagucggcguccagcggcucugcuuguucgugugugugucguugcaggccuuauucaagcuuaccaugggccagaucaucaccuucuuccaggaggugccccacgucaucgaggaggugaugaacaucgugcugaucgcccucagccugcuggccauccucaaggggaucuacaacgucgcgaccugcggccuguucgggcugguguccuuccuccugcugugcggccgcagcugcuccacgaccuacaaggggguguacgagcuccagacccuggagcuggacauggccagccucaacaugugcaugccgcuguccugcaccaagaacaacagccaccacuacaucauggucggcaacgagacgggccuggagcucacccugaccaacaccuccaucaucaaccacaaguucugcaaccugagcgacgcccacaagaagaaccucuacgaccacgcccugauguccaucaucagcacguuccaccuguccauccccaacuucaaccaguacgaggccaugagcugcgacuucaacgggggcaagaucuccgugcaguacaaccucagccacaccuacgcgaucgacgccgccaaccacugcgggaccaucgccaacggcgugcugcagaccuucaugcggauggcguggggcggguccuacaucgcccuggacagcggcaagggguccugggacugcaucaugacgagcuaccaguaccucaucauccagaacaccaccugggaggaccacugccaguucucccgccccagccccaucggcuaccuggggcugcucagccagcggacccgcgacaucuacaucucccggcgccugcugggcacguucaccuggacccucagcgacuccgagggcaacgagacccccgggggcuacugccugacgcgguggaugcugaucgaggccgagcucaagugcuucgggaacaccgccgucgccaagugcaacgagaagcacgacgaggaguucugcgacaugcugcgccuguucgacuucugcaagcaggcgauccggcgccucaagaccgaggcccagaugagcauccagcugaucaacaaggccgugaacgcccugaucaacgaccagcucaucaugaagaaccaccuccgggacaucaugggcaucccguacugcaacuacuccaaguacugcuaccugaaccacaccgugacggggaagaccagccugccccgcugcugccuggucuccaacggcagcuaccugaacgagacccacuucuccgacgacaucgagcagcaggccgacaacaugaucaccgagaugcuccagaaggaguacauggaccggcagggcaagacgccccuggggcugguggaccuguucguguucagcaccuccuucuaccucaucagcaucuuccugcaccuggucaagaucccgacccaccgccacgugaucggcaagcccugccccaagccccaccggcucaaccacauggggaucugcuccugcggccuguacaagcacccgggggugcccgucaaguggaagcgcugaggacuagucccuguucccagagcccacuuuuuuuucuuuuuuugaaauaaaauagccugucuuucagaucucaaaggcucuuuucagagccaccaaaaaaaaaaaaaaaaaaaaaaaaaaaaaaaaaaaaaaaaaaaaaaaaaaaaaaaaaaaaaaaaagaauu

SEQ ID NO: 40119 - RNA, 1714 nt, Artificial Sequence
  mRNA product Design a-1 (hSL-A64-N5) comprising derived and/or modified sequence from LASV(LASV237-NIG-2010;Clade II)__AIT17638__GPCmut12 (opt1)
aggagagucccgcagucggcguccagcggcucugcuuguucgugugugugucguugcaggccuuauucaagcuuaccaugggccagaucaucaccuucuuccaggaggugccccacgucaucgaggaggugaugaacaucgugcugaucgcccucagccugcuggccauccucaaggggaucuacaacgucgcgaccugcggccuguucgggcugguguccuuccuccugcugugcggccgcagcugcuccacgaccuacaaggggguguacgagcuccagacccuggagcuggacauggccagccucaacaugugcaugccgcuguccugcaccaagaacaacagccaccacuacaucauggucggcaacgagacgggccuggagcucacccugaccaacaccuccaucaucaaccacaaguucugcaaccugagcgacgcccacaagaaggaccucuacgaccacgcccugauguccaucaucagcacguuccaccuguccauccccaacuucaaccaguacgaggccaugagcugcgacuucaacgggggcaagaucuccgugcaguacaaccucagccacaccuacgcgguggacgccgccaaccacugcgggaccaucgccaacggcguccugcagaccuucaugcggauggcguggggcggguccuacaucgcccuggacagcggcaagggguccugggacugcaucaugacgagcuaccaguaccucaucauccagaacaccaccugggaggaccacugccaguucucccgccccagccccaucggcuaccuggggcugcucagccagcggacccgcgacaucuacaucucccggcgccugcugggcacguucaccuggacccucagcgacuccgagggcaacgagacccccgggggcuacugccugacgcgguggaugcugaucgaggccgagcucaagugcuucgggaacaccgccguggccaagugcaacgagaagcacgacgaggaguucugcgacaugcugcgccuguucgacuucugcaagcaggcgauccggcgccucaagaccgaggcccagaugagcauccagcugaucaacaaggccgugaacgcccugaucaacgaccagcucaucaugaagaaccaccuccgggacaucaugggcaucccguacugcaacuacuccaaguacugcuaccugaaccacaccgucacggggaagaccagccugccccgcugcugccugguguccaacggcagcuaccugaacgagacccacuucuccgacgacaucgagcagcaggccgacaacaugaucaccgagcuccugcagaaggaguacauggaccggcagggcaagacgccccuggggcugguggaccucuucgucuucagcaccuccuucuaccugaucagcaucuuccugcaccucaucaagaucccgacccaccgccacaucaccggcaagcccugccccaagccccaccggcugaaccacauggggaucugcuccugcggccuguacaagcacccgggggugcccgugaaguggaagcgcugaggacuagucccuguucccagagcccacuuuuuuuucuuuuuuugaaauaaaauagccugucuuucagaucucaaaggcucuuuucagagccaccaaaaaaaaaaaaaaaaaaaaaaaaaaaaaaaaaaaaaaaaaaaaaaaaaaaaaaaaaaaaaaaaagaauu

SEQ ID NO: 40120 - RNA, 1714 nt, Artificial Sequence
  mRNA product Design a-1 (hSL-A64-N5) comprising derived and/or modified sequence from LASV(LASV253-NIG-2011;Clade II)__AIT17670__GPCmut12 (opt1)
aggagagucccgcagucggcguccagcggcucugcuuguucgugugugugucguugcaggccuuauucaagcuuaccaugggccagaucaucaccuucuuccaggaggugccccacgucaucgaggaggugaugaacaucgugcugaucgcccucagccugcuggccauccucaaggggaucuacaacgucgcgaccugcggccuguucgggcugguguccuuccuccugcugugcggccgcagcugcuccacgaccuacaaggggguguacgagcuccagacccuggagcuggacauggccagccucaacaugugcaugccgcuguccugcaccaagaacaacagccaccacuacaucauggucggcaacgagacgggccuggagcucacccugaccaacaccuccaucaucaaccacaaguucugcaaccugagcgacgcccacaagaagaaccucuacgaccacgcccugauguccaucaucagcacguuccaccuguccauccccaacuucaaccaguacgaggccaugagcugcgacuucaacgggggcaagaucuccgugcaguacaaccucagccacaccuacgcgguggacgccgccaaccacugcgggaccaucgccaacggcguccugcagaccuucaugcggauggcguggggcggguccuacaucgcccuggacagcggcaagggguccugggacugcaucaugacgagcuaccaguaccucaucauccagaacaccaccugggaggaccacugccaguucucccgccccagccccaucggcuaccuggggcugcucagccagcggacccgcgacaucuacaucucccggcgccugcugggcacguucaccuggacccucagcgacuccgagggcaacgagacccccgggggcuacugccugacgcgguggaugcugaucgaggccgagcucaagugcuucgggaacaccgccguggccaagugcaacgagaagcacgacgaggaguucugcgacaugcugcgccuguucgacuucugcaagcaggcgauccggcgccucaaggccgaggcccagaugagcauccagcugaucaacaaggccgugaacgcccugaucaacgaccagcucaucaugaagaaccaccuccgggacaucaugggcauccccuacugcaacuacuccaaguacugcuaccugaaccacaccgucaccgggcgcacgagccugccccggugcugccugguguccaacggcagcuaccugaacgagacccacuucuccgacgacaucgagcagcaggcggacaacaugaucaccgagcuccugcagaaggaguacaucgaccgccagggcaagaccccgcuggggcugguggaccucuucgucuucagcacguccuucuaccugaucagcaucuuccugcaccucgugaagaucccgacccaccggcacaucaucggcaagcccugccccaagccccaccgccugaaccacauggggaucugcuccugcggccuguacaagcacccgggggugcccgucaaguggaagcggugaggacuagucccuguucccagagcccacuuuuuuuucuuuuuuugaaauaaaauagccugucuuucagaucucaaaggcucuuuucagagccaccaaaaaaaaaaaaaaaaaaaaaaaaaaaaaaaaaaaaaaaaaaaaaaaaaaaaaaaaaaaaaaaaagaauu

SEQ ID NO: 40121 - RNA, 1714 nt, Artificial Sequence
  mRNA product Design a-1 (hSL-A64-N5) comprising derived and/or modified sequence from LASV(LASV254-NIG-2011;Clade II)__AIT17674__GPCmut12 (opt1)
aggagagucccgcagucggcguccagcggcucugcuuguucgugugugugucguugcaggccuuauucaagcuuaccaugggccagaucaucaccuucuuccaggaggugccccacgucaucgaggaggugaugaacaucgugcugaucgcccucagccugcuggccauccucaaggggaucuacaacgucgcgaccugcggccuguucgggcugguguccuuccuccugcugugcggccgcagcugcuccacgaccuacaaggggguguacgagcuccagacccuggagcuggacaugaccaaccucaacaugugcaugccgcugagcugcacgaagaacaacucccaccacuacaucauggucggcaacgagaccggccuggagcucacccugaccaacacgagcaucaucaaccacaaguucugcaaccuguccgacgcccacaagaagaaccucuacaaccacgcccugaugagcaucaucuccaccuuccaccugagcauccccaacuucaaccaguacgaggccauguccugcgacuucaacgggggcaagaucagcgugcaguacaaccucucccacagcuacgccguggacgcggccaaccacugcgggaccaucgccaacggcguccugcagaccuucaugcggauggccuggggcggguccuacaucgcgcuggacagcggcaaggggaacugggacugcaucaugacguccuaccaguaccucaucauccagaacaccaccugggaggaccacugccaguucagccgccccucccccaucggcuaccuggggcugcucagccagcggacccgcgacaucuacaucagccggcgccugcugggcacguucaccuggacccucuccgacagcgagggcaacgagacccccgggggcuacugccugacgcgguggaugcugaucgaggccgagcucaagugcuucgggaacaccgccguggccaagugcaacgagaagcacgacgaggaguucugcgacaugcugcgccuguucgacuucugcaagcaggccauccggcgccucaagaccgaggcgcaggccaacauccagcugaucaacaaggccgugaacgcccugaucaacgaccagcucaucaugaagaaccaccuccgggacaucaugggcaucccguacugcaacuacuccaaguacugcuaccugaaccacaccgucacggggaagaccagccugccccgcugcugccugguguccaacggcagcuaccugaacgagacccacuucuccgacgacaucgagcagcaggccgacaacaugaucaccgagcuccugcagaaggaguacauggaccggcagggcaagacgccccuggggcugguggaccucuucgucuucagcaccuccuucuaccugaucagcaucuuccugcaccucgugaagaucccgacccaccgccacgugaucggcaagcccugccccaagccccaccggcugaaccacauggggaucugcuccugcggccuguacaagcacccggggguccccgugaaguggaagcgcugaggacuagucccuguucccagagcccacuuuuuuuucuuuuuuugaaauaaaauagccugucuuucagaucucaaaggcucuuuucagagccaccaaaaaaaaaaaaaaaaaaaaaaaaaaaaaaaaaaaaaaaaaaaaaaaaaaaaaaaaaaaaaaaaagaauu

SEQ ID NO: 40122 - RNA, 1714 nt, Artificial Sequence
  mRNA product Design a-1 (hSL-A64-N5) comprising derived and/or modified sequence from LASV(Nig08-A19;Clade III)__ADU56618__GPCmut12 (opt1)
aggagagucccgcagucggcguccagcggcucugcuuguucgugugugugucguugcaggccuuauucaagcuuaccaugggccagaucgugaccuucuuccaggaggucccccacgugaucgaggaggugaugaacaucguccugaucgcccucagcauccuggccauccugaaggggcucuacaacaucgcgaccugcggccugaucgggcuggugacguuccuccugcuguccggccgcagcugcuccaugaccuacaaggggguguacgagcuccagacccuggagcugaacaugaacacccucaacaugugcaugccgcugagcugcacgaagaacaacucccaccacuacaucauggucggcaacgagaccggccuggagcucacccugaccaacacgagccugcuccaccacaaguucugcaaccuguccgacgcccacaagaagaaccuguacgaccacacccucaugagcaucaucuccaccuuccaccugagcauccccaacuucaaccaguacgaggccauguccugcgacuucaacgggggcaagaucaccgugcaguacaaccugagccacuccuacgccaucgacgccgcgaaccacugcgggacgguggccaacggcguccuccagaccuucaugcggauggccuggggcgggagcuacaucgcccuggacuccggccgcgggaagugggacugcaucaugaccagcuaccaguaccugaucauccagaacaccacgugggaggaccacugccaguucucccggcccagccccaucggcuaccucgggcugcugucccagcgcacccgggacaucuacaucagccgccggcuccugggcaccuucaccuggacgcugagcgacuccgagggcaacgagacccccgggggcuacugccucacccgcuggaugcugaucgaggcggagcugaagugcuucgggaacaccgccguggccaagugcaacgagaagcacgacgaggaguucugcgacaugcuccggcuguucgacuucugcaagcaggccauccgccggcugaaggccgaggcgcagaugagcauccagcucaucaacaaggccgugaacgcccugaucaacgaccagcugaucaugaagaaccaccuccgcgacaucaugggcauccccuacugcaacuacuccaaguacugcuaccugaaccacacgagcaccgggcggaccucccugccccgcugcugccucgucagcaacggcuccuaccugaacgagacccacuucagcgacgacaucgagcagcaggccgacaacaugaucacggagaugcugcagaaggaguaccuggaccggcagggcaagaccccgcucgggcugguggaccuguucguguucuccaccagcuucuaccucaucuccaucuuccugcaccuggucaagaucccgacccaccgccacaucgugggcaagcccugccccaagccccaccggcucaaccacauggggaucugcagcugcggccuguacaagcagccgggggugcccguccgcuggaagcggugaggacuagucccuguucccagagcccacuuuuuuuucuuuuuuugaaauaaaauagccugucuuucagaucucaaaggcucuuuucagagccaccaaaaaaaaaaaaaaaaaaaaaaaaaaaaaaaaaaaaaaaaaaaaaaaaaaaaaaaaaaaaaaaaagaauu

SEQ ID NO: 40123 - RNA, 1717 nt, Artificial Sequence
  mRNA product Design a-1 (hSL-A64-N5) comprising derived and/or modified sequence from LASV(G1180-SLE-2010;Clade IV)__AIT17168__GPCmut12 (opt1)
aggagagucccgcagucggcguccagcggcucugcuuguucgugugugugucguugcaggccuuauucaagcuuaccaugggccagaucgugaccuucuuccaggaggucccccacgugaucgaggaggugaugaacaucguccugaucgcccucagcauccuggccgugcugaaggggcucuacaacuucgcgaccugcggccugguggggcugcucacguuccugcugcucugcggccgcuccugcaccgccagccgguacaagggggucuacgagcugcagacccuggagcucaacauggagacccugaacaugugcaugccgcuguccugcacgaagaacaacagccaccacuacaucauggugggcaacgagaccggccucgagcugacccugaccaacacguccaucaucaaccacaaguucugcaaccucagcgacgcccacaagaagaaccuguacgaccacgcccugauguccaucaucagcaccuuccaccucuccauccccaacuucaaccaguacgaggccaugagcugcgacuucaacgggggcaagaucuccgugcaguacaaccugagccacuccuacgcgggggacgccgccaaccacugcggcaccgucgccaacggggugcugcagaccuucaugcgcauggcguggggcggcagcuacaucgcccucgacuccgggcacggcagcugggacugcaucaugacguccuaccaguaccugaucauccagaacaccaccugggaggaccacugccaguucagccggcccucccccaucggguaccugggccuccugagccagcgcacccgggacaucuacaucagccgccggcugcucggcacguucaccuggacccuguccgacagcgaggggaaggacaccccgggcggguacugccugacgcgcuggaugcucaucgaggccgagcugaagugcuucggcaacaccgccguggccaagugcaacgagaagcacgacgaggaguucugcgacaugcugcggcuguucgacuucugcaagcaggcgauccagcgccugaaggccgaggcccagauguccauccagcugaucaacaaggccgucaacgcccucaucaacgaccagcugaucaugaagaaccaccuccgggacaucauggggauccccuacugcaacuacagcaaguacugcuaccucaaccacaccaccacgggcaagaccucccugcccaagugcugccuggugagcaacggcuccuaccucaacgagacccacuucagcgacgacaucgagcagcaggcggacaacaugaucaccgagaugcugcagaaggaguacauggagcgccaggggaagacgccccugggccugguggaccucuucgucuucuccaccagcuucuaccugaucuccaucuuccugcaccucgugaagaucccgacccaccggcacaucgugggcaagagcugccccaagccccaccgccugaaccacauggggaucugcuccugcgggcuguacaagcagcccggcgucccggugaaguggaagcggugaggacuagucccuguucccagagcccacuuuuuuuucuuuuuuugaaauaaaauagccugucuuucagaucucaaaggcucuuuucagagccaccaaaaaaaaaaaaaaaaaaaaaaaaaaaaaaaaaaaaaaaaaaaaaaaaaaaaaaaaaaaaaaaaagaauu

SEQ ID NO: 40124 - RNA, 1717 nt, Artificial Sequence
  mRNA product Design a-1 (hSL-A64-N5) comprising derived and/or modified sequence from LASV(G1442-SLE-2011;Clade IV)__AIT17180__GPCmut12 (opt1)
aggagagucccgcagucggcguccagcggcucugcuuguucgugugugugucguugcaggccuuauucaagcuuaccaugggccagaucgugaccuucuuccaggaggucccccacgugaucgaggaggugaugaacaucguccugaucgcccucagcauccuggccgugcugaaggggcucuacaacguggcgaccugcggccugaucgggcuggucaccuuccuccugcugugcggccgcuccugcaccaccacccucuacaaggggguguacgagcugcagacgcuggagcucaacauggagacccugaacaugugcaugccgcugagcugcaccaagaacaacucccaccacuacauccgggugggcaacgagaccggccucgagcugacgcugaccaacaccagcaucaucaaccacaaguucugcaaccucuccgacgcccacaagaagaaccuguacgaccacgcccugaugagcaucaucuccaccuuccaccucagcauccccaacuucaaccaguacgaggccauguccugcgacuucaacgggggcaagaucagcguccaguacaaccugucccacagcuacgccggggacgcggccaaccacugcggcacgguggccaacggggugcugcagaccuucaugcgcauggccuggggcggcuccuacaucgcgcucgacagcgggcggggcaacugggacugcaucaugaccuccuaccaguaccugaucauccagaacaccacgugggacgaccacugccaguucagccgccccucccccaucggguaccugggccuccugagccagcggacccgcgacgucuacaucucccggcgccugcucggcaccuucaccuggacgcugagcgacagcgaggggaaggacaccccgggcggguacugccugacccgguggaugcucaucgaggccgagcugaagugcuucggcaacaccgccguggccaagugcaacgagaagcacgacgaggaguucugcgacaugcugcgccucuucgacuucugcaagcaggccauccagcggcugaaggcggaggcccagauguccauccagcugaucaacaaggccgugaacgcccucaucaacgaccagcugaucaugaagaaccaccuccgcgacaucauggggauccccuacugcaacuacagcaaguacugcuaccugaacaacacggccaccggcaagaccucccugcccaagugcugccugaucagcaacggcuccuaccucaacgagacccacuucagcgacgacaucgagcaggaggcggacaacaugaucacggagaugcugcagaaggaguacauggagcggcaggggaagacgccccugggccuggucgaccucuucguguucuccaccagcuucuaccugaucuccaucuuccugcaccucgugaagaucccgacccaccgccacaucgucggcaagagcugccccaagccccaccggcugaaccacauggggaucugcuccugcgggcuguacaagcagcccggcgugccggugcgcuggaagcggugaggacuagucccuguucccagagcccacuuuuuuuucuuuuuuugaaauaaaauagccugucuuucagaucucaaaggcucuuuucagagccaccaaaaaaaaaaaaaaaaaaaaaaaaaaaaaaaaaaaaaaaaaaaaaaaaaaaaaaaaaaaaaaaaagaauu

SEQ ID NO: 40125 - RNA, 1717 nt, Artificial Sequence
  mRNA product Design a-1 (hSL-A64-N5) comprising derived and/or modified sequence from LASV(G3010-SLE-2013;Clade IV)__AIT17344__GPCmut12 (opt1)
aggagagucccgcagucggcguccagcggcucugcuuguucgugugugugucguugcaggccuuauucaagcuuaccaugggccagaucgugaccuucuuccaggaggucccccacgugaucgaggaggugaugaacaucguccugaucgcccucagcauccuggccgugcugaaggggcucuacaacuucgcgaccugcggccugguggggcuggucacguuccuccugcugugcggccgcuccugcaccaccagccucuacaaggggguguacgagcugcagacccuggagcucaacauggagacgcugaacaugugcaugccgcuguccugcaccaagaacaacagccaccacuacaucauggugggcaacgagaccggccucgagcugacccugacgaacaccuccaucaucaaccacaaguucugcaaccucagcgacgcccacaagaagaaccuguacaaccacgcccugauguccaucaucagcaccuuccaccucuccauccccaacuucaaccaguacgaggccaugagcugcgacuucaacgggggcaagaucuccguccaguacaaccugagccacuccuacgccggggacgcggccagccacugcggcaccguggccaacggggugcugcagacguucaugcggauggccuggggcggcuccuacaucgcgcucgacagcggguacggcaagugggacugcaucaugaccuccuaccaguaccugaucauccagaacaccaccugggaggaccacugccaguucagccgccccucccccaucggguaccugggccuccugagccagcggacgcgcgacaucuacaucagccggcgccugcucggcaccuucaccuggacccuguccgacagcgaggggaaggacacgccgggcggguacugccugacccgguggaugcucaucgaggccgagcugaagugcuucggcaacaccgccgucgccaagugcaacgagaagcacgacgaggaguucugcgacaugcugcgccucuucgacuucugcaagcaggccauccagcggcugaagaccgaggcgcagauguccauccagcugaucaacaaggccgugaacgcccucaucaacgaccagcugaucaugaagaaccaccuccgcgacaucauggggauccccuacugcaacuacagcaaguacugcuaccugaaccacacgaccaccggcaagaccucccugcccaagugcugccuggugagcaacggcuccuaccucaacgagacgcacuucagcgacgacaucgagcagcaggccgacaacaugaucaccgagaugcugcagaaggaguacauggagcggcaggggaagacgccccugggccuggucgaccucuucguguucuccaccagcuucuaccugaucuccaucuuccugcaccucgugaagaucccgacccaccgccacaucgucggcaagagcugccccaagccccaccggcugaaccacauggggaucugcuccugcgggcuguacaagcagcccggcgugccggugcgcuggaagcggugaggacuagucccuguucccagagcccacuuuuuuuucuuuuuuugaaauaaaauagccugucuuucagaucucaaaggcucuuuucagagccaccaaaaaaaaaaaaaaaaaaaaaaaaaaaaaaaaaaaaaaaaaaaaaaaaaaaaaaaaaaaaaaaaagaauu

SEQ ID NO: 40126 - RNA, 1717 nt, Artificial Sequence
  mRNA product Design a-1 (hSL-A64-N5) comprising derived and/or modified sequence from LASV(G502-SLE-2009;Clade IV)__AIT17126__GPCmut12 (opt1)
aggagagucccgcagucggcguccagcggcucugcuuguucgugugugugucguugcaggccuuauucaagcuuaccaugggccagaucgugaccuucuuccaggaggucccccacgugaucgaggaggugaugaacaucguccugaucgcccucagcauccuggccgugcugaaggggcucuacaacuucgcgaccugcggccugguggggcugcucacguuccugcugcucugcggccgcuccugcaccaccgggcuguacaagggcgucuacgagcugcagacccucgagcugaacauggagacgcugaacaugugcaugccgcucagcugcaccaagaacaacucccaccacuacaucauggugggcaacgagaccgggcuggagcugacccucacgaacaccagcaucaucaaccacaaguucugcaaccuguccgacgcccacaagaagaaccuguacgaccacgcccucaugagcaucaucuccaccuuccaccugagcauccccaacuucaaccaguacgaggccauguccugcgacuucaacggcgggaagaucagcgugcaguacaaccugucccacagcuacgccggcgacgcggccgaccacugcgggaccgucgccaacggcgugcuccagacguucaugcggauggccuggggcggguccuacaucgcgcuggacagcggccgcgggcggugggacugcaucaugaccuccuaccaguaccugaucauccagaacaccaccugggaggaccacugccaguucagccgccccucccccaucggcuaccucggccugcugagccagcggacgcgcgacaucuacaucucccggcgccuccuggggaccuucaccuggacccugagcgacagcgagggcaaggacacgcccgggggcuacugccucacccgguggaugcugaucgaggccgagcugaagugcuucgggaacaccgccguggccaagugcaacgagaagcacgacgaggaguucugcgacaugcuccgccuguucgacuucugcaagcaggccauccagcggcugaaggcggaggcccagauguccauccagcucaucaacaaggccgucaacgcccugaucaacgaccagcuggugaugaagaaccaccuccgcgacaucaugggcauccccuacugcaacuacagccgguacugcuaccugaaccacaccacgaccggccgcaccucccugcccaagugcugccucgugagcaacggguccuaccugaacgagacccacuucagcgacgacaucgagcagcaggccgacaacaugaucacggagaugcugcagaaggaguacauggagcggcagggcaagaccccgcuggggcucgucgaccuguucguguucuccaccagcuucuaccugaucuccaucuuccuccaccuggugaagaucccgacccaccgccacaucgucggcaagagcugccccaagccccaccggcugaaccacauggggaucugcuccugcggccucuacaagcagcccggcgugccggugaaguggaagcgcugaggacuagucccuguucccagagcccacuuuuuuuucuuuuuuugaaauaaaauagccugucuuucagaucucaaaggcucuuuucagagccaccaaaaaaaaaaaaaaaaaaaaaaaaaaaaaaaaaaaaaaaaaaaaaaaaaaaaaaaaaaaaaaaaagaauu

SEQ ID NO: 40127 - RNA, 1717 nt, Artificial Sequence
  mRNA product Design a-1 (hSL-A64-N5) comprising derived and/or modified sequence from LASV(G733-SLE-2010;Clade IV)__AIT17154__GPCmut12 (opt1)
aggagagucccgcagucggcguccagcggcucugcuuguucgugugugugucguugcaggccuuauucaagcuuaccaugggccagaucgugaccuucuuccaggaggucccccacgugaucgaggaggugaugaacaucguccugaucgcccucagcauccuggccgugcugaaggggcucuacaacuucgcgaccugcggcaucguggggcuggucuccuuccugcuccugugcggccgcagcugcacgaccucccuguacaaggggguguacgagcuccagacccuggagcugaacauggagacccucaacaugugcaugccgcugagcugcacgaagaacaacucccaccacuacaucauggugggcaacgagaccggccuggagcucacccugaccaacacgagcaucaucaaccacaaguucugcaaccuguccgacgcccacaagaagaaccucuacgaccacgcccugaugagcaucaucuccaccuuccaccugagcauccccaacuucaaccaguacgaggccauguccugcgacuucaacgggggcaagaucagcguccaguacaaccucucccacagcuacgccggggacgcggccaaccacugcggcaccaucgccaacggggugcugcagaccuucaugcggauggccuggggcggcuccuacaucgcgcuggacagcgggcgcgaccggugggacugcaucaugacguccuaccaguaccucaucauccagaacaccaccugggaggaccacugccaguucagccgccccucccccaucggcuaccuggggcugcucagccagcggacccgcgacaucuacaucagccggcgccugcugggcacguucaccuggacccucuccgacagcgagggcaaggacacccccgggggcuacugccugacgcgguggaugcugaucgaggccgagcucaagugcuucgggaacaccgccguggccaagugcaacgagaagcacgacgaggaguucugcgacaugcugcgccuguucgacuucugcaagcaggccauccagcggcucaaggcggaggcccagauguccauccagcugaucaacaaggccgucaacgcccugaucaacgaccagcucaucaugaagaaccaccuccgcgacaucaugggcaucccguacugcaacuacagcaaguacugcuaccugaaccacaccaccacggggaagaccucccugcccaagugcugccuggugagcaacggcuccuaccugaacgagacccacuucagcgacgacaucgagcagcaggccgacaacaugaucaccgagaugcuccagaaggaguacauggagcggcagggcaagacgccccuggggcugguggaccuguucgucuucuccaccagcuucuaccucaucuccaucuuccugcaccuggugaagaucccgacccaccgccacguggucggcaagagcugccccaagccccaccggcucaaccacauggggaucugcuccugcggccuguacgggcagcccggcgugccggugaaguggaagcgcugaggacuagucccuguucccagagcccacuuuuuuuucuuuuuuugaaauaaaauagccugucuuucagaucucaaaggcucuuuucagagccaccaaaaaaaaaaaaaaaaaaaaaaaaaaaaaaaaaaaaaaaaaaaaaaaaaaaaaaaaaaaaaaaaagaauu

SEQ ID NO: 40128 - RNA, 1717 nt, Artificial Sequence
  mRNA product Design a-1 (hSL-A64-N5) comprising derived and/or modified sequence from MOPV/LASV reassortant(IGS-1;Clade IV)__AFY05576__GPCmut12 (opt1)
aggagagucccgcagucggcguccagcggcucugcuuguucgugugugugucguugcaggccuuauucaagcuuaccaugggccagaucgugaccuucuuccaggaggucccccacgugaucgaggaggugaugaacaucguccugaucgcccucagcgugcuggccgugcugaaggggcucuacaacuucgcgaccugcggccuggucgggcuggugaccuuccuccugcugugcggccgcuccugcaccaccagccucuacaaggggguguacgagcugcagacccuggagcucaacauggagacgcugaacaugugcaugccgcuguccugcaccaagaacaacagccaccacuacaucauggucggcaacgagaccggccucgagcugacccugacgaacaccuccaucaucaaccacaaguucugcaaccucagcgacgcccacaagaagaaccuguacgaccacgcccugauguccaucaucagcaccuuccaccucuccauccccaacuucaaccaguacgaggccaugagcugcgacuucaacgggggcaagaucuccgugcaguacaaccugagccacuccuacgccggggacgcggccaaccacugcggcaccguggccaacgggguccugcagacguucaugcggauggccuggggcggcagcuacaucgcgcucgacuccgggcgcggcaacugggacugcaucaugaccagcuaccaguaccugaucauccagaacaccaccugggaggaccacugccaguucucccggcccagccccaucggguaccugggccuccugucccagcgcacgcgggacaucuacaucagccgccggcugcucggcaccuucaccuggacccugagcgacuccgagggggaggacacgccgggcggguacugccugacccgcuggaugcucaucgaggccgagcugaagugcuucggcaacaccgccguggccaagugcaacgagaagcacgacgaggaguucugcgacaugcugcggcuguucgacuucugcaagcaggccauccagcgccugaaggcggaggcccagaugagcauccagcugaucaacaaggccgugaacgcccucaucaacgaccagcugaucaugaagaaccaccuccgggacaucauggggauccccuacugcaacuacuccaaguacugcuaccucaaccacaccacgaccggccgcaccagccugcccaagugcugccuggucuccaacggcagcuaccucaacgagacccacuucuccgacgacaucgagcagcaggccgacaacaugaucacggagaugcugcagaaggaguacauggagcggcaggggaagacgccccugggccugguggaccucuucguguucagcaccuccuucuaccugaucagcaucuuccugcaccucgucaagaucccgacccaccgccacaucguggggaaguccugccccaagccccaccggcugaaccacaugggcaucugcagcugcgggcuguacaagcagcccggcgugccggucaaguggaagcgcugaggacuagucccuguucccagagcccacuuuuuuuucuuuuuuugaaauaaaauagccugucuuucagaucucaaaggcucuuuucagagccaccaaaaaaaaaaaaaaaaaaaaaaaaaaaaaaaaaaaaaaaaaaaaaaaaaaaaaaaaaaaaaaaaagaauu

SEQ ID NO: 40129 - RNA, 1717 nt, Artificial Sequence
  mRNA product Design a-1 (hSL-A64-N5) comprising derived and/or modified sequence from LASV(LM765-SLE-2012;Clade IV)__AIT17814__GPCmut12 (opt1)
aggagagucccgcagucggcguccagcggcucugcuuguucgugugugugucguugcaggccuuauucaagcuuaccaugggccagaucgugaccuucuuccaggaggucccccacgugaucgaggaggugaugaacaucguccugaucgcccucagcauccuggccgugcugaaggggcucuacaacuucgcgaccugcggccugguggggcuggucacguuccuccugcugugcggccgcuccugcaccaccagccucuacaaggggguguacgagcugcagacccuggagcucaacauggagacgcugaacaugugcaugccgcuguccugcaccaagaacaacagccaccacuacaucauggugggcaacgagaccggccucgagcugacccugacgaacaccuccaucaucgaccacaaguucugcaaccucagcgacgcccaccggaagaaccuguacgaccacgcccugauguccaucaucagcaccuuccaccucuccauccccaacuucaaccaguacgaggccaugagcugcgacuucaacgggggcaagaucuccguccaguacaaccugagccacuccuacgccaaggacgcggccgaccacugcgggaccguggccaacggcgugcugcagacguucaugcgcauggccuggggcgggagcuacaucgcgcucgacuccggccgggggcgcugggacugcaucaugaccagcuaccaguaccugaucauccagaacaccaccugggaggaccacugccaguucucccggcccagccccaucggcuaccuggggcuccugucccagcgcacgcgggacaucuacaucagccgccggcugcucggcaccuucaccuggacccugagcgacuccgagggcaaggacacgcccgggggcuacugccugacccgcuggaugcucaucgaggccgagcugaagugcuucgggaacaccgccgucgccaagugcaacgagaagcacgacgaggaguucugcgacaugcugcggcuguucgacuucugcaagcaggccauccagcgccugaaggcggaggcccagaugagcauccagcugaucaacaaggccgugaacgcccucaucaacgaccagcugaucaugaagaaccaccuccgggacaucaugggcauccccuacugcaacuacuccaaguacugcuaccucaaccacaccacgaccgggaagaccagccugcccaagugcugccugguguccaacggcagcuaccucaacgagacccacuucuccgacgacaucgagcagcaggccgacaacaugaucacggagaugcugcagaaggaguacauggagcgccagggcaagaccccgcuggggcuggucgaccucuucguguucagcaccuccuucuaccugaucagcaucuuccugcaccucgugaagaucccgacccaccggcacaucgucggcaagcccugccccaagccccaccgccugaaccacauggggaucugcuccugcggccuguacaagcagccgggggugcccgugaaguggaagcggugaggacuagucccuguucccagagcccacuuuuuuuucuuuuuuugaaauaaaauagccugucuuucagaucucaaaggcucuuuucagagccaccaaaaaaaaaaaaaaaaaaaaaaaaaaaaaaaaaaaaaaaaaaaaaaaaaaaaaaaaaaaaaaaaagaauu

SEQ ID NO: 40130 - RNA, 1717 nt, Artificial Sequence
  mRNA product Design a-1 (hSL-A64-N5) comprising derived and/or modified sequence from LASV(LM776-SLE-2012;Clade IV)__AIT17824__GPCmut12 (opt1)
aggagagucccgcagucggcguccagcggcucugcuuguucgugugugugucguugcaggccuuauucaagcuuaccaugggccagaucgugaccuucuuccaggaggucccccacgugaucgaggaggugaugaacaucguccugaucgcccucagcauccuggccgugcugaaggggcucuacaacuucgcgaccugcggccugguggggcuggucaccuuccuccugcugugcggccgcuccugcaccaccagcguguacaaggggguguacgagcuccagacccuggagcugaacauggagacgcucaacaugugcaugccgcuguccugcaccaagaacaacagccaccacuacaucauggucggcaacgagaccggccuggagcucacccugacgaacaccuccaucaucaaccacaaguucugcaaccugagcgacgcccacaagaagaaccucuacgaccacgcccugauguccaucaucagcaccuuccaccuguccauccccaacuucaaccaguacgaggccaugagcugcgacuucaacgggggcaagaucuccgugcaguacaaccucagccacuccuacgccggggacgcggccaaccacugcggcaccguggccaacgggguccugcagacguucaugcggauggccuggggcggcagcuacaucgcgcuggacuccgggcacggcaagugggacugcaucaugaccagcuaccaguaccucaucauccagaacaccaccugggaggaccacugccaguucucccgccccagccccaucggguaccugggccugcucucccagcggacgcgcgacaucuacaucagccggcgccugcugggcaccuucaccuggacccucagcgacuccgaggggaaggacacgccgggcggguacugccugacccgguggaugcugaucgaggccgagcucaagugcuucggcaacaccgccguggccaagugcaacgagaagcacgacgaggaguucugcgacaugcugcgccuguucgacuucugcaagcaggccauccagcggcucaaggcggaggcccagaugagcauccagcugaucaacaaggccgugaacgcccugaucaacgaccagcucaucaugaagaaccaccuccgcgacaucauggggauccccuacugcaacuacuccaaguacugcuaccugaaccacaccacgaccggcaagaccagccugcccaagugcugccuggucuccaacggcagcuaccugaacgagacccacuucuccgacgacaucgagcagcaggccgacaacaugaucacggagaugcuccagaaggaguacauggagcggcaggggaagacgccccugggccugguggaccuguucguguucagcaccuccuucuaccucaucagcaucuuccugcaccuggucaagaucccgacccaccgccacaucguggggaaguccugccccaagccccaccggcucaaccacaugggcaucugcagcugcgggcuguacaagcagcccggcgugccgguccgcuggaagcggugaggacuagucccuguucccagagcccacuuuuuuuucuuuuuuugaaauaaaauagccugucuuucagaucucaaaggcucuuuucagagccaccaaaaaaaaaaaaaaaaaaaaaaaaaaaaaaaaaaaaaaaaaaaaaaaaaaaaaaaaaaaaaaaaagaauu

SEQ ID NO: 40131 - RNA, 1717 nt, Artificial Sequence
  mRNA product Design a-1 (hSL-A64-N5) comprising derived and/or modified sequence from LASV(Mad39;Clade IV)__ANH09722__GPCmut12 (opt1)
aggagagucccgcagucggcguccagcggcucugcuuguucgugugugugucguugcaggccuuauucaagcuuaccaugggccagaucgugaccuucuuccaggaggucccccacgugaucgaggaggugaugaacaucguccugaucgcccucagcauccuggccgugcugaaggggcucuacaacguggcgaccugcggccugaucgggcuggucacguuccuccugcugugcggccgcuccugcaccaccacccucuacaaggggguguacgagcugcaggcccuggagcucaacauggagacgcugaacaugugcaugccgcugagcugcaccaagaacaacucccaccacuacauccgggugggcaacgagaccggccucgagcugacccugacgaacaccagccucaucaaccacaaguucugcaaccuguccgacgcccacaagaagaaccuguacgaccacgcccucaugagcaucaucuccaccuuccaccugagcauccccaacuucaaccaguacgaggccauguccugcgacuucaacgacgggaagaucagcguccaguacaaccugucccacaccuacgcgggcgacacggccaaccacugcgggaccguggccaacggcgugcuccagaccuucaugcgcauggccuggggcgggagcuacaucgcgcuggacuccggccgcgggggcugggacugcaucaugaccagcuaccaguaccugaucauccagaacacgaccugggaggaccacugccaguucucccggcccagccccaucggguaccucggccugcugucccagcggacccgcgacaucuacaucagccggcgccuccugggcaccuucacguggacccuguccgacagcgaggggaaggacaccccgggcggguacugccucacccgguggaugcugaucgaggccgagcugaagugcuucggcaacacggccgucgccaagugcaacgagaagcacgacgaggaguucugcgacaugcuccgccuguucgacuucugcaagcaggccauccagcggcugaaggcggaggcccagaugagcauccagcucaucaacaaggccgugaacgcccugaucaacgaccagcugaucaugaagaaccaccuccgcgacaucauggggauccccuacugcaacuacuccaaguacugcuaccugaaccacaccgugaccggcaagaccagccugcccaagugcugccucgucuccaacggcagcuaccugaacgagacgcacuucuccgacgacaucgagcagcaggccgacaacaugaucaccgagaugcugcagaaggaguacauggagcggcaggggaagacgccccugggccucguggaccuguucguguucagcaccuccuucuaccugaucagcaucuuccuccaccuggucaagaucccgacccaccgccacgugguggggaagcccugccccaagccccaccggcugaaccacaugggcaucugcuccugcggguucuacaagcagccgggcguccccgugcgcuggaagcggugaggacuagucccuguucccagagcccacuuuuuuuucuuuuuuugaaauaaaauagccugucuuucagaucucaaaggcucuuuucagagccaccaaaaaaaaaaaaaaaaaaaaaaaaaaaaaaaaaaaaaaaaaaaaaaaaaaaaaaaaaaaaaaaaagaauu

SEQ ID NO: 40132 - RNA, 1717 nt, Artificial Sequence
  mRNA product Design a-1 (hSL-A64-N5) comprising derived and/or modified sequence from LASV(Z0947-SLE-2011;Clade IV)__AIT17840__GPCmut12 (opt1)
aggagagucccgcagucggcguccagcggcucugcuuguucgugugugugucguugcaggccuuauucaagcuuaccaugggccagaucgugaccuucuuccaggaggucccccacgugaucgaggaggugaugaacaucguccugaucgcccucagcauccuggccgugcugaaggggcucuacaacuucgcgaccugcggccugguggggcuggucacguuccuccugcugugcggccgcuccugcaccaucagccucuacaaggggguguacgagcugcagacccuggagcucaacauggagacccugaacaugugcaugccgcuguccugcacgaagaacaacagccaccacuacaucauggugggcaacgagaccggccucgagcugacccugaccaacacguccaucaucaaccacaaguucugcaaccucagcgacgcccacaagaagaaccuguacgaccacgcccugauguccaucaucagcaccuuccaccucuccauccccaacuucaaccaguacgaggccaugagcugcgacuucaacgggggcaagaucuccguccaguacaaccugagccacuccuacgccggggacgcggccaaccacugcggcaccguggccaacggggugcugcagaccuucaugcggauggccuggggcggcagcuacaucgcgcucgacuccgggcgcgaccggugggacugcaucaugacgagcuaccaguaccugaucauccagaacaccaccugggaggaccacugccaguucucccgccccagccccaucggcuaccuggggcuccugucccagcggacccgcgacaucuacaucagccggcgccugcucggcacguucaccuggacccugagcgacuccgagggcaaggacacccccgggggcuacugccugacgcgguggaugcucaucgaggccgagcugaagugcuucgggaacaccgccgucgccaagugcaacgagaagcacgacgaggaguucugcgacaugcugcgccucuucgacuucugcaagcaggccauccagcggcugaaggcggaggcccagaugagcauccagcugaucaacaaggccgugaacgcccucaucaacgaccagcugaucaugaagaaccaccuccgcgacaucaugggcaucccguacugcaacuacuccaaguacugcuaccugaaccacaccaccacggggaagaccagccugcccaagugcugccugguguccaacggcagcuaccucaacgagacccacuucuccgacgacaucgagcagcaggccgacaacaugaucaccgagaugcugcagaaggaguacauggagcggcagggcaagacgccccuggggcuggucgaccucuucguguucagcaccuccuucuaccugaucagcaucuuccugcaccucgugaagaucccgacccaccgccacaucgucggcaagcccugccccaagccccaccggcugaaccacauggggaucugcuccugcggccuguacaagcagccgggggugcccgugaaguggaagcgcugaggacuagucccuguucccagagcccacuuuuuuuucuuuuuuugaaauaaaauagccugucuuucagaucucaaaggcucuuuucagagccaccaaaaaaaaaaaaaaaaaaaaaaaaaaaaaaaaaaaaaaaaaaaaaaaaaaaaaaaaaaaaaaaaagaauu

SEQ ID NO: 40133 - RNA, 1717 nt, Artificial Sequence
  mRNA product Design a-1 (hSL-A64-N5) comprising derived and/or modified sequence from LASV(Josiah;Clade IV)__NP_694870__GPCmut12 (opt4)
aggagagucccgcagucggcguccagcggcucugcuuguucgugugugugucguugcaggccuuauucaagcuuaccaugggccagaucgugaccuucuuccaggaggugccccacgugaucgaggaggugaugaacaucgugcugaucgcccugagcgugcuggccgugcugaagggccuguacaacuucgccaccugcggccuggugggccuggugaccuuccugcugcugugcggcagaagcugcaccaccagccuguacaagggcguguacgagcugcagacccuggagcugaacauggagacccugaacaugugcaugccccugagcugcaccaagaacaacagccaccacuacaucauggugggcaacgagaccggccuggagcugacccugaccaacaccagcaucaucaaccacaaguucugcaaccugagcgacgcccacaagaagaaccuguacgaccacgcccugaugagcaucaucagcaccuuccaccugagcauccccaacuucaaccaguacgaggccaugagcugcgacuucaacggcggcaagaucagcgugcaguacaaccugagccacagcuacgccggcgacgccgccaaccacugcggcaccguggccaacggcgugcugcagaccuucaugagaauggccuggggcggcagcuacaucgcccuggacagcggcagaggcaacugggacugcaucaugaccagcuaccaguaccugaucauccagaacaccaccugggaggaccacugccaguucagcagacccagccccaucggcuaccugggccugcugagccagagaaccagagacaucuacaucagcagaagacugcugggcaccuucaccuggacccugagcgacagcgagggcaaggacacccccggcggcuacugccugaccagauggaugcugaucgaggccgagcugaagugcuucggcaacaccgccguggccaagugcaacgagaagcacgacgaggaguucugcgacaugcugagacuguucgacuucugcaagcaggccauccagagacugaaggccgaggcccagaugagcauccagcugaucaacaaggccgugaacgcccugaucaacgaccagcugaucaugaagaaccaccugagagacaucaugggcauccccuacugcaacuacagcaaguacugcuaccugaaccacaccaccaccggcagaaccagccugcccaagugcugccuggugagcaacggcagcuaccugaacgagacccacuucagcgacgacaucgagcagcaggccgacaacaugaucaccgagaugcugcagaaggaguacauggagagacagggcaagaccccccugggccugguggaccuguucguguucagcaccagcuucuaccugaucagcaucuuccugcaccuggugaagauccccacccacagacacaucgugggcaagagcugccccaagccccacagacugaaccacaugggcaucugcagcugcggccuguacaagcagcccggcgugcccgugaaguggaagagaugaggacuagucccuguucccagagcccacuuuuuuuucuuuuuuugaaauaaaauagccugucuuucagaucucaaaggcucuuuucagagccaccaaaaaaaaaaaaaaaaaaaaaaaaaaaaaaaaaaaaaaaaaaaaaaaaaaaaaaaaaaaaaaaaagaauu

SEQ ID NO: 40134 - RNA, 1714 nt, Artificial Sequence
  mRNA product Design a-1 (hSL-A64-N5) comprising derived and/or modified sequence from LASV(LP;Clade I)__AAF86701__GPCmut12 (opt4)
aggagagucccgcagucggcguccagcggcucugcuuguucgugugugugucguugcaggccuuauucaagcuuaccaugggccagaucaucaccuucuuccaggaggugccccacgugaucgaggaggugaugaacaucgugcugaucgcccugagccugcuggccauccugaagggccuguacaacaucgccaccugcggcaucaucggccugguggccuuccuguuccugugcggcaagagcugcagccugacccugaagggcggcuacgagcugcagacccuggagcugaacauggagacccugaacaugugcaugccccugagcugcaccaagaacagcagccaccacuacaucagagugggcaacgagaccggccuggagcugacccugaccaacaccagcaucaucaaccacaaguucugcaaccugagcgacgcccacaagaagaaccuguacgaccacgcccugaugagcaucaucagcaccuuccaccugagcauccccaacuucaaccaguacgaggccaugagcugcgacuucaacggcggcaagaucagcgugcaguacaaccugagccacagcuacgccggcgacgccgccgagcacugcggcaccguggccaacggcgugcugcagaccuucaugagaauggccuggggcggcagauacaucgcccuggacagcggcaagggcaacugggacugcaucaugaccagcuaccaguaccugaucauccagaacaccaccugggaggaccacugccaguucagcagacccagccccaucggcuaccugggccugcugagccagagaaccagagacaucuacaucagcagaagacugcugggcaccuucaccuggacccugagcgacagcgagggcaacgagacccccggcggcuacugccugaccagauggaugcugaucgaggccgagcugaagugcuucggcaacaccgccguggccaagugcaacgagaagcacgacgaggaguucugcgacaugcugagacuguucgacuucugcaagcaggccaucagaagacugaaggccgaggcccagaugagcauccagcugaucaacaaggccgugaacgcccugaucaacgaccagcugaucaugaagaaccaccugagagacaucaugggcauccccuacugcaacuacagcaaguacugcuaccugaaccacaccagcagcggcagaaccagccugcccaagugcugccugaucagcaacggcagcuaccugaacgagacccaguucagcgacgacaucgagcagcaggccgacaacaugaucaccgagaugcugcagaaggaguacaucgagagacagggcaagaccccccugggccugguggacaucuucaucuucagcaccagcuucuaccugaucagcaucuuccugcaccugaucaagauccccacccacagacacaucgugggcaagcccugccccaagccccacagacugaaccacaugggcgugugcagcugcggccuguacaagcaccccggcgugcccaccaaguggaagagaugaggacuagucccuguucccagagcccacuuuuuuuucuuuuuuugaaauaaaauagccugucuuucagaucucaaaggcucuuuucagagccaccaaaaaaaaaaaaaaaaaaaaaaaaaaaaaaaaaaaaaaaaaaaaaaaaaaaaaaaaaaaaaaaaagaauu

SEQ ID NO: 40135 - RNA, 1714 nt, Artificial Sequence
  mRNA product Design a-1 (hSL-A64-N5) comprising derived and/or modified sequence from LASV(803213;Clade II)__AAF86703__GPCmut12 (opt4)
aggagagucccgcagucggcguccagcggcucugcuuguucgugugugugucguugcaggccuuauucaagcuuaccaugggccagaucaucaccuucuuccaggaggugccccacgugaucgaggaggugaugaacaucgugcugaucgcccugagccugcuggccauccugaagggcaucuacaacguggccaccugcggccuguucggccugaucagcuuccugcugcugugcggcagaagcugcagcgugaccuacaagggcguguacgagcugcagacccuggagcugaacauggccaaccugaacaugugcaugccccugagcugcaccaagaacaacagccaccacuacaucauggugggcaacgagaccggccuggagcugacccugaccaacaccagcaucaucaaccacaaguucugcaaccugagcgacgcccacaagaagaaccuguacgaccacgcccugaugagcaucaucagcaccuuccaccugagcauccccaacuucaaccaguacgaggccaugagcugcgacuucaacggcggcaagaucagcgugcaguacaaccugagccacagcuucgccguggacgccgccaaccacugcggcaccaucgccaacggcgugcugcagaccuucaugagaauggccuggggcggcagcuacaucgcccuggacagcggcaagggcaacugggacugcaucaugaccagcuaccaguaccugaucauccagaacaccaccugggaggaccacugccaguucagcagacccagccccaucggcuaccugggccugcugagccagagaaccagagacaucuacaucagcagaagacugcugggcaccuucaccuggacccugagcgacagcgagggcaacgaggcccccggcggcuacugccugaccagauggaugcugaucgaggccgagcugaagugcuucggcaacaccgccguggccaagugcaacgagaagcacgacgaggaguucugcgacaugcugagacuguucgacuucugcaagcaggccaucaagagacugaagaccgaggcccagaugagcauccagcugaucaacaaggccgugaacgcccugaucaacgaccagcugaucaugaagaaccaccugagagacaucaugggcauccccuacugcaacuacagcagauacugcuaccugaaccacaccgugaccggcaagaccagccugcccagaugcugccuggugagcaacggcagcuaccugaacgagacccacuucagcgacgacaucgagcagcaggccgacaacaugaucaccgagaugcugcagaaggaguacauggacagacagggcaagaccccccugggccugguggaccuguucguguucagcaccagcuucuaccugaucagcaucuuccugcaccuggugaagauccccacccacagacacaucgugggcaagcccugccccaagccccacagacugaaccacaugggcaucugcagcugcggccuguacaagcaccccggcgugcccgugaaguggaagagaugaggacuagucccuguucccagagcccacuuuuuuuucuuuuuuugaaauaaaauagccugucuuucagaucucaaaggcucuuuucagagccaccaaaaaaaaaaaaaaaaaaaaaaaaaaaaaaaaaaaaaaaaaaaaaaaaaaaaaaaaaaaaaaaaagaauu

SEQ ID NO: 40136 - RNA, 1714 nt, Artificial Sequence
  mRNA product Design a-1 (hSL-A64-N5) comprising derived and/or modified sequence from LASV(GA391;Clade III)__CAA36645__GPCmut12 (opt4)
aggagagucccgcagucggcguccagcggcucugcuuguucgugugugugucguugcaggccuuauucaagcuuaccaugggccagaucgugaccuucuuccaggaggugccccacgugaucgaggaggugaugaacaucgugcugaucgcccugagcauccuggccauccugaagggccuguacaacguggccaccugcggccugaucggccuggugaccuuccugcugcugagcggcagaagcugcagccugaucuacaagggcaccuacgagcugcagacccuggagcugaacauggagacccugaacaugugcaugccccugagcugcaccaagaacaacagccaccacuacaucagagugggcaacgagaccggccuggagcugacccugaccaacaccagcauccugaaccacaaguucugcaaccugagcgacgcccacaagagaaaccuguacgaccacagccugaugagcaucaucagcaccuuccaccugagcauccccaacuucaaccaguacgaggccaugagcugcgacuucaacggcggcaagaucaccgugcaguacaaccugagccacagcuucgccguggacgccgccggccacugcggcacccuggccaacggcgugcugcagaccuucaugagaauggccuggggcggcagcuacaucgcccuggacagcggcagaggcaacugggacugcaucaugaccagcuaccaguaccugaucauccagaacaccaccugggacgaccacugccaguucagcagacccagccccaucggcuaccugggccugcugagccagagaaccagagacaucuacaucagcagaagacugcugggcaccuucaccuggacccugagcgacagcgagggcaacgagacccccggcggcuacugccugaccagauggaugcugaucgaggccgagcugaagugcuucggcaacaccgccguggccaagugcaacgagaagcacgacgaggaguucugcgacaugcugagacuguucgacuucugcaagcaggccaucagaagacugaagaccgaggcccagaugagcauccagcugaucaacaaggccgugaacgcccugaucaacgaccagcugaucaugaagaaccaccugagagacaucaugggcauccccuacugcaacuacagcagauacugcuaccugaaccacaccagcaccggcaagaccagccugcccagaugcugccugaucagcaacggcagcuaccugaacgagaccaaguucagcgacgacaucgagcagcaggccgacaacaugaucaccgagaugcugcagaaggaguacaucgacagacagggcaagaccccccugggccugguggaccuguucguguucagcaccagcuucuaccugaucagcaucuuccugcaccuggugaagauccccacccacagacacaucgugggcaagcccugccccaagccccacagacugaaccacaugggcaucugcagcugcggccuguacaagcagcccggcgugcccgugagauggaagagaugaggacuagucccuguucccagagcccacuuuuuuuucuuuuuuugaaauaaaauagccugucuuucagaucucaaaggcucuuuucagagccaccaaaaaaaaaaaaaaaaaaaaaaaaaaaaaaaaaaaaaaaaaaaaaaaaaaaaaaaaaaaaaaaaagaauu

SEQ ID NO: 40137 - RNA, 1717 nt, Artificial Sequence
  mRNA product Design a-1 (hSL-A64-N5) comprising derived and/or modified sequence from LASV(AV;Clade V)__CCA30314__GPCmut12 (opt4)
aggagagucccgcagucggcguccagcggcucugcuuguucgugugugugucguugcaggccuuauucaagcuuaccaugggccagaucgugaccuucuuccaggaggugccccacgugaucgaggaggugaugaacaucgugcugaucgcccugagcauccuggccgugcugaagggccuguacaacaucgccaccugcggccugaucggccugaucaccuuccugcugcugugcggcagaagcugcagcagcaaccuguacaagggcguguacgagcugcagagccuggaccugaacauggagacccugaacaugugcaugccccugagcugcaccaagaacaacagccaccacuacaucagagugggcaacgacaccggccuggagcugacccugaccaacaccagcauccugaaccacaaguucugcaaccugagcgacgcccacaagaaggaccuguacgaccacgcccugaugagcaucaucagcaccuuccaccugagcauccccaacuucaaccaguacgaggccaugagcugcgacuucaacggcggcaagaucagcgugcaguacaaccugagccacagcuacgccaucgacgccgccaaccacugcggcaccguggccaacggcauccugcagaccuucaugagaauggccuggggcggcagcuacaucgcccuggacagcggcagaggcaacugggacugcaucaugaccagcuaccaguaccugaucauccagaacaccaccugggagaaccacugccaguucagcagacccagccccaucggcuaccugggccugcugagccagagaaccagagacaucuacaucagcagaagacugcugggcaccuucaccuggacccugagcgacagcgagggcaacgccacccccggcggcuacugccugaccagauggaugcugaucgaggccgagcugaagugcuucggcaacaccgccguggccaagugcaacgagaagcacgacgaggaguucugcgacaugcugagacuguucgacuucugcaagcaggccaucagcagacugaagagcgaggcccagaugagcauccagcugaucaacaaggccgugaacgcccugaucaacgaccagcugaucaugaagaaccaccugagagacaucaugggcauccccuacugcaacuacagcaaguacugcuaccugaaccacaccaucaccggcaagaccagccugcccaagugcugccuggugagcaacggcagcuaccugaacgagacccacuucagcgacgacaucgagcagcaggccgacaacaugaucaccgagaugcugcagaaggaguacauggagagacagggcaagaccccccugggccugguggaccuguucguguucagcaccagcuucuaccugaucagcaucuuccugagacuggugaagauccccacccacagacacaucgugggcaagcccugccccaagccccacagacugaaccacaugggcaucugcagcugcggccuguacaagcagcccggcgugcccgugagauggaagagaugaggacuagucccuguucccagagcccacuuuuuuuucuuuuuuugaaauaaaauagccugucuuucagaucucaaaggcucuuuucagagccaccaaaaaaaaaaaaaaaaaaaaaaaaaaaaaaaaaaaaaaaaaaaaaaaaaaaaaaaaaaaaaaaaagaauu

SEQ ID NO: 40138 - RNA, 1714 nt, Artificial Sequence
  mRNA product Design a-1 (hSL-A64-N5) comprising derived and/or modified sequence from LASV(Togo/2016/7082;Clade VI)__AMR44577__GPCmut12 (opt4)
aggagagucccgcagucggcguccagcggcucugcuuguucgugugugugucguugcaggccuuauucaagcuuaccaugggccagaucaucaccuucuuccaggaggugccccacgugaucgaggaggugaugaacaucgugcugaucgcccugagccugcuggccauccugaagggcguguacaacguggccaccugcggcaucaucggccuggugaccuuccuguuccugugcggcagaagcugcagccugaucuacaagggcagcuacgagcugcagacccuggagcugaacauggagacccugaacaugugcaugccccugagcugcaccaagaacagcagccaccacuacaucagagugggcaacgagaccggccuggagcugacccugaccaacaccagcaucaucaaccacaaguucugcaaccugagcgacgcccacaagagaaaccuguacgaccacgcccugaugagcauccugagcaccuuccaccugagcauccccaacuucaaccaguacgaggccaugagcugcgacuucaacggcggcaagaucagcgugcaguacaaccugagccacgccuacgccguggacgccgccgagcacugcggcaccguggccaacggcgugcugcagaccuucaugagaauggccuggggcggcagcuacaucgcccuggacagcggcagaggcaacugggacugcaucaugaccagcuaccaguaccugaucauccagaacaccaccugggaggaccacugccaguucagcagacccagccccaucggcuaccugggccugcugagccagagaaccagagacaucuacaucagcagaagacugcugggcaccuucaccuggacccugagcgacagcgagggcaacgagacccccggcggcuacugccugaccagauggaugcugaucgaggccgagcugaagugcuucggcaacaccgccguggccaagugcaacgagaagcacgacgaggaguucugcgacaugcugagacuguucgacuucugcaagcaggccauccagagacugaagagcgaggcccagaugagcauccagcugaucaacaaggccgugaacgcccugaucaacgaccagcugaucaugaagaaccaccugagagacaugaugggcauccccuacugcaacuacagcaaguacugcuaccugaaccacaccagcagcggcagaaccagccugcccaagugcugccuggugagcaacggcagcuaccugaacgagacccacuucagcgacgacaucgagcagcaggccgacaacaugaucaccgagaugcugcagaaggaguacaucgacagacagggcaagaccccccugggccugguggaccuguucguguucagcaccagcuucuaccugaucagcaucuuccugcaccugaucaagauccccacccacagacacaucgugggcaagcccugccccaagccccacagacugaaccacaugggcaucugcagcugcggccuguacaagcagcccggcgugcccaccagauggaagagaugaggacuagucccuguucccagagcccacuuuuuuuucuuuuuuugaaauaaaauagccugucuuucagaucucaaaggcucuuuucagagccaccaaaaaaaaaaaaaaaaaaaaaaaaaaaaaaaaaaaaaaaaaaaaaaaaaaaaaaaaaaaaaaaaagaauu

SEQ ID NO: 40139 - RNA, 1714 nt, Artificial Sequence
  mRNA product Design a-1 (hSL-A64-N5) comprising derived and/or modified sequence from LASV(KAK-428;Clade n.d. (VII))__ANH09740__GPCmut12 (opt4)
aggagagucccgcagucggcguccagcggcucugcuuguucgugugugugucguugcaggccuuauucaagcuuaccaugggccagaucgugaccuucuuccaggaggugccccacgugaucgaggaggugaugaacaucgugcugaucgcccugagccugcuggccauccugaagggccuguacaacuucgccaccugcggcgugaucggccugaucaccuuccugcugcugugcggcagaagcugcagcgccaccuacaagggccaguacgagcugcagacccuggagcugaacauggagagccugaacaugugcaugccccugagcugcaccaagaacaacagccaccacuacaucagagccggcaacaacaccggccuggagcugacccugaccaacaccagcaucaucagccacaaguucugcaaccugagcgacgcccacaagaagaaccuguacgaccacacccugaugagcaucaucaccaccuuccaccugagcauccccaacuucaaccaguacgaggccaugagcugcgacuucaacggcggcaagaucagcauccaguacaaccugagccacagcuacgccggcgacgccgcccagcacugcggcaccguggccaacggcgugcugcagaccuucaugagaauggccuggggcggcagcuaccuggcccuggacagcggcagaagaggcugggacugcaucaucagcagcuaccaguaccugaucauccagaacaccaccugggacgaccacugccaguucagcagacccagccccaucggcuaccugggcuucgugagccagaagaccagagacaucuacaucagcagaagacugcugggcaccuucaccuggacccugagcgacagcgagggccacgacaugcccggcggcuacugccugaccagauggaugcugaucgaggccgaccugaagugcuucggcaacaccgccguggccaagugcaacgagaagcacgacgaggaguucugcgacauguggagacuguucgacuucugcaagcaggccauccagagacugaaggccgaggcccagaugaacauccagcugaucaacaaggccgugaacgcccugaucaacgaccagcugaugaugaagaaccaccugagagacaucaugggcauccccuacugcaacuacagcaaguucugcuaccugaacaacaccaccaccggcagaaccagccugcccagaugcugccugaucagcaacggcagcuaccugaacgagacccacuucagcgacgacaucgagcagcaggccgacaacaugaucaccgagaugcugcagaaggaguacauggacagacagggcaagaccccccugggccugguggaccuguucguguucagcaccagcuucuaccugaucaccaucuuccugcaccuggugaagauccccacccacagacacaucgugggcaagcccugccccaagccccacagacugaaccacaugggcaucugcagcugcggccuguacaagcagcccggcgugcccgugagauggaagagaugaggacuagucccuguucccagagcccacuuuuuuuucuuuuuuugaaauaaaauagccugucuuucagaucucaaaggcucuuuucagagccaccaaaaaaaaaaaaaaaaaaaaaaaaaaaaaaaaaaaaaaaaaaaaaaaaaaaaaaaaaaaaaaaaagaauu

SEQ ID NO: 40140 - RNA, 1714 nt, Artificial Sequence; identical to SEQ ID NO: 40134
  mRNA product Design a-1 (hSL-A64-N5) comprising derived and/or modified sequence from LASV(Pinneo-NIG-1969;Clade I)__AIT17836__GPCmut12 (opt4)

SEQ ID NO: 40141 - RNA, 1714 nt, Artificial Sequence
  mRNA product Design a-1 (hSL-A64-N5) comprising derived and/or modified sequence from LASV(ISTH0009-NIG-2011;Clade II)__AIT17404__GPCmut12 (opt4)
aggagagucccgcagucggcguccagcggcucugcuuguucgugugugugucguugcaggccuuauucaagcuuaccaugggccagaucaucaccuucuuccaggaggugccccacgugaucgaggaggugaugaacaucgugcugaucgcccugagccugcuggccauccugaagggcaucuacaacguggccaccugcggccuguucggccuggugagcuuccugcugcugugcggcagaagcugcagcaccaccuacaagggcguguacgagcugcagacccuggagcuggacauggccagccugaacaugugcaugccccugagcugcaccaagaacaacagccaccacuacaucauggugggcaacgagaccggccuggagcugacccugaccaacaccagcaucaucaaccacaaguucugcaaccugagcgacgcccacaagaagaaccuguacgaccacgcccugaugagcaucaucagcaccuuccaccugagcauccccaacuucaaccaguacgaggccaugagcugcgacuucaacggcggcaagaucagcgugcaguacaaccugagccacgccuacgccguggacgccgccaaccacugcggcaccaucgccaacggcgugcugcagaccuucaugagaauggccuggggcggcagcuacaucgcccuggacagcggcaagggcagcugggacugcaucaugaccagcuaccaguaccugaucauccagaacaccaccugggaggaccacugccaguucagcagacccagccccaucggcuaccugggccugcugagccagagaaccagagacaucuacaucagcagaagacugcugggcaccuucaccuggacccugagcgacagcgagggcaacgagacccccggcggcuacugccugaccagauggaugcugaucgaggccgagcugaagugcuucggcaacaccgccguggccaagugcaacgagaagcacgacgaggaguucugcgacaugcugagacuguucgacuucugcaagcaggccaucagaagacugaagaccgaggcccagaugagcauccagcugaucaacaaggccgugaacgcccugaucaacgaccagcugaucaugaagaaccaccugagagacaucaugggcauccccuacugcaacuacagcaaguacugcuaccugaaccacaccgugaccggcaagaccagccugcccagaugcugccuggugagcaacggcagcuaccugaacgagacccacuucagcgacgacaucgagcagcaggccgacaacaugaucaccgagcugcugcagaaggaguacauggacagacagggcaagaccccccugggccugguggaccuguucguguucagcaccagcuucuaccugaucagcaucuuccugcaccugaucaagauccccacccacagacacaucaccggcaagcccugccccaagccccacagacugaaccacaugggcaucugcagcugcggccuguacaagcaccccggcgugcccgugaaguggaagagaugaggacuagucccuguucccagagcccacuuuuuuuucuuuuuuugaaauaaaauagccugucuuucagaucucaaaggcucuuuucagagccaccaaaaaaaaaaaaaaaaaaaaaaaaaaaaaaaaaaaaaaaaaaaaaaaaaaaaaaaaaaaaaaaaagaauu

SEQ ID NO: 40142 - RNA, 1714 nt, Artificial Sequence
  mRNA product Design a-1 (hSL-A64-N5) comprising derived and/or modified sequence from LASV(ISTH2010-NIG-2012;Clade II)__AIT17482__GPCmut12 (opt4)
aggagagucccgcagucggcguccagcggcucugcuuguucgugugugugucguugcaggccuuauucaagcuuaccaugggccagaucaucaccuucuuccaggaggugccccacgugaucgaggaggugaugaacaucgugcugaucgcccugagccugcuggccauccugaagggcaucuacaacguggccaccugcggccuguucggccuggugagcuuccugcugcugugcggcagaagcugcagcaccaccuacaagggcguguacgagcugcagacccuggagcuggacauggccagccugaacaugugcaugccccugagcugcaccaagaacaacagccaccacuacaucauggugggcaacgagaccggccuggagcugacccugaccaacaccagcaucaucaaccacaaguucugcaaccugagcgacgcccacaagaagaaccuguacgaccacgcccugaugagcaucaucagcaccuuccaccugagcauccccaacuucaaccaguacgaggccaugagcugcgacuucaacggcggcaagaucagcgugcaguacaaccugagccacgccuacgccguggacgccgccaaccacugcggcaccaucgccaacggcgugcugcagaccuucaugagaauggccuggggcggcagcuacaucgcccuggacagcggcaagggcagcugggacugcaucaugaccagcuaccaguaccugaucauccagaacaucaccugggaggaccacugccaguucagcagacccagccccaucggcuaccugggccugcugagccagagaaccagagacaucuacaucagcagaagacugcugggcaccuucaccuggacccugagcgacagcgagggcaacgagacccccggcggcuacugccugaccagauggaugcugaucgaggccgagcugaagugcuucggcaacaccgccguggccaagugcaacgagaagcacgacgaggaguucugcgacaugcugagacuguucgacuucugcaagcaggccaucagaagacugaagaccgaggcccagaugagcauccagcugaucaacaaggccgugaacgcccugaucaacgaccagcugaucaugaagaaccaccugagagacaucaugggcauccccuacugcaacuacagcaaguacugcuaccugaaccacaccgugaccggcaagaccagccugcccagaugcugccuggugagcaacggcagcuaccugaacgagacccacuucagcgacgacaucgagcagcaggccgacaacaugaucaccgagcugcugcagaaggaguacaucgacagacagggcaagaccccccugggccugguggaccuguucguguucagcaccagcuucuaccugaucagcaucuuccugcaccuggugaagauccccacccacagacacguggugggcaagcccugccccaagccccacagacugaaccacaugggcaucugcagcugcggccuguacaagcaccccggcgugcccgugaaguggaagagaugaggacuagucccuguucccagagcccacuuuuuuuucuuuuuuugaaauaaaauagccugucuuucagaucucaaaggcucuuuucagagccaccaaaaaaaaaaaaaaaaaaaaaaaaaaaaaaaaaaaaaaaaaaaaaaaaaaaaaaaaaaaaaaaaagaauu

SEQ ID NO: 40143 - RNA, 1714 nt, Artificial Sequence
  mRNA product Design a-1 (hSL-A64-N5) comprising derived and/or modified sequence from LASV(Lassa virus/H.sapiens-wt/NGA/2015/ISTH_0543;Clade II)__AVO03639__GPCmut12 (opt4)
aggagagucccgcagucggcguccagcggcucugcuuguucgugugugugucguugcaggccuuauucaagcuuaccaugggccagaucaucaccuucuuccaggaggugccccacgugaucgaggaggugaugaacaucgugcugaucgcccugagccugcuggccauccugaagggcaucuacaacguggccaccugcggccuguucggccuggugagcuuccugcugcugugcggcagaagcugcagcaccaccuacaagggcguguacgagcugcagacccuggagcuggacauggccaaccugaacaugugcaugccccugagcugcaccaagaacaacagccaccacuacaucauggugggcaacgagaccggccuggagcugacccugaccaacaccagcaucaucaaccacaaguucugcaaccugagcgacgcccacaagaagaaccuguacgaccacgcccugaugagcaucaucagcaccuuccaccugagcauccccaacuucaaccaguacgaggccaugagcugcgacuucaacggcggcaagaucagcgugcaguacaaccugagccacaccuacgccguggacgccgccaaccacugcggcaccaucgccaacggcgugcugcagaccuucaugagaauggccuggggcggcagcuacaucgcccuggacagcggcaagggcagcugggacugcaucaugaccagcuaccaguaccuggugauccagaacaccaccugggaggaccacugccaguucagcagacccagccccaucggcuaccugggccugcugagccagagaaccagagacaucuacaucagcagaagacugcugggcaccuucaccuggacccugagcgacagcgagggcaacgagacccccggcggcuacugccugaccagauggaugcugaucgaggccgagcugaagugcuucggcaacaccgccguggccaagugcaacgagaagcacgacgaggaguucugcgacaugcugagacuguucgacuucugcaagcaggccaucagaagacugaagaccgaggcccagaugagcauccagcugaucaacaaggccgugaacgcccugaucaacgaccagcugaucaugaagaaccaccugagagacaucaugggcauccccuacugcaacuacagcaaguacugcuaccugaaccacaccgugaccggcaagaccagccugcccagaugcugccuggugagcaacggcagcuaccugaacgagacccacuucagcgacgacaucgagcagcaggccgacaacaugaucaccgagcugcugcagaaggaguacaucgacagacagggcaagaccccccugggccugguggaccuguucguguucagcaccagcuucuaccugaucagcaucuuccugcaccuggugaagauccccacccacagacacaucaccggcaagcccugccccaagccccacagacugaaccacaugggcaucugcagcugcggccuguacaagcaccccggcgugcccgugaaguggaagagaugaggacuagucccuguucccagagcccacuuuuuuuucuuuuuuugaaauaaaauagccugucuuucagaucucaaaggcucuuuucagagccaccaaaaaaaaaaaaaaaaaaaaaaaaaaaaaaaaaaaaaaaaaaaaaaaaaaaaaaaaaaaaaaaaagaauu

SEQ ID NO: 40144 - RNA, 1714 nt, Artificial Sequence
  mRNA product Design a-1 (hSL-A64-N5) comprising derived and/or modified sequence from LASV(Lassa virus/H.sapiens-wt/NGA/2016/ISTH_0009;Clade II)__AVO03571__GPCmut12 (opt4)
aggagagucccgcagucggcguccagcggcucugcuuguucgugugugugucguugcaggccuuauucaagcuuaccaugggccagaucaucaccuucuuccaggaggugccccacgugaucgaggaggugaugaacaucgugcugaucgcccugagccugcuggccauccugaagggcaucuacaacguggccaccugcggccugcugggccuggugagcuuccugcugcugugcggcagaagcugcagcaccaccuacaagggcguguacgagcugcagacccuggagcuggacauggccagccugaacaugugcaugccccugagcugcaccaagaacaacagccaccacuacaucauggugggcaacgagaccggccuggagcugacccugaccaacaccagcaucaucaaccacaaguucugcaaccugagcgacgcccacaagaagaaccuguacgaccacgcccugaugagcaucaucagcaccuuccaccugagcauccccaacuucaaccaguacgaggccaugagcugcgacuucaacggcggcagaaucagcgugcaguacaaccugagccacagcuacgccguggacgccgccaaccacugcggcaccaucgccaacggcgugcugcagaccuucaugagaauggccuggggcggcagcuacaucgcccuggacagcggcaagggcagcugggacugcaucaugaccagcuaccaguaccugaucauccagaacaccaccugggaggaccacugccaguucagcagacccagccccaucggcuaccugggccugcugagccagagaaccagagacaucuacaucagcagaagacugcugggcaccuucaccuggacccugagcgacagcgagggcaacgagacccccggcggcuacugccugaccagauggaugcugaucgaggccgagcugaagugcuucggcaacaccgccguggccaagugcaacgagaagcacgacgaggaguucugcgacaugcugagacuguucgacuucugcaagcaggccaucagaagacugaagaccgaggcccagaugagcauccagcugaucaacaaggccgugaacgcccugaucaacgaccagcugaucaugaagaaccaccugagagacaucaugggcauccccuacugcaacuacagcaaguacugcuaccugaaccacaccgugaccggcaagaccagccugcccagaugcugccuggugagcaacggcagcuaccugaacgagacccacuucagcgacgacaucgagcagcaggccgacaacaugaucaccgagcugcugcagaaggaguacaucgacagacagggcaagaccccccugggccugguggaccuguucguguucagcaccagcuucuaccugaucagcaucuuccugcaccuggugaagauccccacccacagacacaucaccggcaagcccugccccaagccccacagacugaaccacaugggcaucugcagcugcggccuguacaaccaccccggcgugcccgugaaguggaagagaugaggacuagucccuguucccagagcccacuuuuuuuucuuuuuuugaaauaaaauagccugucuuucagaucucaaaggcucuuuucagagccaccaaaaaaaaaaaaaaaaaaaaaaaaaaaaaaaaaaaaaaaaaaaaaaaaaaaaaaaaaaaaaaaaagaauu

SEQ ID NO: 40145 - RNA, 1714 nt, Artificial Sequence
  mRNA product Design a-1 (hSL-A64-N5) comprising derived and/or modified sequence from LASV(Lassa virus/H.sapiens-wt/NGA/2016/ISTH_0017;Clade II)__AVO03567__GPCmut12 (opt4)
aggagagucccgcagucggcguccagcggcucugcuuguucgugugugugucguugcaggccuuauucaagcuuaccaugggccagaucaucaccuucuuccaggaggugccccacgugaucgaggaggugaugaacaucgugcugaucgcccugagccugcuggccauccugaagggcaucuacaacguggccaccugcggccuguucggccuggugagcuuccugcugcugugcggcagaagcugcagcaccaccuacaagggcguguacgagcugcagacccuggagcuggacauggccagccugaacaugugcaugccccugagcugcaccaagaacaacagccaccacuacaucauggugggcaacgagaccggccuggagcugacccugaccaacaccagcaucaucaaccacaaguucugcaaccugagcgacgcccacaagaagaaccuguacgaccacgcccugaugagcaucaucagcaccuuccaccugagcauccccaacuucaaccaguacgaggccaugagcugcgacuucaacggcggcaagaucagcgugcaguacaaccugagccacaccuacgccaucgacgccgccaaccacugcggcaccaucgccaacggcgugcugcagaccuucaugagaauggccuggggcggcagcuacaucgcccuggacagcggcaagggcagcugggacugcaucaugaccagcuaccaguaccugaucauccagaacaccaccugggaggaccacugccaguucagcagacccagccccaucggcuaccugggccugcugagccagagaaccagagacaucuacaucagcagaagacugcugggcaccuucaccuggacccugagcgacagcgagggcaacgagacccccggcggcuacugccugaccagauggaugcugaucgaggccgagcugaagugcuucggcaacaccgccguggccaagugcaacgagaagcacgacgaggaguucugcgacaugcugagacuguucgacuucugcaagcaggccaucagaagacugaagaccgaggcccagaugagcauccagcugaucaacaaggccgugaacgcccugaucaacgaccagcugaucaugaagaaccaccugagagacaucaugggcauccccuacugcaacuacagcaaguacugcuaccugaaccacaccgugaccggcaagaccagccugcccagaugcugccuggugagcaacggcagcuaccugaacgagacccacuucagcgacgacaucgagcagcaggccgacaacaugaucaccgagcugcugcagaaggaguacauggacagacagggcaagaccccccugggccugguggaccuguucguguucagcaccagcuucuaccugaucagcaucuuccugcaccuggugagaauccccacccacagacacgugaucggcaagcccugccccaagccccacagacugaaccacaugggcaucugcagcugcggccuguacaagcaccccggcgugcccgugaaguggaagagaugaggacuagucccuguucccagagcccacuuuuuuuucuuuuuuugaaauaaaauagccugucuuucagaucucaaaggcucuuuucagagccaccaaaaaaaaaaaaaaaaaaaaaaaaaaaaaaaaaaaaaaaaaaaaaaaaaaaaaaaaaaaaaaaaagaauu

SEQ ID NO: 40146 - RNA, 1714 nt, Artificial Sequence
  mRNA product Design a-1 (hSL-A64-N5) comprising derived and/or modified sequence from LASV(Lassa virus/H.sapiens-wt/NGA/2018/ISTH_0959;Clade II)__AVV65099__GPCmut12 (opt4)
aggagagucccgcagucggcguccagcggcucugcuuguucgugugugugucguugcaggccuuauucaagcuuaccaugggccagaucaucaccuucuuccaggaggugccccacgugaucgaggaggugaugaacaucgugcugaucgcccugagccugcuggccauccugaagggcaucuacaacguggugaccugcggccuguucggccuggugagcuuccugcugcugugcggcagaagcugcagcaccaccuacaagggcguguacgagcugcagacccuggagcuggacauggccagccugaacaugugcaugccccugagcugcaccaagaacaacagccaccacuacaucauggugggcaacgagaccggccuggagcugacccugaccaacaccagcaucaucaaccacaaguucugcaaccugagcgacgcccacaagaagaaccuguacgaccacgcccugaugagcaucaucagcaccuuccaccugagcauccccaacuucaaccaguacgaggccaugagcugcgacuucaacggcggcaagaucagcgugcaguacaaccugagccacgccuacgccaucgacgccgccaaccacugcggcaccaucgccaacggcgugcugcagaccuucaugagaauggccuggggcggcagcuacaucgcccuggacagcggcaagggcagcugggacugcaucaugaccagcuaccaguaccugaucauccagaacaccaccugggaggaccacugccaguucagcagacccagccccaucggcuaccugggccugcugagccagagaaccagagacaucuacaucagcagaagacugcugggcaccuucaccuggacccugagcgacagcgagggcaacgagacccccggcggcuacugccugaccagauggaugcugaucgaggccgagcugaagugcuucggcaacaccgccguggccaagugcaacgagaagcacgacgaggaguucugcgacaugcugagacuguucgacuucugcaagcaggccaucagaagacugaagaccgaggcccagaugagcauccagcugaucaacaaggccgugaacgcccugaucaacgaccagcugaucaugaagaaccaccugagagacaucaugggcauccccuacugcaacuacagcaaguacugcuaccugaaccacaccgugaccggcaagaccagccugcccagaugcugccuggugagcaacggcagcuaccugaacgagacccacuucagcgacgacaucgagcagcaggccgacaacaugaucaccgagcugcugcagaaggaguacaucgacagacagggcaagaccccccugggccugguggaccuguucguguucagcaccagcuucuaccugaucagcaucuuccugcaccuggugaagauccccacccacagacacgugaucggcaagcccugccccaagccccacagacugaaccacaugggcaucugcagcugcggccuguacaagcaccccggcgugcccgugaaguggaagagaugaggacuagucccuguucccagagcccacuuuuuuuucuuuuuuugaaauaaaauagccugucuuucagaucucaaaggcucuuuucagagccaccaaaaaaaaaaaaaaaaaaaaaaaaaaaaaaaaaaaaaaaaaaaaaaaaaaaaaaaaaaaaaaaaagaauu

SEQ ID NO: 40147 - RNA, 1714 nt, Artificial Sequence
  mRNA product Design a-1 (hSL-A64-N5) comprising derived and/or modified sequence from LASV(LASV003-NIG-2008;Clade II)__AIT17580__GPCmut12 (opt4)
aggagagucccgcagucggcguccagcggcucugcuuguucgugugugugucguugcaggccuuauucaagcuuaccaugggccagaucaucaccuucuuccaggaggugccccacgugaucgaggaggugaugaacaucgugcugaucgcccugagccugcuggccauccugaagggcaucuacaacguggccaccugcggccuguucggccuggugagcuuccugcugcugugcggcagaagcugcagcaccaccuacaagggcguguacgagcugcagacccuggagcuggacauggccagccugaacaugugcaugccccugagcugcaccaagaacaacagccaccacuacaucauggugggcaacgagaccggccuggagcugacccugaccaacaccagcaucaucaaccacaaguucugcaaccugagcgacgcccacaagaagaaccuguacgaccacgcccugaugagcaucaucagcaccuuccaccugagcauccccaacuucaaccaguacgaggccaugagcugcgacuucaacggcggcaagaucagcgugcaguacaaccugagccacaccuacgccguggacgccgccaaccacugcggcaccaucgccaacggcgugcugcagaccuucaugagaauggccuggggcggcagcuacaucgcccuggacagcggcaagggcagcugggacugcaucaugaccagcuaccaguaccugaucauccagaacaccaccugggaggaccacugccaguucagcagacccagccccaucggcuaccugggccugcugagccagagaaccagagacaucuacaucagcagaagacugcugggcaccuucaccuggacccugagcgacagcgagagcaacgagacccccggcggcuacugccugaccagauggaugcugaucgaggccgagcugaagugcuucggcaacaccgccguggccaagugcaacgagaagcacgacgaggaguucugcgacaugcugagacuguucgacuucugcaagcaggccaucagaagacugaaggccgaggcccagaugagcauccagcugaucaacaaggccgugaacgcccugaucaacgaccagcugaucaugaagaaccaccugagagacaucaugggcauccccuacugcaacuacagcaaguacugcuaccugaaccacaccgugaccggcagaaccagccugcccagaugcugccuggugagcaacggcagcuaccugaacgagacccacuucagcgacgacaucgagcagcaggccgacaacaugaucaccgagcugcugcagaaggaguacauggacagacagggcaagaccccccugggccugguggaccuguucguguucagcaccagcuucuaccugaucagcaucuuccugcaccuggugaagauccccacccacagacacgugaucggcaagcccugccccaagccccacagacugaaccacaugggcaucugcagcugcggccuguacaagcaccccggcgugcccgugaaguggaagagaugaggacuagucccuguucccagagcccacuuuuuuuucuuuuuuugaaauaaaauagccugucuuucagaucucaaaggcucuuuucagagccaccaaaaaaaaaaaaaaaaaaaaaaaaaaaaaaaaaaaaaaaaaaaaaaaaaaaaaaaaaaaaaaaaagaauu

SEQ ID NO: 40148 - RNA, 1714 nt, Artificial Sequence
  mRNA product Design a-1 (hSL-A64-N5) comprising derived and/or modified sequence from LASV(LASV035-NIG-2009;Clade II)__AIT17588__GPCmut12 (opt4)
aggagagucccgcagucggcguccagcggcucugcuuguucgugugugugucguugcaggccuuauucaagcuuaccaugggccagaucaucaccuucuuccaggaggugccccacgugaucgaggaggugaugaacaucgugcugaucgcccugagccugcuggccauccugaagggcaucuacaacguggccaccugcggccuguucggccuggugagcuuccugcugcugugcggcagaagcugcagcaccaccuacaagggcguguacgagcugcagacccuggagcuggacauggccagccugaacaugugcaugccccugagcugcaccaagaacaacagccaccacuacaucauggugggcaacgagaccggccuggagcugacccugaccaacaccagcaucaucaaccacaaguucugcaaccugagcgacgcccacaagaagaaccuguacgaccacgcccugaugagcaucaucagcaccuuccaccugagcauccccaacuucaaccaguacgaggccaugagcugcgacuucaacggcggcaagaucagcgugcaguacaaccugagccacgccuacgccguggacgccgccaaccacugcggcaccaucgccaacggcgugcugcagaccuucaugagaauggccuggggcggcagcuacaucgcccuggacagcggcaagggcagcugggacugcaucaugaccagcuaccaguaccugaucauccagaacaccaccugggaggaccacugccaguucagcagacccagccccaucggcuaccugggccugcugagccagagaaccagagacaucuacaucagcagaagacugcugggcaccuucaccuggacccugagcgacagcgagggcaacgagacccccggcggcuacugccugaccagauggaugcugaucgaggccgagcugaagugcuucggcaacaccgccguggccaagugcaacgagaagcacgacgaggaguucugcgacaugcugagacuguucgacuucugcaagcaggccaucagaagacugaaggccgaggcccagaugagcauccagcugaucaacaaggccgugaacgcccugaucaacgaccagcugaucaugaagaaccaccugagagacaucaugggcauccccuacugcaacuacagcaaguacugcuaccugaaccacaccgugaccggcaagaccagccugcccagaugcugccuggugagcaacggcagcuaccugaacgagacccacuucagcgacgacaucgagcagcaggccgacaacaugaucaccgagcugcugcagaaggaguacaucgacagacagggcaagaccccccugggccugguggaccuguucguguucagcaccagcuucuaccugaucagcaucuuccugcaccuggugaagauccccacccacagacacgugaucggcaagcccugccccaagccccacagacugaaccacaugggcaucugcagcugcggccuguacaagcaccccggcgugcccgugaaguggaagagaugaggacuagucccuguucccagagcccacuuuuuuuucuuuuuuugaaauaaaauagccugucuuucagaucucaaaggcucuuuucagagccaccaaaaaaaaaaaaaaaaaaaaaaaaaaaaaaaaaaaaaaaaaaaaaaaaaaaaaaaaaaaaaaaaagaauu

SEQ ID NO: 40149 - RNA, 1714 nt, Artificial Sequence
  mRNA product Design a-1 (hSL-A64-N5) comprising derived and/or modified sequence from LASV(LASV1000-NIG-2009;Clade II)__AIT17782__GPCmut12 (opt4)
aggagagucccgcagucggcguccagcggcucugcuuguucgugugugugucguugcaggccuuauucaagcuuaccaugggccagaucaucaccuucuuccaggaggugccccacgugaucgaggaggugaugaacaucgugcugaucgcccugagccugcuggccauccugaagggcaucuacaacguggccaccugcggccuguucggccuggugagcuuccugcugcugugcggcagaagcugcagcaccaccuacaagggcguguacgagcugcagacccuggagcuggacauggccagccugaacaugugcaugccccugagcugcaccaagaacaacagccaccacuacaucauggugggcaacgagaccggccuggagcugacccugaccaacaccagcaucaucaaccacaaguucugcaaccugagcgacgcccacaagaagaaccuguacgaccacgcccugaugagcaucaucagcaccuuccaccugagcauccccaacuucaaccaguacgaggccaugagcugcgacuucaacggcggcaagaucagcgugcaguacaaccugagccacaccuacgccguggacgccgccaaccacugcggcaccaucgccaacggcgugcugcagaccuucaugagaauggccuggggcggcagcuacaucgcccuggacagcggcaagggcagcugggacugcaucaugaccagcuaccaguaccugaucauccagaacaccaccugggaggaccacugccaguucagcagacccagccccaucggcuaccugggccugcugagccagagaaccagagacaucuacaucagcagaagacugcugggcaccuucaccuggacccugagcgacagcgagggcaacgagacccccggcggcuacugccugaccagauggaugcugaucgaggccgagcugaagugcuucggcaacaccgccguggccaagugcaacgagaagcacgacgaggaguucugcgacaugcugagacuguucgacuucugcaagcaggccaucaagagacugaagaccgaggcccagaugagcauccagcugaucaacaaggccgugaacgcccugaucaacgaccagcugaucaugaagaaccaccugagagacaucaugggcauccccuacugcaacuacagcaaguacugcuaccugaaccacaccgugaccggcaagaccagccugcccagaugcugccuggugagcaacggcagcuaccugaacgagacccacuucagcgacgacaucgagcagcaggccgacaacaugaucaccgagcugcugcagaaggaguacaucgacagacagggcaagaccccccugggccugguggaccuguucguguucagcaccagcuucuaccugaucagcaucuuccugcaccuggugaagauccccacccacagacacguggugggcaagcccugccccaagccccacagacugaaccacaugggcaucugcagcugcggccuguacaagcaccccggcgugcccgugaaguggaagagaugaggacuagucccuguucccagagcccacuuuuuuuucuuuuuuugaaauaaaauagccugucuuucagaucucaaaggcucuuuucagagccaccaaaaaaaaaaaaaaaaaaaaaaaaaaaaaaaaaaaaaaaaaaaaaaaaaaaaaaaaaaaaaaaaagaauu

SEQ ID NO: 40150 - RNA, 1714 nt, Artificial Sequence
  mRNA product Design a-1 (hSL-A64-N5) comprising derived and/or modified sequence from LASV(LASV221-NIG-2010;Clade II)__AIT17624__GPCmut12 (opt4)
aggagagucccgcagucggcguccagcggcucugcuuguucgugugugugucguugcaggccuuauucaagcuuaccaugggccagaucaucaccuucuuccaggaggugccccacgugaucgaggaggugaugaacaucgugcugaucgcccugagccugcuggccauccugaagggcaucuacaacguggccaccugcggccuguucggccuggugagcuuccugcugcugugcggcagaagcugcagcaccaccuacaagggcguguacgagcugcagacccuggagcuggacauggccagccugaacaugugcaugccccugagcugcaccaagaacaacagccaccacuacaucauggugggcaacgagaccggccuggagcugacccugaccaacaccagcaucaucaaccacaaguucugcaaccugagcgacgcccacaagaagaaccuguacgaccacgcccugaugagcaucaucagcaccuuccaccugagcauccccaacuucaaccaguacgaggccaugagcugcgacuucaacggcggcaagaucagcgugcaguacaaccugagccacaccuacgccaucgacgccgccaaccacugcggcaccaucgccaacggcgugcugcagaccuucaugagaauggccuggggcggcagcuacaucgcccuggacagcggcaagggcagcugggacugcaucaugaccagcuaccaguaccugaucauccagaacaccaccugggaggaccacugccaguucagcagacccagccccaucggcuaccugggccugcugagccagagaaccagagacaucuacaucagcagaagacugcugggcaccuucaccuggacccugagcgacagcgagggcaacgagacccccggcggcuacugccugaccagauggaugcugaucgaggccgagcugaagugcuucggcaacaccgccguggccaagugcaacgagaagcacgacgaggaguucugcgacaugcugagacuguucgacuucugcaagcaggccaucagaagacugaagaccgaggcccagaugagcauccagcugaucaacaaggccgugaacgcccugaucaacgaccagcugaucaugaagaaccaccugagagacaucaugggcauccccuacugcaacuacagcaaguacugcuaccugaaccacaccgugaccggcaagaccagccugcccagaugcugccuggugagcaacggcagcuaccugaacgagacccacuucagcgacgacaucgagcagcaggccgacaacaugaucaccgagaugcugcagaaggaguacauggacagacagggcaagaccccccugggccugguggaccuguucguguucagcaccagcuucuaccugaucagcaucuuccugcaccuggugaagauccccacccacagacacgugaucggcaagcccugccccaagccccacagacugaaccacaugggcaucugcagcugcggccuguacaagcaccccggcgugcccgugaaguggaagagaugaggacuagucccuguucccagagcccacuuuuuuuucuuuuuuugaaauaaaauagccugucuuucagaucucaaaggcucuuuucagagccaccaaaaaaaaaaaaaaaaaaaaaaaaaaaaaaaaaaaaaaaaaaaaaaaaaaaaaaaaaaaaaaaaagaauu

SEQ ID NO: 40151 - RNA, 1714 nt, Artificial Sequence
  mRNA product Design a-1 (hSL-A64-N5) comprising derived and/or modified sequence from LASV(LASV237-NIG-2010;Clade II)__AIT17638__GPCmut12 (opt4)
aggagagucccgcagucggcguccagcggcucugcuuguucgugugugugucguugcaggccuuauucaagcuuaccaugggccagaucaucaccuucuuccaggaggugccccacgugaucgaggaggugaugaacaucgugcugaucgcccugagccugcuggccauccugaagggcaucuacaacguggccaccugcggccuguucggccuggugagcuuccugcugcugugcggcagaagcugcagcaccaccuacaagggcguguacgagcugcagacccuggagcuggacauggccagccugaacaugugcaugccccugagcugcaccaagaacaacagccaccacuacaucauggugggcaacgagaccggccuggagcugacccugaccaacaccagcaucaucaaccacaaguucugcaaccugagcgacgcccacaagaaggaccuguacgaccacgcccugaugagcaucaucagcaccuuccaccugagcauccccaacuucaaccaguacgaggccaugagcugcgacuucaacggcggcaagaucagcgugcaguacaaccugagccacaccuacgccguggacgccgccaaccacugcggcaccaucgccaacggcgugcugcagaccuucaugagaauggccuggggcggcagcuacaucgcccuggacagcggcaagggcagcugggacugcaucaugaccagcuaccaguaccugaucauccagaacaccaccugggaggaccacugccaguucagcagacccagccccaucggcuaccugggccugcugagccagagaaccagagacaucuacaucagcagaagacugcugggcaccuucaccuggacccugagcgacagcgagggcaacgagacccccggcggcuacugccugaccagauggaugcugaucgaggccgagcugaagugcuucggcaacaccgccguggccaagugcaacgagaagcacgacgaggaguucugcgacaugcugagacuguucgacuucugcaagcaggccaucagaagacugaagaccgaggcccagaugagcauccagcugaucaacaaggccgugaacgcccugaucaacgaccagcugaucaugaagaaccaccugagagacaucaugggcauccccuacugcaacuacagcaaguacugcuaccugaaccacaccgugaccggcaagaccagccugcccagaugcugccuggugagcaacggcagcuaccugaacgagacccacuucagcgacgacaucgagcagcaggccgacaacaugaucaccgagcugcugcagaaggaguacauggacagacagggcaagaccccccugggccugguggaccuguucguguucagcaccagcuucuaccugaucagcaucuuccugcaccugaucaagauccccacccacagacacaucaccggcaagcccugccccaagccccacagacugaaccacaugggcaucugcagcugcggccuguacaagcaccccggcgugcccgugaaguggaagagaugaggacuagucccuguucccagagcccacuuuuuuuucuuuuuuugaaauaaaauagccugucuuucagaucucaaaggcucuuuucagagccaccaaaaaaaaaaaaaaaaaaaaaaaaaaaaaaaaaaaaaaaaaaaaaaaaaaaaaaaaaaaaaaaaagaauu

SEQ ID NO: 40152 - RNA, 1714 nt, Artificial Sequence
  mRNA product Design a-1 (hSL-A64-N5) comprising derived and/or modified sequence from LASV(LASV253-NIG-2011;Clade II)__AIT17670__GPCmut12 (opt4)
aggagagucccgcagucggcguccagcggcucugcuuguucgugugugugucguugcaggccuuauucaagcuuaccaugggccagaucaucaccuucuuccaggaggugccccacgugaucgaggaggugaugaacaucgugcugaucgcccugagccugcuggccauccugaagggcaucuacaacguggccaccugcggccuguucggccuggugagcuuccugcugcugugcggcagaagcugcagcaccaccuacaagggcguguacgagcugcagacccuggagcuggacauggccagccugaacaugugcaugccccugagcugcaccaagaacaacagccaccacuacaucauggugggcaacgagaccggccuggagcugacccugaccaacaccagcaucaucaaccacaaguucugcaaccugagcgacgcccacaagaagaaccuguacgaccacgcccugaugagcaucaucagcaccuuccaccugagcauccccaacuucaaccaguacgaggccaugagcugcgacuucaacggcggcaagaucagcgugcaguacaaccugagccacaccuacgccguggacgccgccaaccacugcggcaccaucgccaacggcgugcugcagaccuucaugagaauggccuggggcggcagcuacaucgcccuggacagcggcaagggcagcugggacugcaucaugaccagcuaccaguaccugaucauccagaacaccaccugggaggaccacugccaguucagcagacccagccccaucggcuaccugggccugcugagccagagaaccagagacaucuacaucagcagaagacugcugggcaccuucaccuggacccugagcgacagcgagggcaacgagacccccggcggcuacugccugaccagauggaugcugaucgaggccgagcugaagugcuucggcaacaccgccguggccaagugcaacgagaagcacgacgaggaguucugcgacaugcugagacuguucgacuucugcaagcaggccaucagaagacugaaggccgaggcccagaugagcauccagcugaucaacaaggccgugaacgcccugaucaacgaccagcugaucaugaagaaccaccugagagacaucaugggcauccccuacugcaacuacagcaaguacugcuaccugaaccacaccgugaccggcagaaccagccugcccagaugcugccuggugagcaacggcagcuaccugaacgagacccacuucagcgacgacaucgagcagcaggccgacaacaugaucaccgagcugcugcagaaggaguacaucgacagacagggcaagaccccccugggccugguggaccuguucguguucagcaccagcuucuaccugaucagcaucuuccugcaccuggugaagauccccacccacagacacaucaucggcaagcccugccccaagccccacagacugaaccacaugggcaucugcagcugcggccuguacaagcaccccggcgugcccgugaaguggaagagaugaggacuagucccuguucccagagcccacuuuuuuuucuuuuuuugaaauaaaauagccugucuuucagaucucaaaggcucuuuucagagccaccaaaaaaaaaaaaaaaaaaaaaaaaaaaaaaaaaaaaaaaaaaaaaaaaaaaaaaaaaaaaaaaaagaauu

SEQ ID NO: 40153 - RNA, 1714 nt, Artificial Sequence
  mRNA product Design a-1 (hSL-A64-N5) comprising derived and/or modified sequence from LASV(LASV254-NIG-2011;Clade II)__AIT17674__GPCmut12 (opt4)
aggagagucccgcagucggcguccagcggcucugcuuguucgugugugugucguugcaggccuuauucaagcuuaccaugggccagaucaucaccuucuuccaggaggugccccacgugaucgaggaggugaugaacaucgugcugaucgcccugagccugcuggccauccugaagggcaucuacaacguggccaccugcggccuguucggccuggugagcuuccugcugcugugcggcagaagcugcagcaccaccuacaagggcguguacgagcugcagacccuggagcuggacaugaccaaccugaacaugugcaugccccugagcugcaccaagaacaacagccaccacuacaucauggugggcaacgagaccggccuggagcugacccugaccaacaccagcaucaucaaccacaaguucugcaaccugagcgacgcccacaagaagaaccuguacaaccacgcccugaugagcaucaucagcaccuuccaccugagcauccccaacuucaaccaguacgaggccaugagcugcgacuucaacggcggcaagaucagcgugcaguacaaccugagccacagcuacgccguggacgccgccaaccacugcggcaccaucgccaacggcgugcugcagaccuucaugagaauggccuggggcggcagcuacaucgcccuggacagcggcaagggcaacugggacugcaucaugaccagcuaccaguaccugaucauccagaacaccaccugggaggaccacugccaguucagcagacccagccccaucggcuaccugggccugcugagccagagaaccagagacaucuacaucagcagaagacugcugggcaccuucaccuggacccugagcgacagcgagggcaacgagacccccggcggcuacugccugaccagauggaugcugaucgaggccgagcugaagugcuucggcaacaccgccguggccaagugcaacgagaagcacgacgaggaguucugcgacaugcugagacuguucgacuucugcaagcaggccaucagaagacugaagaccgaggcccaggccaacauccagcugaucaacaaggccgugaacgcccugaucaacgaccagcugaucaugaagaaccaccugagagacaucaugggcauccccuacugcaacuacagcaaguacugcuaccugaaccacaccgugaccggcaagaccagccugcccagaugcugccuggugagcaacggcagcuaccugaacgagacccacuucagcgacgacaucgagcagcaggccgacaacaugaucaccgagcugcugcagaaggaguacauggacagacagggcaagaccccccugggccugguggaccuguucguguucagcaccagcuucuaccugaucagcaucuuccugcaccuggugaagauccccacccacagacacgugaucggcaagcccugccccaagccccacagacugaaccacaugggcaucugcagcugcggccuguacaagcaccccggcgugcccgugaaguggaagagaugaggacuagucccuguucccagagcccacuuuuuuuucuuuuuuugaaauaaaauagccugucuuucagaucucaaaggcucuuuucagagccaccaaaaaaaaaaaaaaaaaaaaaaaaaaaaaaaaaaaaaaaaaaaaaaaaaaaaaaaaaaaaaaaaagaauu

SEQ ID NO: 40154 - RNA, 1714 nt, Artificial Sequence
  mRNA product Design a-1 (hSL-A64-N5) comprising derived and/or modified sequence from LASV(Nig08-A19;Clade III)__ADU56618__GPCmut12 (opt4)
aggagagucccgcagucggcguccagcggcucugcuuguucgugugugugucguugcaggccuuauucaagcuuaccaugggccagaucgugaccuucuuccaggaggugccccacgugaucgaggaggugaugaacaucgugcugaucgcccugagcauccuggccauccugaagggccuguacaacaucgccaccugcggccugaucggccuggugaccuuccugcugcugagcggcagaagcugcagcaugaccuacaagggcguguacgagcugcagacccuggagcugaacaugaacacccugaacaugugcaugccccugagcugcaccaagaacaacagccaccacuacaucauggugggcaacgagaccggccuggagcugacccugaccaacaccagccugcugcaccacaaguucugcaaccugagcgacgcccacaagaagaaccuguacgaccacacccugaugagcaucaucagcaccuuccaccugagcauccccaacuucaaccaguacgaggccaugagcugcgacuucaacggcggcaagaucaccgugcaguacaaccugagccacagcuacgccaucgacgccgccaaccacugcggcaccguggccaacggcgugcugcagaccuucaugagaauggccuggggcggcagcuacaucgcccuggacagcggcagaggcaagugggacugcaucaugaccagcuaccaguaccugaucauccagaacaccaccugggaggaccacugccaguucagcagacccagccccaucggcuaccugggccugcugagccagagaaccagagacaucuacaucagcagaagacugcugggcaccuucaccuggacccugagcgacagcgagggcaacgagacccccggcggcuacugccugaccagauggaugcugaucgaggccgagcugaagugcuucggcaacaccgccguggccaagugcaacgagaagcacgacgaggaguucugcgacaugcugagacuguucgacuucugcaagcaggccaucagaagacugaaggccgaggcccagaugagcauccagcugaucaacaaggccgugaacgcccugaucaacgaccagcugaucaugaagaaccaccugagagacaucaugggcauccccuacugcaacuacagcaaguacugcuaccugaaccacaccagcaccggcagaaccagccugcccagaugcugccuggugagcaacggcagcuaccugaacgagacccacuucagcgacgacaucgagcagcaggccgacaacaugaucaccgagaugcugcagaaggaguaccuggacagacagggcaagaccccccugggccugguggaccuguucguguucagcaccagcuucuaccugaucagcaucuuccugcaccuggugaagauccccacccacagacacaucgugggcaagcccugccccaagccccacagacugaaccacaugggcaucugcagcugcggccuguacaagcagcccggcgugcccgugagauggaagagaugaggacuagucccuguucccagagcccacuuuuuuuucuuuuuuugaaauaaaauagccugucuuucagaucucaaaggcucuuuucagagccaccaaaaaaaaaaaaaaaaaaaaaaaaaaaaaaaaaaaaaaaaaaaaaaaaaaaaaaaaaaaaaaaaagaauu

SEQ ID NO: 40155 - RNA, 1717 nt, Artificial Sequence
  mRNA product Design a-1 (hSL-A64-N5) comprising derived and/or modified sequence from LASV(G1180-SLE-2010;Clade IV)__AIT17168__GPCmut12 (opt4)
aggagagucccgcagucggcguccagcggcucugcuuguucgugugugugucguugcaggccuuauucaagcuuaccaugggccagaucgugaccuucuuccaggaggugccccacgugaucgaggaggugaugaacaucgugcugaucgcccugagcauccuggccgugcugaagggccuguacaacuucgccaccugcggccuggugggccugcugaccuuccugcugcugugcggcagaagcugcaccgccagcagauacaagggcguguacgagcugcagacccuggagcugaacauggagacccugaacaugugcaugccccugagcugcaccaagaacaacagccaccacuacaucauggugggcaacgagaccggccuggagcugacccugaccaacaccagcaucaucaaccacaaguucugcaaccugagcgacgcccacaagaagaaccuguacgaccacgcccugaugagcaucaucagcaccuuccaccugagcauccccaacuucaaccaguacgaggccaugagcugcgacuucaacggcggcaagaucagcgugcaguacaaccugagccacagcuacgccggcgacgccgccaaccacugcggcaccguggccaacggcgugcugcagaccuucaugagaauggccuggggcggcagcuacaucgcccuggacagcggccacggcagcugggacugcaucaugaccagcuaccaguaccugaucauccagaacaccaccugggaggaccacugccaguucagcagacccagccccaucggcuaccugggccugcugagccagagaaccagagacaucuacaucagcagaagacugcugggcaccuucaccuggacccugagcgacagcgagggcaaggacacccccggcggcuacugccugaccagauggaugcugaucgaggccgagcugaagugcuucggcaacaccgccguggccaagugcaacgagaagcacgacgaggaguucugcgacaugcugagacuguucgacuucugcaagcaggccauccagagacugaaggccgaggcccagaugagcauccagcugaucaacaaggccgugaacgcccugaucaacgaccagcugaucaugaagaaccaccugagagacaucaugggcauccccuacugcaacuacagcaaguacugcuaccugaaccacaccaccaccggcaagaccagccugcccaagugcugccuggugagcaacggcagcuaccugaacgagacccacuucagcgacgacaucgagcagcaggccgacaacaugaucaccgagaugcugcagaaggaguacauggagagacagggcaagaccccccugggccugguggaccuguucguguucagcaccagcuucuaccugaucagcaucuuccugcaccuggugaagauccccacccacagacacaucgugggcaagagcugccccaagccccacagacugaaccacaugggcaucugcagcugcggccuguacaagcagcccggcgugcccgugaaguggaagagaugaggacuagucccuguucccagagcccacuuuuuuuucuuuuuuugaaauaaaauagccugucuuucagaucucaaaggcucuuuucagagccaccaaaaaaaaaaaaaaaaaaaaaaaaaaaaaaaaaaaaaaaaaaaaaaaaaaaaaaaaaaaaaaaaagaauu

SEQ ID NO: 40156 - RNA, 1717 nt, Artificial Sequence
  mRNA product Design a-1 (hSL-A64-N5) comprising derived and/or modified sequence from LASV(G1442-SLE-2011;Clade IV)__AIT17180__GPCmut12 (opt4)
aggagagucccgcagucggcguccagcggcucugcuuguucgugugugugucguugcaggccuuauucaagcuuaccaugggccagaucgugaccuucuuccaggaggugccccacgugaucgaggaggugaugaacaucgugcugaucgcccugagcauccuggccgugcugaagggccuguacaacguggccaccugcggccugaucggccuggugaccuuccugcugcugugcggcagaagcugcaccaccacccuguacaagggcguguacgagcugcagacccuggagcugaacauggagacccugaacaugugcaugccccugagcugcaccaagaacaacagccaccacuacaucagagugggcaacgagaccggccuggagcugacccugaccaacaccagcaucaucaaccacaaguucugcaaccugagcgacgcccacaagaagaaccuguacgaccacgcccugaugagcaucaucagcaccuuccaccugagcauccccaacuucaaccaguacgaggccaugagcugcgacuucaacggcggcaagaucagcgugcaguacaaccugagccacagcuacgccggcgacgccgccaaccacugcggcaccguggccaacggcgugcugcagaccuucaugagaauggccuggggcggcagcuacaucgcccuggacagcggcagaggcaacugggacugcaucaugaccagcuaccaguaccugaucauccagaacaccaccugggacgaccacugccaguucagcagacccagccccaucggcuaccugggccugcugagccagagaaccagagacguguacaucagcagaagacugcugggcaccuucaccuggacccugagcgacagcgagggcaaggacacccccggcggcuacugccugaccagauggaugcugaucgaggccgagcugaagugcuucggcaacaccgccguggccaagugcaacgagaagcacgacgaggaguucugcgacaugcugagacuguucgacuucugcaagcaggccauccagagacugaaggccgaggcccagaugagcauccagcugaucaacaaggccgugaacgcccugaucaacgaccagcugaucaugaagaaccaccugagagacaucaugggcauccccuacugcaacuacagcaaguacugcuaccugaacaacaccgccaccggcaagaccagccugcccaagugcugccugaucagcaacggcagcuaccugaacgagacccacuucagcgacgacaucgagcaggaggccgacaacaugaucaccgagaugcugcagaaggaguacauggagagacagggcaagaccccccugggccugguggaccuguucguguucagcaccagcuucuaccugaucagcaucuuccugcaccuggugaagauccccacccacagacacaucgugggcaagagcugccccaagccccacagacugaaccacaugggcaucugcagcugcggccuguacaagcagcccggcgugcccgugagauggaagagaugaggacuagucccuguucccagagcccacuuuuuuuucuuuuuuugaaauaaaauagccugucuuucagaucucaaaggcucuuuucagagccaccaaaaaaaaaaaaaaaaaaaaaaaaaaaaaaaaaaaaaaaaaaaaaaaaaaaaaaaaaaaaaaaaagaauu

SEQ ID NO: 40157 - RNA, 1717 nt, Artificial Sequence
  mRNA product Design a-1 (hSL-A64-N5) comprising derived and/or modified sequence from LASV(G3010-SLE-2013;Clade IV)__AIT17344__GPCmut12 (opt4)
aggagagucccgcagucggcguccagcggcucugcuuguucgugugugugucguugcaggccuuauucaagcuuaccaugggccagaucgugaccuucuuccaggaggugccccacgugaucgaggaggugaugaacaucgugcugaucgcccugagcauccuggccgugcugaagggccuguacaacuucgccaccugcggccuggugggccuggugaccuuccugcugcugugcggcagaagcugcaccaccagccuguacaagggcguguacgagcugcagacccuggagcugaacauggagacccugaacaugugcaugccccugagcugcaccaagaacaacagccaccacuacaucauggugggcaacgagaccggccuggagcugacccugaccaacaccagcaucaucaaccacaaguucugcaaccugagcgacgcccacaagaagaaccuguacaaccacgcccugaugagcaucaucagcaccuuccaccugagcauccccaacuucaaccaguacgaggccaugagcugcgacuucaacggcggcaagaucagcgugcaguacaaccugagccacagcuacgccggcgacgccgccagccacugcggcaccguggccaacggcgugcugcagaccuucaugagaauggccuggggcggcagcuacaucgcccuggacagcggcuacggcaagugggacugcaucaugaccagcuaccaguaccugaucauccagaacaccaccugggaggaccacugccaguucagcagacccagccccaucggcuaccugggccugcugagccagagaaccagagacaucuacaucagcagaagacugcugggcaccuucaccuggacccugagcgacagcgagggcaaggacacccccggcggcuacugccugaccagauggaugcugaucgaggccgagcugaagugcuucggcaacaccgccguggccaagugcaacgagaagcacgacgaggaguucugcgacaugcugagacuguucgacuucugcaagcaggccauccagagacugaagaccgaggcccagaugagcauccagcugaucaacaaggccgugaacgcccugaucaacgaccagcugaucaugaagaaccaccugagagacaucaugggcauccccuacugcaacuacagcaaguacugcuaccugaaccacaccaccaccggcaagaccagccugcccaagugcugccuggugagcaacggcagcuaccugaacgagacccacuucagcgacgacaucgagcagcaggccgacaacaugaucaccgagaugcugcagaaggaguacauggagagacagggcaagaccccccugggccugguggaccuguucguguucagcaccagcuucuaccugaucagcaucuuccugcaccuggugaagauccccacccacagacacaucgugggcaagagcugccccaagccccacagacugaaccacaugggcaucugcagcugcggccuguacaagcagcccggcgugcccgugagauggaagagaugaggacuagucccuguucccagagcccacuuuuuuuucuuuuuuugaaauaaaauagccugucuuucagaucucaaaggcucuuuucagagccaccaaaaaaaaaaaaaaaaaaaaaaaaaaaaaaaaaaaaaaaaaaaaaaaaaaaaaaaaaaaaaaaaagaauu

SEQ ID NO: 40158 - RNA, 1717 nt, Artificial Sequence
  mRNA product Design a-1 (hSL-A64-N5) comprising derived and/or modified sequence from LASV(G502-SLE-2009;Clade IV)__AIT17126__GPCmut12 (opt4)
aggagagucccgcagucggcguccagcggcucugcuuguucgugugugugucguugcaggccuuauucaagcuuaccaugggccagaucgugaccuucuuccaggaggugccccacgugaucgaggaggugaugaacaucgugcugaucgcccugagcauccuggccgugcugaagggccuguacaacuucgccaccugcggccuggugggccugcugaccuuccugcugcugugcggcagaagcugcaccaccggccuguacaagggcguguacgagcugcagacccuggagcugaacauggagacccugaacaugugcaugccccugagcugcaccaagaacaacagccaccacuacaucauggugggcaacgagaccggccuggagcugacccugaccaacaccagcaucaucaaccacaaguucugcaaccugagcgacgcccacaagaagaaccuguacgaccacgcccugaugagcaucaucagcaccuuccaccugagcauccccaacuucaaccaguacgaggccaugagcugcgacuucaacggcggcaagaucagcgugcaguacaaccugagccacagcuacgccggcgacgccgccgaccacugcggcaccguggccaacggcgugcugcagaccuucaugagaauggccuggggcggcagcuacaucgcccuggacagcggcagaggcagaugggacugcaucaugaccagcuaccaguaccugaucauccagaacaccaccugggaggaccacugccaguucagcagacccagccccaucggcuaccugggccugcugagccagagaaccagagacaucuacaucagcagaagacugcugggcaccuucaccuggacccugagcgacagcgagggcaaggacacccccggcggcuacugccugaccagauggaugcugaucgaggccgagcugaagugcuucggcaacaccgccguggccaagugcaacgagaagcacgacgaggaguucugcgacaugcugagacuguucgacuucugcaagcaggccauccagagacugaaggccgaggcccagaugagcauccagcugaucaacaaggccgugaacgcccugaucaacgaccagcuggugaugaagaaccaccugagagacaucaugggcauccccuacugcaacuacagcagauacugcuaccugaaccacaccaccaccggcagaaccagccugcccaagugcugccuggugagcaacggcagcuaccugaacgagacccacuucagcgacgacaucgagcagcaggccgacaacaugaucaccgagaugcugcagaaggaguacauggagagacagggcaagaccccccugggccugguggaccuguucguguucagcaccagcuucuaccugaucagcaucuuccugcaccuggugaagauccccacccacagacacaucgugggcaagagcugccccaagccccacagacugaaccacaugggcaucugcagcugcggccuguacaagcagcccggcgugcccgugaaguggaagagaugaggacuagucccuguucccagagcccacuuuuuuuucuuuuuuugaaauaaaauagccugucuuucagaucucaaaggcucuuuucagagccaccaaaaaaaaaaaaaaaaaaaaaaaaaaaaaaaaaaaaaaaaaaaaaaaaaaaaaaaaaaaaaaaaagaauu

SEQ ID NO: 40159 - RNA, 1717 nt, Artificial Sequence
  mRNA product Design a-1 (hSL-A64-N5) comprising derived and/or modified sequence from LASV(G733-SLE-2010;Clade IV)__AIT17154__GPCmut12 (opt4)
aggagagucccgcagucggcguccagcggcucugcuuguucgugugugugucguugcaggccuuauucaagcuuaccaugggccagaucgugaccuucuuccaggaggugccccacgugaucgaggaggugaugaacaucgugcugaucgcccugagcauccuggccgugcugaagggccuguacaacuucgccaccugcggcaucgugggccuggugagcuuccugcugcugugcggcagaagcugcaccaccagccuguacaagggcguguacgagcugcagacccuggagcugaacauggagacccugaacaugugcaugccccugagcugcaccaagaacaacagccaccacuacaucauggugggcaacgagaccggccuggagcugacccugaccaacaccagcaucaucaaccacaaguucugcaaccugagcgacgcccacaagaagaaccuguacgaccacgcccugaugagcaucaucagcaccuuccaccugagcauccccaacuucaaccaguacgaggccaugagcugcgacuucaacggcggcaagaucagcgugcaguacaaccugagccacagcuacgccggcgacgccgccaaccacugcggcaccaucgccaacggcgugcugcagaccuucaugagaauggccuggggcggcagcuacaucgcccuggacagcggcagagacagaugggacugcaucaugaccagcuaccaguaccugaucauccagaacaccaccugggaggaccacugccaguucagcagacccagccccaucggcuaccugggccugcugagccagagaaccagagacaucuacaucagcagaagacugcugggcaccuucaccuggacccugagcgacagcgagggcaaggacacccccggcggcuacugccugaccagauggaugcugaucgaggccgagcugaagugcuucggcaacaccgccguggccaagugcaacgagaagcacgacgaggaguucugcgacaugcugagacuguucgacuucugcaagcaggccauccagagacugaaggccgaggcccagaugagcauccagcugaucaacaaggccgugaacgcccugaucaacgaccagcugaucaugaagaaccaccugagagacaucaugggcauccccuacugcaacuacagcaaguacugcuaccugaaccacaccaccaccggcaagaccagccugcccaagugcugccuggugagcaacggcagcuaccugaacgagacccacuucagcgacgacaucgagcagcaggccgacaacaugaucaccgagaugcugcagaaggaguacauggagagacagggcaagaccccccugggccugguggaccuguucguguucagcaccagcuucuaccugaucagcaucuuccugcaccuggugaagauccccacccacagacacguggugggcaagagcugccccaagccccacagacugaaccacaugggcaucugcagcugcggccuguacggccagcccggcgugcccgugaaguggaagagaugaggacuagucccuguucccagagcccacuuuuuuuucuuuuuuugaaauaaaauagccugucuuucagaucucaaaggcucuuuucagagccaccaaaaaaaaaaaaaaaaaaaaaaaaaaaaaaaaaaaaaaaaaaaaaaaaaaaaaaaaaaaaaaaaagaauu

SEQ ID NO: 40160 - RNA, 1717 nt, Artificial Sequence
  mRNA product Design a-1 (hSL-A64-N5) comprising derived and/or modified sequence from MOPV/LASV reassortant(IGS-1;Clade IV)__AFY05576__GPCmut12 (opt4)
aggagagucccgcagucggcguccagcggcucugcuuguucgugugugugucguugcaggccuuauucaagcuuaccaugggccagaucgugaccuucuuccaggaggugccccacgugaucgaggaggugaugaacaucgugcugaucgcccugagcgugcuggccgugcugaagggccuguacaacuucgccaccugcggccuggugggccuggugaccuuccugcugcugugcggcagaagcugcaccaccagccuguacaagggcguguacgagcugcagacccuggagcugaacauggagacccugaacaugugcaugccccugagcugcaccaagaacaacagccaccacuacaucauggugggcaacgagaccggccuggagcugacccugaccaacaccagcaucaucaaccacaaguucugcaaccugagcgacgcccacaagaagaaccuguacgaccacgcccugaugagcaucaucagcaccuuccaccugagcauccccaacuucaaccaguacgaggccaugagcugcgacuucaacggcggcaagaucagcgugcaguacaaccugagccacagcuacgccggcgacgccgccaaccacugcggcaccguggccaacggcgugcugcagaccuucaugagaauggccuggggcggcagcuacaucgcccuggacagcggcagaggcaacugggacugcaucaugaccagcuaccaguaccugaucauccagaacaccaccugggaggaccacugccaguucagcagacccagccccaucggcuaccugggccugcugagccagagaaccagagacaucuacaucagcagaagacugcugggcaccuucaccuggacccugagcgacagcgagggcgaggacacccccggcggcuacugccugaccagauggaugcugaucgaggccgagcugaagugcuucggcaacaccgccguggccaagugcaacgagaagcacgacgaggaguucugcgacaugcugagacuguucgacuucugcaagcaggccauccagagacugaaggccgaggcccagaugagcauccagcugaucaacaaggccgugaacgcccugaucaacgaccagcugaucaugaagaaccaccugagagacaucaugggcauccccuacugcaacuacagcaaguacugcuaccugaaccacaccaccaccggcagaaccagccugcccaagugcugccuggugagcaacggcagcuaccugaacgagacccacuucagcgacgacaucgagcagcaggccgacaacaugaucaccgagaugcugcagaaggaguacauggagagacagggcaagaccccccugggccugguggaccuguucguguucagcaccagcuucuaccugaucagcaucuuccugcaccuggugaagauccccacccacagacacaucgugggcaagagcugccccaagccccacagacugaaccacaugggcaucugcagcugcggccuguacaagcagcccggcgugcccgugaaguggaagagaugaggacuagucccuguucccagagcccacuuuuuuuucuuuuuuugaaauaaaauagccugucuuucagaucucaaaggcucuuuucagagccaccaaaaaaaaaaaaaaaaaaaaaaaaaaaaaaaaaaaaaaaaaaaaaaaaaaaaaaaaaaaaaaaaagaauu

SEQ ID NO: 40161 - RNA, 1717 nt, Artificial Sequence
  mRNA product Design a-1 (hSL-A64-N5) comprising derived and/or modified sequence from LASV(LM765-SLE-2012;Clade IV)__AIT17814__GPCmut12 (opt4)
aggagagucccgcagucggcguccagcggcucugcuuguucgugugugugucguugcaggccuuauucaagcuuaccaugggccagaucgugaccuucuuccaggaggugccccacgugaucgaggaggugaugaacaucgugcugaucgcccugagcauccuggccgugcugaagggccuguacaacuucgccaccugcggccuggugggccuggugaccuuccugcugcugugcggcagaagcugcaccaccagccuguacaagggcguguacgagcugcagacccuggagcugaacauggagacccugaacaugugcaugccccugagcugcaccaagaacaacagccaccacuacaucauggugggcaacgagaccggccuggagcugacccugaccaacaccagcaucaucgaccacaaguucugcaaccugagcgacgcccacagaaagaaccuguacgaccacgcccugaugagcaucaucagcaccuuccaccugagcauccccaacuucaaccaguacgaggccaugagcugcgacuucaacggcggcaagaucagcgugcaguacaaccugagccacagcuacgccaaggacgccgccgaccacugcggcaccguggccaacggcgugcugcagaccuucaugagaauggccuggggcggcagcuacaucgcccuggacagcggcagaggcagaugggacugcaucaugaccagcuaccaguaccugaucauccagaacaccaccugggaggaccacugccaguucagcagacccagccccaucggcuaccugggccugcugagccagagaaccagagacaucuacaucagcagaagacugcugggcaccuucaccuggacccugagcgacagcgagggcaaggacacccccggcggcuacugccugaccagauggaugcugaucgaggccgagcugaagugcuucggcaacaccgccguggccaagugcaacgagaagcacgacgaggaguucugcgacaugcugagacuguucgacuucugcaagcaggccauccagagacugaaggccgaggcccagaugagcauccagcugaucaacaaggccgugaacgcccugaucaacgaccagcugaucaugaagaaccaccugagagacaucaugggcauccccuacugcaacuacagcaaguacugcuaccugaaccacaccaccaccggcaagaccagccugcccaagugcugccuggugagcaacggcagcuaccugaacgagacccacuucagcgacgacaucgagcagcaggccgacaacaugaucaccgagaugcugcagaaggaguacauggagagacagggcaagaccccccugggccugguggaccuguucguguucagcaccagcuucuaccugaucagcaucuuccugcaccuggugaagauccccacccacagacacaucgugggcaagcccugccccaagccccacagacugaaccacaugggcaucugcagcugcggccuguacaagcagcccggcgugcccgugaaguggaagagaugaggacuagucccuguucccagagcccacuuuuuuuucuuuuuuugaaauaaaauagccugucuuucagaucucaaaggcucuuuucagagccaccaaaaaaaaaaaaaaaaaaaaaaaaaaaaaaaaaaaaaaaaaaaaaaaaaaaaaaaaaaaaaaaaagaauu

SEQ ID NO: 40162 - RNA, 1717 nt, Artificial Sequence
  mRNA product Design a-1 (hSL-A64-N5) comprising derived and/or modified sequence from LASV(LM776-SLE-2012;Clade IV)__AIT17824__GPCmut12 (opt4)
aggagagucccgcagucggcguccagcggcucugcuuguucgugugugugucguugcaggccuuauucaagcuuaccaugggccagaucgugaccuucuuccaggaggugccccacgugaucgaggaggugaugaacaucgugcugaucgcccugagcauccuggccgugcugaagggccuguacaacuucgccaccugcggccuggugggccuggugaccuuccugcugcugugcggcagaagcugcaccaccagcguguacaagggcguguacgagcugcagacccuggagcugaacauggagacccugaacaugugcaugccccugagcugcaccaagaacaacagccaccacuacaucauggugggcaacgagaccggccuggagcugacccugaccaacaccagcaucaucaaccacaaguucugcaaccugagcgacgcccacaagaagaaccuguacgaccacgcccugaugagcaucaucagcaccuuccaccugagcauccccaacuucaaccaguacgaggccaugagcugcgacuucaacggcggcaagaucagcgugcaguacaaccugagccacagcuacgccggcgacgccgccaaccacugcggcaccguggccaacggcgugcugcagaccuucaugagaauggccuggggcggcagcuacaucgcccuggacagcggccacggcaagugggacugcaucaugaccagcuaccaguaccugaucauccagaacaccaccugggaggaccacugccaguucagcagacccagccccaucggcuaccugggccugcugagccagagaaccagagacaucuacaucagcagaagacugcugggcaccuucaccuggacccugagcgacagcgagggcaaggacacccccggcggcuacugccugaccagauggaugcugaucgaggccgagcugaagugcuucggcaacaccgccguggccaagugcaacgagaagcacgacgaggaguucugcgacaugcugagacuguucgacuucugcaagcaggccauccagagacugaaggccgaggcccagaugagcauccagcugaucaacaaggccgugaacgcccugaucaacgaccagcugaucaugaagaaccaccugagagacaucaugggcauccccuacugcaacuacagcaaguacugcuaccugaaccacaccaccaccggcaagaccagccugcccaagugcugccuggugagcaacggcagcuaccugaacgagacccacuucagcgacgacaucgagcagcaggccgacaacaugaucaccgagaugcugcagaaggaguacauggagagacagggcaagaccccccugggccugguggaccuguucguguucagcaccagcuucuaccugaucagcaucuuccugcaccuggugaagauccccacccacagacacaucgugggcaagagcugccccaagccccacagacugaaccacaugggcaucugcagcugcggccuguacaagcagcccggcgugcccgugagauggaagagaugaggacuagucccuguucccagagcccacuuuuuuuucuuuuuuugaaauaaaauagccugucuuucagaucucaaaggcucuuuucagagccaccaaaaaaaaaaaaaaaaaaaaaaaaaaaaaaaaaaaaaaaaaaaaaaaaaaaaaaaaaaaaaaaaagaauu

SEQ ID NO: 40163 - RNA, 1717 nt, Artificial Sequence
  mRNA product Design a-1 (hSL-A64-N5) comprising derived and/or modified sequence from LASV(Mad39;Clade IV)__ANH09722__GPCmut12 (opt4)
aggagagucccgcagucggcguccagcggcucugcuuguucgugugugugucguugcaggccuuauucaagcuuaccaugggccagaucgugaccuucuuccaggaggugccccacgugaucgaggaggugaugaacaucgugcugaucgcccugagcauccuggccgugcugaagggccuguacaacguggccaccugcggccugaucggccuggugaccuuccugcugcugugcggcagaagcugcaccaccacccuguacaagggcguguacgagcugcaggcccuggagcugaacauggagacccugaacaugugcaugccccugagcugcaccaagaacaacagccaccacuacaucagagugggcaacgagaccggccuggagcugacccugaccaacaccagccugaucaaccacaaguucugcaaccugagcgacgcccacaagaagaaccuguacgaccacgcccugaugagcaucaucagcaccuuccaccugagcauccccaacuucaaccaguacgaggccaugagcugcgacuucaacgacggcaagaucagcgugcaguacaaccugagccacaccuacgccggcgacaccgccaaccacugcggcaccguggccaacggcgugcugcagaccuucaugagaauggccuggggcggcagcuacaucgcccuggacagcggcagaggcggcugggacugcaucaugaccagcuaccaguaccugaucauccagaacaccaccugggaggaccacugccaguucagcagacccagccccaucggcuaccugggccugcugagccagagaaccagagacaucuacaucagcagaagacugcugggcaccuucaccuggacccugagcgacagcgagggcaaggacacccccggcggcuacugccugaccagauggaugcugaucgaggccgagcugaagugcuucggcaacaccgccguggccaagugcaacgagaagcacgacgaggaguucugcgacaugcugagacuguucgacuucugcaagcaggccauccagagacugaaggccgaggcccagaugagcauccagcugaucaacaaggccgugaacgcccugaucaacgaccagcugaucaugaagaaccaccugagagacaucaugggcauccccuacugcaacuacagcaaguacugcuaccugaaccacaccgugaccggcaagaccagccugcccaagugcugccuggugagcaacggcagcuaccugaacgagacccacuucagcgacgacaucgagcagcaggccgacaacaugaucaccgagaugcugcagaaggaguacauggagagacagggcaagaccccccugggccugguggaccuguucguguucagcaccagcuucuaccugaucagcaucuuccugcaccuggugaagauccccacccacagacacguggugggcaagcccugccccaagccccacagacugaaccacaugggcaucugcagcugcggcuucuacaagcagcccggcgugcccgugagauggaagagaugaggacuagucccuguucccagagcccacuuuuuuuucuuuuuuugaaauaaaauagccugucuuucagaucucaaaggcucuuuucagagccaccaaaaaaaaaaaaaaaaaaaaaaaaaaaaaaaaaaaaaaaaaaaaaaaaaaaaaaaaaaaaaaaaagaauu

SEQ ID NO: 40164 - RNA, 1717 nt, Artificial Sequence
  mRNA product Design a-1 (hSL-A64-N5) comprising derived and/or modified sequence from LASV(Z0947-SLE-2011;Clade IV)__AIT17840__GPCmut12 (opt4)
aggagagucccgcagucggcguccagcggcucugcuuguucgugugugugucguugcaggccuuauucaagcuuaccaugggccagaucgugaccuucuuccaggaggugccccacgugaucgaggaggugaugaacaucgugcugaucgcccugagcauccuggccgugcugaagggccuguacaacuucgccaccugcggccuggugggccuggugaccuuccugcugcugugcggcagaagcugcaccaucagccuguacaagggcguguacgagcugcagacccuggagcugaacauggagacccugaacaugugcaugccccugagcugcaccaagaacaacagccaccacuacaucauggugggcaacgagaccggccuggagcugacccugaccaacaccagcaucaucaaccacaaguucugcaaccugagcgacgcccacaagaagaaccuguacgaccacgcccugaugagcaucaucagcaccuuccaccugagcauccccaacuucaaccaguacgaggccaugagcugcgacuucaacggcggcaagaucagcgugcaguacaaccugagccacagcuacgccggcgacgccgccaaccacugcggcaccguggccaacggcgugcugcagaccuucaugagaauggccuggggcggcagcuacaucgcccuggacagcggcagagacagaugggacugcaucaugaccagcuaccaguaccugaucauccagaacaccaccugggaggaccacugccaguucagcagacccagccccaucggcuaccugggccugcugagccagagaaccagagacaucuacaucagcagaagacugcugggcaccuucaccuggacccugagcgacagcgagggcaaggacacccccggcggcuacugccugaccagauggaugcugaucgaggccgagcugaagugcuucggcaacaccgccguggccaagugcaacgagaagcacgacgaggaguucugcgacaugcugagacuguucgacuucugcaagcaggccauccagagacugaaggccgaggcccagaugagcauccagcugaucaacaaggccgugaacgcccugaucaacgaccagcugaucaugaagaaccaccugagagacaucaugggcauccccuacugcaacuacagcaaguacugcuaccugaaccacaccaccaccggcaagaccagccugcccaagugcugccuggugagcaacggcagcuaccugaacgagacccacuucagcgacgacaucgagcagcaggccgacaacaugaucaccgagaugcugcagaaggaguacauggagagacagggcaagaccccccugggccugguggaccuguucguguucagcaccagcuucuaccugaucagcaucuuccugcaccuggugaagauccccacccacagacacaucgugggcaagcccugccccaagccccacagacugaaccacaugggcaucugcagcugcggccuguacaagcagcccggcgugcccgugaaguggaagagaugaggacuagucccuguucccagagcccacuuuuuuuucuuuuuuugaaauaaaauagccugucuuucagaucucaaaggcucuuuucagagccaccaaaaaaaaaaaaaaaaaaaaaaaaaaaaaaaaaaaaaaaaaaaaaaaaaaaaaaaaaaaaaaaaagaauu

SEQ ID NO: 40165 - RNA, 1717 nt, Artificial Sequence
  mRNA product Design a-1 (hSL-A64-N5) comprising derived and/or modified sequence from LASV(Josiah;Clade IV)__NP_694870__GPCmut12 (opt5)
aggagagucccgcagucggcguccagcggcucugcuuguucgugugugugucguugcaggccuuauucaagcuuaccaugggccagaucgugaccuucuuucaagaggucccccacguuauugaagaggugaugaacaucgugcugauugcccucagcguccuggcugugcuuaaggggcuguacaauuucgccacaugcggacucguuggccuggugacguuucuucugcucugugggagauccugcaccacaucucuguauaaaggagucuacgaacugcagacccucgagcugaacauggaaacacuuaauauguguaugccucugagcugcaccaagaacaauucccaucacuauaucauggugggcaacgagacagggcucgagcugacccuuacgaauaccucuauuaucaaccauaaauucuguaaucugagcgacgcgcacaagaaaaaccucuacgaucaugcucugauguccaucauuucuacauuucaccugagcaucccgaauuucaaccaguaugaagccauguccugcgacuuuaauggaggcaagauuagcguucaguacaaccucucucacuccuaugccggcgaugcugccaaucauugugggaccguggcuaacggaguccugcaaacauucaugcggauggccuggggcgggagcuacaucgcgcuugacucuggacgcggcaacugggauugcauuaugaccuccuaccaguaucugaucauucagaauacgacaugggaggaccacugucaguuuagcagacccucuccuaucggguaccucggacugcuuucccaacggacccgcgauaucuauauuagcagacggcugcucggcacauucaccuggacccuguccgacucugaaggcaaggauacacccgggggauacugccugacgcgcuggaugcucaucgaggccgagcugaaauguuuuggcaacaccgcuguggccaagugcaaugaaaaacaugacgaggaguucugcgauaugcuuagacuguuugacuucuguaagcaggcuauucagcggcucaaagccgaagcgcagaugagcauccaacugauuaacaaggccgugaaugcucuuaucaacgaucagcugaucaugaagaaucaccuccgcgacauuauggggaucccuuauugcaacuacuccaaauauuguuaccugaaucacacaaccacaggaagaaccagccugcccaagugcugucucgucucuaacggcuccuaccugaaugaaacgcauuucagcgacgauauugagcagcaagccgacaacaugaucacagagaugcuucagaaagaauauauggagcggcaggggaagaccccucugggacucguugaucuguuuguguucucuaccagcuuuuaccugauuuccaucuuccuucaccucgugaaaaucccgacacaucgccacauugucggcaagucuugccccaaaccucauagacugaaucacaugggcaucuguagcugcgggcuguauaagcagcccggagugccuguuaaguggaaacggugaggacuagucccuguucccagagcccacuuuuuuuucuuuuuuugaaauaaaauagccugucuuucagaucucaaaggcucuuuucagagccaccaaaaaaaaaaaaaaaaaaaaaaaaaaaaaaaaaaaaaaaaaaaaaaaaaaaaaaaaaaaaaaaaagaauu

SEQ ID NO: 40166 - RNA, 1714 nt, Artificial Sequence
  mRNA product Design a-1 (hSL-A64-N5) comprising derived and/or modified sequence from LASV(LP;Clade I)__AAF86701__GPCmut12 (opt5)
aggagagucccgcagucggcguccagcggcucugcuuguucgugugugugucguugcaggccuuauucaagcuuaccaugggccagaucauuaccuucuuucaagaggugccccacgucaucgaagagguuaugaacauugugcugaucgcccucagccugcuugcuauucugaaggggcucuacaauaucgccacaugcggaaucauuggccugguggcguuccuuuuucugugugggaaauccugcucucucacgcugaagggaggcuaugaacugcagacccucgagcugaacauggaaacacuuaauauguguaugccucugagcugcaccaaaaacuccucucaucacuacaucagagucgggaaugagacaggacucgagcugacccuuacaaacaccagcauuaucaaucauaaguucuguaaccuguccgacgcucacaaaaagaaucucuaugaucaugcccugaugucuauuaucagcacguuucaccuguccauuccgaacuucaaucaguacgaagccaugagcugcgacuuuaacggcggcaagaucucugugcaguauaaucucucccacagcuacgcuggggaugccgcugagcauuguggaaccguugccaacggcgugcugcaaacauucaugcggauggcguggggagggcgcuauaucgcccuugacucuggcaaagggaauugggauugcauuaugaccuccuaccaguaccugaucauucagaacacaaccugggaagaccacugucaguuuagcagacccucuccuaucggauaucucggccugcuuucccaacggacgcgcgauauuuacaucagcagacggcugcucggcacauucaccuggacacuguccgacucugaggggaacgagacccccggaggcuauugccugacccgcuggaugcucaucgaagcugagcugaaguguuuugggaauacagccgucgcuaaaugcaacgaaaagcaugaugaggaguucugcgacaugcuuagacuguuugauuucuguaaacaggccauucggcgccucaaggcggaagcccagaugagcauccagcugauuaauaaggcugugaacgcccuuaucaaugaccaacugauuaugaaaaaccaccucagagauaucaugggaaucccuuacugcaauuauuccaaguacuguuaucugaaccacacgagcucuggccggaccucccugcccaaaugcugucucauuagcaaugggucuuaccugaacgagacacaguucagcgacgacaucgaacagcaagcugauaauaugauuaccgagaugcuucagaaggaauacaucgagcgccagggaaaaacaccucugggccucguugacauuuuuaucuucuccaccucuuuuuaucugauuagcaucuuccugcaucuuaucaagauuccgacgcacagacauaucgugggcaaacccugcccuaagccccaccggcucaaccauaugggggucuguuccugcggacuguacaagcacccuggcgugcccacaaaauggaagcgcugaggacuagucccuguucccagagcccacuuuuuuuucuuuuuuugaaauaaaauagccugucuuucagaucucaaaggcucuuuucagagccaccaaaaaaaaaaaaaaaaaaaaaaaaaaaaaaaaaaaaaaaaaaaaaaaaaaaaaaaaaaaaaaaaagaauu

SEQ ID NO: 40167 - RNA, 1714 nt, Artificial Sequence
  mRNA product Design a-1 (hSL-A64-N5) comprising derived and/or modified sequence from LASV(803213;Clade II)__AAF86703__GPCmut12 (opt5)
aggagagucccgcagucggcguccagcggcucugcuuguucgugugugugucguugcaggccuuauucaagcuuaccaugggccagaucauuaccuucuuucaagaggugccccacgucaucgaagagguuaugaacauugugcugaucgcccucagccugcuugcuauucugaaggggaucuacaauguggccacaugcggacucuucggccugaucuccuuucuucugcucugugggagaucuugcagcgucacguauaaaggaguguacgaacugcagacccuggagcucaacauggcgaaucugaacauguguaugccucuuuccugcacaaagaauaacucucaucacuauauuaugguuggcaaugaaaccgggcuggagcucacacugaccaacacaagcaucauuaaucauaaauucuguaaccuuuccgacgcucacaagaaaaaucuguacgaucaugcccucaugucuaucauuagcaccuuucaccuguccaucccgaacuucaaucaguaugaggccaugagcugcgacuuuaacggaggcaagauuucugugcaguacaaucugucccacagcuucgcugucgaugccgcuaaccauuguggcacgaucgccaacggggugcuccaaaccuuuaugcggauggcguggggaggcucuuauaucgcccuggacuccgggaagggaaauugggauugcauuaugacaagcuaccaguaccuuaucauucagaacaccacaugggaagaccacugucaguucucucgccccuccccuaucggcuaucuggggcuccugagccaaagaacccgggauauuuacaucucccgcagacuucugggaacguuuacauggacccucucugacagcgagggcaaugaagcucccggcggguauugccugacacgguggaugcugaucgaggccgagcucaaauguuucggaaacaccgcuguugccaagugcaaugaaaaacaugaugaggaauuuugcgacaugcugcgccuuuucgauuucuguaagcaggcgauuaaaagacugaagaccgaggcccagauguccauccagcucauuaacaaggcugugaaugcccugaucaacgaccaacuuauuaugaaaaaucaucugcgggauaucaugggcaucccuuacugcaacuauagccgcuacuguuaucucaaucacacagucacggggaagaccucucugcccagaugcugucugguguccaacggaagcuaccucaaugaaacacacuuuucugacgacauugagcagcaggcugauaacaugaucaccgagaugcugcaaaaagaauacauggaccggcagggcaagacaccucuugggcugguggaucucuucgucuuuagcaccuccuucuaucugauuucuaucuuucugcaccuuguuaaaauuccgacgcaucgccacaucgugggaaagcccugcccuaaaccccauagacucaaucacaugggcauuuguagcugcggccuguacaagcacccuggggugcccgucaaguggaaacggugaggacuagucccuguucccagagcccacuuuuuuuucuuuuuuugaaauaaaauagccugucuuucagaucucaaaggcucuuuucagagccaccaaaaaaaaaaaaaaaaaaaaaaaaaaaaaaaaaaaaaaaaaaaaaaaaaaaaaaaaaaaaaaaaagaauu

SEQ ID NO: 40168 - RNA, 1714 nt, Artificial Sequence
  mRNA product Design a-1 (hSL-A64-N5) comprising derived and/or modified sequence from LASV(GA391;Clade III)__CAA36645__GPCmut12 (opt5)
aggagagucccgcagucggcguccagcggcucugcuuguucgugugugugucguugcaggccuuauucaagcuuaccaugggccagaucgugaccuucuuucaagaggucccccacguuauugaagaggugaugaacaucgugcugauugcccucagcauccuggcuauucuuaaggggcuguacaaugucgccacaugcggacucaucggccuggugacguuccuucugcucuccgggagaucuuguagccugaucuauaaaggaaccuacgaacugcagacacucgagcugaacauggaaacccuuaauaugugcaugccucuguccuguacaaagaacaauucucaucacuauauucggguuggcaacgagaccgggcucgagcugacacuuaccaauacgagcauccugaaccauaaauuuugcaaucucuccgacgcgcacaagcgcaaccuguacgaucauucucugaugagcauuaucuccaccuuccaccucagcauuccgaauuuuaaccaguaugaagcuaugucuugugacuucaauggaggcaaaaucacagugcaguacaaccugucccacagcuuugccgucgaugccgcuggccauugcgggacccuugccaauggagugcugcaaacauucaugagaauggcuuggggcgggucuuauauugcccucgacuccggacggggcaacugggauuguaucaugaccagcuaccaguaccugaucauucagaacacgacaugggacgaucacugccaguuuucucgccccuccccuaucggguaucuuggacugcucagccaaagaacccgggacauuuacaucucccgcagacugcugggcacauucaccuggacccucucugauagcgagggcaaugaaacacccgggggauauugucugacgcgguggaugcuuauugaggcggagcugaagugcuuuggcaacaccgccguugcuaaguguaaugaaaaacaugacgaggaguucugcgauaugcuccgccuguuugacuucugcaagcaggccaucagacggcuuaaaacagaagcucagauguccauccagcugauuaacaaggccgugaaugcgcucaucaacgaucaacugauuaugaaaaaucaucugcgcgacaucauggggauuccuuacuguaacuauagcagauacugcuaucucaaucacaccucuacaggaaagaccucccugccccgguguugccuuaucagcaacggcucuuaccugaaugaaacgaaguucagcgacgauaucgagcagcaggccgacaacaugauuacagagaugcuccaaaaagaauacaucgaucgccaggggaagaccccucugggacuggucgaccuuuuuguguucuccaccucuuuuuaucucauuagcaucuuccugcaccuggugaaaauuccgacacacagacauaucgucggcaagcccuguccuaaaccccaccggcucaaucauaugggcauuugcuccugugggcuguacaagcagccuggaguucccgugagauggaaacgcugaggacuagucccuguucccagagcccacuuuuuuuucuuuuuuugaaauaaaauagccugucuuucagaucucaaaggcucuuuucagagccaccaaaaaaaaaaaaaaaaaaaaaaaaaaaaaaaaaaaaaaaaaaaaaaaaaaaaaaaaaaaaaaaaagaauu

SEQ ID NO: 40169 - RNA, 1717 nt, Artificial Sequence
  mRNA product Design a-1 (hSL-A64-N5) comprising derived and/or modified sequence from LASV(AV;Clade V)__CCA30314__GPCmut12 (opt5)
aggagagucccgcagucggcguccagcggcucugcuuguucgugugugugucguugcaggccuuauucaagcuuaccaugggccagaucgugaccuucuuucaagaggucccccacguuauugaagaggugaugaacaucgugcugauugcccucagcauccuggcuguccuuaaggggcuguacaauauugccacaugcggacucaucggccugaucacguuccuucugcucugugggagauccugcucuagcaaccuguauaaaggaguguacgaacugcagucccucgaccugaauauggagacccuuaacauguguaugccucugucuugcacaaagaauaacagccaucacuauauucggguuggcaaugauaccgggcucgaacugacacuuaccaacacauccauccugaaucauaaauuuuguaaccucucugacgcgcacaagaaagaucuguacgaccaugcucugaugagcauuaucuccaccuuccaccucagcauuccgaauuuuaaccaguaugaggccaugucuugcgauuucaauggaggcaagaucuccgugcaguacaaccugagccacucuuaugccauugacgcugccaaucauuguggcacggucgcuaacgggauccuucaaaccuuuaugcgcauggccuggggaggcuccuacaucgcgcuggauagcgggagaggaaacugggacugcauuaugacaucuuaccaguaucucaucauucagaauaccacaugggagaaccacugucaguucucccggcccagcccuaucggcuaccuggggcuucugucccaacgcaccagagauauuuauaucucucggcgccuccugggaacguuuacauggacccugagcgacuccgaaggcaaugccacacccggcggguacugccucaccagauggaugcugaucgaggcugaacuuaaguguuucggaaacaccgccguggcuaaaugcaaugagaagcaugaugaggaauuuugcgacaugcugcgccucuucgauuuuuguaaacaggccauuagccggcugaagucugaggcgcagauguccauccagcuuauuaacaaagccguuaaugcucugaucaacgaccaacucauuaugaagaaucaccugagagacaucaugggcaucccuuauugcaacuacagcaaguauuguuaccugaaucacacaauuacggggaaaaccucucuccccaagugcugucuggugagcaacggauccuaccuuaaugaaacacauuucucugaugacaucgagcagcaggccgauaacaugauuaccgaaaugcugcaaaaagaguauauggagcggcagggcaagacaccucucgggcuggucgaccuguucguguuuagcaccuccuucuaccuuaucagcauuuuucuccgccuggugaaaaucccgacgcacagacauauugucggaaagcccugcccuaaaccccaccggcugaaucauaugggcaucuguucuugcggccucuauaagcagccugggguucccgugcgcuggaagagaugaggacuagucccuguucccagagcccacuuuuuuuucuuuuuuugaaauaaaauagccugucuuucagaucucaaaggcucuuuucagagccaccaaaaaaaaaaaaaaaaaaaaaaaaaaaaaaaaaaaaaaaaaaaaaaaaaaaaaaaaaaaaaaaaagaauu

SEQ ID NO: 40170 - RNA, 1714 nt, Artificial Sequence
  mRNA product Design a-1 (hSL-A64-N5) comprising derived and/or modified sequence from LASV(Togo/2016/7082;Clade VI)__AMR44577__GPCmut12 (opt5)
aggagagucccgcagucggcguccagcggcucugcuuguucgugugugugucguugcaggccuuauucaagcuuaccaugggccagaucauuaccuucuuucaagaggugccccacgucaucgaagagguuaugaacauugugcugaucgcccucagccugcuugcuauucugaaggggguguacaaugucgccacaugcggaaucaucggccucgugacguuccuguuucuuugugggagauccugcucucugauuuauaaaggaagcuacgaacuccagacccuggagcugaacauggaaacacucaauauguguaugccucuguccugcaccaagaacucuagccaucacuauauccggguuggcaaugagacagggcuugagcugacccucacaaacaccuccauuaucaaucauaaauucuguaaccugucugacgcgcacaagcgcaaucuuuacgaucaugcucugaugagcauucucuccacguuucaccugagcaucccgaacuucaaucaguaugaagccaugucuugcgacuuuaacggaggcaaaauuuccgugcaguacaaucugagccacgccuaugcugucgaugccgcugagcauuguggcaccguggccaacgggguucuccaaacauucaugagaauggcguggggaggcucuuacaucgcccuggacuccgggcggggaaauugggauugcaucaugaccagcuaccaguaucuuauuauccagaacacaaccugggaagaccacugucaguuuucucgccccuccccuauuggcuaccuggggcuccugagccaaagaacgcgggauaucuauauuucccgcagacuucugggaacauucaccuggacacucucugacagcgagggcaacgagacccccggcggguacugccugacccgguggaugcugaucgaagcugagcucaaguguuuuggaaauacagccguggcuaagugcaacgaaaaacaugaugaggaguucugcgacaugcugcgccuuuuugauuucuguaagcaggccauccagagacugaaauccgaagcgcagaugagcauucaacucaucaauaaggccgucaacgcucugauuaaugaccagcuuaucaugaaaaaccaucugcgggauaugaugggcauuccuuauugcaauuacucuaaguauuguuaccucaaccacacguccagcgggcgcaccucucugcccaagugcugucuggugagcaauggauccuaccucaacgagacacacuucucugacgacaucgaacagcaagccgauaauaugaucaccgagaugcugcagaaagaauauauugacagacagggcaagacaccucuugggcugguggaucucuuugucuucagcaccuccuuuuaccugaucagcauuuuccugcaccuuaucaaaauuccgacgcaucggcacaucguuggaaagcccugcccuaaaccccaucgccucaaccacaugggcauuuguucuugcggccuguauaagcagccuggggugcccacaagauggaaacggugaggacuagucccuguucccagagcccacuuuuuuuucuuuuuuugaaauaaaauagccugucuuucagaucucaaaggcucuuuucagagccaccaaaaaaaaaaaaaaaaaaaaaaaaaaaaaaaaaaaaaaaaaaaaaaaaaaaaaaaaaaaaaaaaagaauu

SEQ ID NO: 40171 - RNA, 1714 nt, Artificial Sequence
  mRNA product Design a-1 (hSL-A64-N5) comprising derived and/or modified sequence from LASV(KAK-428;Clade n.d. (VII))__ANH09740__GPCmut12 (opt5)
aggagagucccgcagucggcguccagcggcucugcuuguucgugugugugucguugcaggccuuauucaagcuuaccaugggccagaucgugaccuucuuucaagaggucccccacguuauugaagaggugaugaacaucgugcugauugcccucagccugcuugcuauccugaaggggcucuacaauuucgccacaugcggagucauuggccugaucacguuucuucugcucugugggagauccugcucugcgaccuauaaaggacaguacgaacugcagacacuggagcucaacauggaaagccugaauauguguaugccucuuuccugcaccaagaacaauucucaucacuauauccgggcuggcaacaauacagggcuggagcucacccugacaaacaccagcauuaucucccauaaauucuguaaucuuucugacgcccacaagaaaaaccuguacgaucauacgcucaugagcauuaucaccacauuucaccuguccauuccgaauuucaaccaguaugaggccaugagcugcgacuuuaauggaggcaagaucucuauucaauacaaccugucccacagcuaugcuggcgaugccgcucagcauugugggaccguggccaauggaguucuccagacauucaugcgcauggcguggggcgggucuuaccuggcccuugacuccggaagacggggcugggauugcaucaucagcucuuaccaguaucugauuauccaaaacaccacgugggacgaucacugucaguuuucccgccccagcccuauuggguaccucggauucgugucccagaagacaagagacaucuauauuucucggcgccugcuuggcaccuuuacauggacccugagcgauuccgaaggccaugacaugcccgggggauacugccucaccagauggaugcugaucgaggcugaucugaaauguuucggcaacacagccgucgcuaagugcaaugaaaaacacgacgaggaguuuugcgauauguggcgccucuucgacuucuguaagcaggccauccaacggcugaaagcggaagcccagaugaacauucagcuuaucaauaaggcugugaacgcccugauuaaugaccaacucaugaugaagaaccaccugagagauaucauggggauuccuuauugcaauuacagcaaauuuuguuaucuuaacaauacgaccacaggacggaccucucugccccgcugcugucucaucuccaacggcagcuaccugaaugagacacauuucucugacgauaucgaacagcaggcugacaacaugauuaccgagaugcugcagaaggaauacauggauagacaagggaaaacgccucucggacugguugaccuuuuuguguucagcacauccuuuuaucugaucaccauuuuccuccaccuggucaagaucccgacccaucggcacauugugggcaaacccugcccuaagccccaucgccugaaucacaugggcaucuguucuugcgggcuuuacaaacagccuggagugcccgucagauggaagcggugaggacuagucccuguucccagagcccacuuuuuuuucuuuuuuugaaauaaaauagccugucuuucagaucucaaaggcucuuuucagagccaccaaaaaaaaaaaaaaaaaaaaaaaaaaaaaaaaaaaaaaaaaaaaaaaaaaaaaaaaaaaaaaaaagaauu

SEQ ID NO: 40172 - RNA, 1714 nt, Artificial Sequence; identical to SEQ ID NO: 40166
  mRNA product Design a-1 (hSL-A64-N5) comprising derived and/or modified sequence from LASV(Pinneo-NIG-1969;Clade I)__AIT17836__GPCmut12 (opt5)

SEQ ID NO: 40173 - RNA, 1714 nt, Artificial Sequence
  mRNA product Design a-1 (hSL-A64-N5) comprising derived and/or modified sequence from LASV(ISTH0009-NIG-2011;Clade II)__AIT17404__GPCmut12 (opt5)
aggagagucccgcagucggcguccagcggcucugcuuguucgugugugugucguugcaggccuuauucaagcuuaccaugggccagaucauuaccuucuuucaagaggugccccacgucaucgaagagguuaugaacauugugcugaucgcccucagccugcuugcuauucugaaggggaucuacaauguggccacaugcggacucuucggccuggucuccuuucuucugcucugugggagaucuugcagcacgaccuauaaaggaguguacgaacugcagacacuggagcucgacauggcgucccugaacauguguaugccucuuucuugcaccaagaauaacagccaucacuauaucaugguuggcaaugaaacagggcuggagcucacccugacaaacaccuccauuaucaaucauaaauucuguaaccuuucugaugcucacaagaaaaaucuguacgaccaugcccucaugagcauuaucuccacguuucaccugagcauuccgaacuucaaucaguaugaggccaugucuugcgauuuuaacggaggcaagaucuccgugcaguacaaucugagccacgcuuaugccgucgacgcugccaaccauuguggcaccauugcgaauggggugcuccaaacauucaugcggauggccuggggaggcucuuacaucgcucuggauuccgggaagggaagcugggacugcaucaugaccucuuaccaguaucuuauuauccagaacacaaccugggaagaucacugucaguuuucccgccccagcccuauuggcuaccuggggcuccugucccaaagaacgcgggacaucuauauuucucgcagacuucugggaacauucaccuggacacucagcgauuccgagggcaacgaaacccccggcggguacugccugacccgguggaugcugaucgaggccgagcucaaauguuuuggaaauacagcuguugccaagugcaacgaaaaacaugacgaggaguucugcgauaugcugcgccuuuuugacuucuguaagcaggcgaucagacggcugaaaacggaagcccagaugagcauucagcucaucaauaaggcugugaacgcccugauuaaugaucaacuuaucaugaagaaccaucugcgcgacauuaugggcaucccuuauugcaauuacucuaaauauuguuaccucaaccacaccgucacagggaagaccucccugcccagaugcugucuggugagcaauggaucuuaccucaacgaaacacacuucagcgacgauaucgagcagcaggcugacaauaugauuaccgagcugcuucaaaaagaauauauggaucggcagggcaagacgccucuggggcucguggaccuguuugucuucuccacaucuuuuuaccugaucagcauuuuccuucaccucaucaaaauuccgacccaucgccacaucaccggaaagcccugcccuaaaccccauagacugaaccacaugggcauuuguuccugcggccuguauaagcacccugggguucccgugaaguggaaacggugaggacuagucccuguucccagagcccacuuuuuuuucuuuuuuugaaauaaaauagccugucuuucagaucucaaaggcucuuuucagagccaccaaaaaaaaaaaaaaaaaaaaaaaaaaaaaaaaaaaaaaaaaaaaaaaaaaaaaaaaaaaaaaaaagaauu

SEQ ID NO: 40174 - RNA, 1714 nt, Artificial Sequence
  mRNA product Design a-1 (hSL-A64-N5) comprising derived and/or modified sequence from LASV(ISTH2010-NIG-2012;Clade II)__AIT17482__GPCmut12 (opt5)
aggagagucccgcagucggcguccagcggcucugcuuguucgugugugugucguugcaggccuuauucaagcuuaccaugggccagaucauuaccuucuuucaagaggugccccacgucaucgaagagguuaugaacauugugcugaucgcccucagccugcuugcuauucugaaggggaucuacaauguggccacaugcggacucuucggccuggucuccuuucuucugcucugugggagaucuugcagcacgaccuauaaaggaguguacgaacugcagacacuggagcucgacauggcgucccugaacauguguaugccucuuucuugcaccaagaauaacagccaucacuauaucaugguuggcaaugaaacagggcuggagcucacccugacaaacaccuccauuaucaaucauaaauucuguaaccuuucugaugcucacaagaaaaaucuguacgaccaugcccucaugagcauuaucuccacguuucaccugagcauuccgaacuucaaucaguaugaggccaugucuugcgauuuuaacggaggcaagaucuccgugcaguacaaucugagccacgcuuaugccgucgacgcugccaaccauuguggcaccauugcgaauggggugcuccaaacauucaugcggauggccuggggaggcucuuacaucgcucuggauuccgggaagggaagcugggacugcaucaugaccucuuaccaguaucuuauuauccagaacauuacaugggaagaucacugucaguuuucccgccccagcccuaucggcuaccuggggcuccugucccaaagaacccgggacauuuauaucucucgcagacuucugggaacguucacauggacccucagcgauuccgagggcaacgaaacacccggcggguacugccugacccgguggaugcugaucgaggccgagcucaaauguuuuggaaauaccgcuguugccaagugcaacgaaaaacaugacgaggaguucugcgauaugcugcgccuuuuugacuucuguaagcaggcgauuagacggcugaaaacagaagcccagaugagcauccagcucauuaauaaggcugugaacgcccugaucaaugaucaacuuauuaugaagaaccaucugcgcgacaucaugggcaucccuuauugcaauuacucuaaauauuguuaccucaaccacacggucaccgggaagacaucccugcccagaugcugucuggugagcaauggaucuuaccucaacgaaacccacuucagcgacgauauugagcagcaggcugacaauaugaucacagagcugcuucaaaaagaauauauugaucggcagggcaagaccccucuggggcucguggaccuguuugucuucuccacgucuuuuuaccugaucagcauuuuccuucaccucguuaaaaucccgacacaucgccacguggugggaaagcccugcccuaaaccccauagacugaaccacaugggcauuuguuccugcggccuguauaagcacccugggguccccgugaaguggaaacggugaggacuagucccuguucccagagcccacuuuuuuuucuuuuuuugaaauaaaauagccugucuuucagaucucaaaggcucuuuucagagccaccaaaaaaaaaaaaaaaaaaaaaaaaaaaaaaaaaaaaaaaaaaaaaaaaaaaaaaaaaaaaaaaaagaauu

SEQ ID NO: 40175 - RNA, 1714 nt, Artificial Sequence
  mRNA product Design a-1 (hSL-A64-N5) comprising derived and/or modified sequence from LASV(Lassa virus/H.sapiens-wt/NGA/2015/ISTH_0543;Clade II)__AVO03639__GPCmut12 (opt5)
aggagagucccgcagucggcguccagcggcucugcuuguucgugugugugucguugcaggccuuauucaagcuuaccaugggccagaucauuaccuucuuucaagaggugccccacgucaucgaagagguuaugaacauugugcugaucgcccucagccugcuugcuauucugaaggggaucuacaauguggccacaugcggacucuucggccuggucuccuuucuucugcucugugggagaucuugcagcacgaccuauaaaggaguguacgaacugcagacacuggagcucgacauggcgaaccugaauauguguaugccucuuuccugcaccaagaacaauucucaucacuauaucaugguuggcaacgaaacagggcuggagcucacccugacaaauaccagcauuaucaaccauaaauucuguaaucuuuccgaugcucacaagaaaaaccuguacgaccaugcccucaugucuauuaucagcacguuucaccuguccauuccgaauuucaaccaguaugaggccaugagcugcgauuuuaauggaggcaagaucucugugcaguacaaccugucccacaccuaugcugucgacgccgcuaaucauuguggcacaauugccaacggggugcuccaaaccuucaugcggauggcguggggaggcagcuacaucgcccuggauucugggaagggauccugggacugcaucaugacaagcuaccaguaucuuguuauucagaacaccacgugggaagaucacugucaguuuucucgccccuccccuaucggcuaccuggggcuccugagccaaagaacacgggacauuuauaucucccgcagacuucugggaaccuucacauggacccucucugauagcgagggcaaugaaacccccggcggguacugccugacacgguggaugcugauugaggcugagcucaaauguuuuggaaacacggccguggcuaagugcaaugaaaaacaugacgaggaguucugcgauaugcugcgccuuuuugacuucuguaagcaggccaucagacggcugaaaaccgaagcgcagauguccauccagcucauuaacaaggccgucaaugcucugaucaacgaucaacuuauuaugaagaaucaucugcgcgacaucaugggcauuccuuauugcaacuacagcaaauauuguuaccucaaucacacagugaccgggaagacaucucugcccagaugcugucugguguccaacggaagcuaccucaaugaaacccacuucucugacgauaucgagcagcaggccgacaacaugaucacggagcugcuucaaaaagaauauauugaucggcagggcaagacaccucuggggcucgucgaccuguuuguuuucagcaccuccuuuuaccugaucucuauuuuccuucaccucgugaaaaucccgacccaucgccacauuacaggaaagcccugcccuaaaccccauagacugaaucacaugggcaucuguagcugcggccuguauaagcacccuggggugcccgucaaguggaaacggugaggacuagucccuguucccagagcccacuuuuuuuucuuuuuuugaaauaaaauagccugucuuucagaucucaaaggcucuuuucagagccaccaaaaaaaaaaaaaaaaaaaaaaaaaaaaaaaaaaaaaaaaaaaaaaaaaaaaaaaaaaaaaaaaagaauu

SEQ ID NO: 40176 - RNA, 1714 nt, Artificial Sequence
  mRNA product Design a-1 (hSL-A64-N5) comprising derived and/or modified sequence from LASV(Lassa virus/H.sapiens-wt/NGA/2016/ISTH_0009;Clade II)__AVO03571__GPCmut12 (opt5)
aggagagucccgcagucggcguccagcggcucugcuuguucgugugugugucguugcaggccuuauucaagcuuaccaugggccagaucauuaccuucuuucaagaggugccccacgucaucgaagagguuaugaacauugugcugaucgcccucagccugcuugcuauucugaaggggaucuacaauguggccacaugcggacuccugggccuugucuccuuccugcuccugugugggagaucuugcagcacgaccuauaaaggaguguacgaacugcagacacucgagcuggacauggcgucccuuaacauguguaugccucugucuugcaccaagaauaacagccaucacuauaucaugguuggcaaugaaacagggcucgagcugacccuuacaaacaccuccauuaucaaucauaaauuuuguaaccugucugaugcucacaagaaaaaucucuacgaccaugcccugaugagcauuaucuccacguuccaccugagcauuccgaacuuuaaucaguaugaggccaugucuugcgauuucaacggaggccggaucuccgugcaguacaaucucagccacucuuaugcugucgacgccgcuaaccauuguggcaccauugccaauggggugcugcaaacauuuaugcgcauggcguggggaggcuccuacaucgcccuugauagcgggaagggaucuugggacugcaucaugaccuccuaccaguaucugauuauccagaacacaaccugggaagaucacugucaguucagcagacccuccccuauuggcuaccucgggcugcuuucucaacggacgcgcgacaucuauauuagcagacggcugcucggaacauuuaccuggacacuguccgauagcgagggcaacgaaacccccggcggguacugccugacccgcuggaugcucaucgaggcugagcugaaguguuucggaaauacagccguugcuaaaugcaacgaaaagcaugacgaggaauuuugcgauaugcuuagacuguucgacuuuuguaaacaggccauccggcgccucaagacggaggcgcagaugucuauucagcugaucaauaaagccgugaacgcucuuauuaaugaucaacugaucaugaagaaccaccucagagacauuaugggcaucccuuauugcaauuacuccaaguauuguuaccugaaccacaccgucacagggaaaaccagccugccccggugcugucucgugucuaauggaagcuaccugaacgaaacacauuucuccgacgauaucgagcagcaggccgacaauaugauuaccgagcuucugcaaaaggaauauaucgaucgccagggcaaaacgccucucgggcugguggaccuguucgucuuuucuaccagcuucuaccuuauuuccaucuuucuccaccugguuaagauuccgacacauagacacaucaccggaaaacccugcccuaagccccaucggcugaaccacaugggcauuuguagcugcggccucuauaaucacccuggggugcccgugaaauggaagcgcugaggacuagucccuguucccagagcccacuuuuuuuucuuuuuuugaaauaaaauagccugucuuucagaucucaaaggcucuuuucagagccaccaaaaaaaaaaaaaaaaaaaaaaaaaaaaaaaaaaaaaaaaaaaaaaaaaaaaaaaaaaaaaaaaagaauu

SEQ ID NO: 40177 - RNA, 1714 nt, Artificial Sequence
  mRNA product Design a-1 (hSL-A64-N5) comprising derived and/or modified sequence from LASV(Lassa virus/H.sapiens-wt/NGA/2016/ISTH_0017;Clade II)__AVO03567__GPCmut12 (opt5)
aggagagucccgcagucggcguccagcggcucugcuuguucgugugugugucguugcaggccuuauucaagcuuaccaugggccagaucauuaccuucuuucaagaggugccccacgucaucgaagagguuaugaacauugugcugaucgcccucagccugcuugcuauucugaaggggaucuacaauguggccacaugcggacucuucggccuggucuccuuucuucugcucugugggagaucuugcagcacgaccuauaaaggaguguacgaacugcagacacuggagcucgacauggcgucccugaacauguguaugccucuuucuugcaccaagaauaacagccaucacuauaucaugguuggcaaugaaacagggcuggagcucacccugacaaacaccuccauuaucaaucauaaauucuguaaccuuucugaugcucacaagaaaaaucuguacgaccaugcccucaugagcauuaucuccacguuucaccugagcauuccgaacuucaaucaguaugaggccaugucuugcgauuuuaacggaggcaagaucuccgugcaguacaaucugagccacaccuaugcuauugacgccgcuaaccauuguggcacaaucgccaaugggguccuccaaaccuucaugcggauggcguggggaggcucuuacaucgcccuggauuccgggaagggaagcugggacugcauuaugacaucuuaccaguaucuuaucauucagaacaccacgugggaagaucacugucaguuuucccgccccagcccuaucggcuaccuggggcuccugucccaaagaacacgggacauuuauaucucucgcagacuucugggaaccuucacauggacccucagcgauuccgagggcaacgaaacccccggcggguacugccugacacgguggaugcugaucgaggcugagcucaaauguuuuggaaauacggccguggcuaagugcaacgaaaaacaugacgaggaguucugcgauaugcugcgccuuuuugacuucuguaagcaggccauuagacggcugaaaaccgaagcgcagaugagcauccagcucauuaauaaggccguuaacgcucugaucaaugaucaacuuauuaugaagaaccaucugcgcgacaucaugggcaucccuuauugcaauuacucuaaauauuguuaccucaaccacacagugaccgggaagacaucccugcccagaugcugucuggucagcaauggaucuuaccucaacgaaacccacuucagcgacgauauugagcagcaggccgacaauaugaucacggagcugcuucaaaaagaauauauggaucggcagggcaagacaccucuggggcucguggaccuguuuguguucuccaccucuuuuuaccugauuagcaucuuccuucaccucguccgcauuccgacccauagacacguuaucggaaaacccugcccuaagccccaucggcugaaccacaugggcauuuguuccugcggccuguauaaacacccuggggugcccgugaaguggaagcgcugaggacuagucccuguucccagagcccacuuuuuuuucuuuuuuugaaauaaaauagccugucuuucagaucucaaaggcucuuuucagagccaccaaaaaaaaaaaaaaaaaaaaaaaaaaaaaaaaaaaaaaaaaaaaaaaaaaaaaaaaaaaaaaaaagaauu

SEQ ID NO: 40178 - RNA, 1714 nt, Artificial Sequence
  mRNA product Design a-1 (hSL-A64-N5) comprising derived and/or modified sequence from LASV(Lassa virus/H.sapiens-wt/NGA/2018/ISTH_0959;Clade II)__AVV65099__GPCmut12 (opt5)
aggagagucccgcagucggcguccagcggcucugcuuguucgugugugugucguugcaggccuuauucaagcuuaccaugggccagaucauuaccuucuuucaagaggugccccacgucaucgaagagguuaugaacauugugcugaucgcccucagccugcuugcuauucugaaggggaucuacaauguggucacaugcggacucuucggccugguguccuuucuucugcucugugggagaucuugcagcacgaccuauaaaggaguuuacgaacugcagacacuggagcucgacauggccucccugaacauguguaugccucuuucuugcaccaagaauaacagccaucacuauaucauggugggcaaugaaacagggcuggagcucacccugacaaacaccuccauuaucaaucauaaauucuguaaccuuucugaugcgcacaagaaaaaucuguacgaccaugcucucaugagcauuaucuccacguuucaccugagcauuccgaacuucaaucaguaugaggccaugucuugcgauuuuaacggaggcaagaucuccguccaguacaaucugagccacgccuaugcuauugacgccgcuaaccauuguggcaccaucgccaauggggugcuccaaacauucaugcggauggcguggggaggcucuuacaucgcccuggauuccgggaagggaagcugggacugcauuaugaccucuuaccaguaucuuaucauucagaacacaaccugggaagaucacugucaguuuucccgccccagcccuaucggcuaccuggggcuccugucccaaagaacgcgggacauuuauaucucucgcagacuucugggaacauucaccuggacacucagcgauuccgagggcaacgaaacccccggcggguacugccugacccgguggaugcugaucgaggcugagcucaaauguuuuggaaauacagccguugcuaagugcaacgaaaaacaugacgaggaguucugcgauaugcugcgccuuuuugacuucuguaagcaggccauuagacggcugaaaacggaagcgcagaugagcauccagcucauuaauaaggccgugaacgcucugaucaaugaucaacuuauuaugaagaaccaucugcgcgacaucaugggcaucccuuauugcaauuacucuaaauauuguuaccucaaccacaccgucacagggaagaccucccugcccagaugcugucuggugagcaauggaucuuaccucaacgaaacacacuucagcgacgauauugagcagcaggccgacaauaugaucaccgagcugcuucaaaaagaauauauugaucggcagggcaagacgccucuggggcucguggaccuguuugucuucuccacaucuuuuuaccugaucagcauuuuccuucaccucguuaaaaucccgacccaucgccacgugauuggaaagcccugcccuaaaccccauagacugaaccacaugggcaucuguuccugcggccuguauaagcacccuggggugcccgucaaguggaaacggugaggacuagucccuguucccagagcccacuuuuuuuucuuuuuuugaaauaaaauagccugucuuucagaucucaaaggcucuuuucagagccaccaaaaaaaaaaaaaaaaaaaaaaaaaaaaaaaaaaaaaaaaaaaaaaaaaaaaaaaaaaaaaaaaagaauu

SEQ ID NO: 40179 - RNA, 1714 nt, Artificial Sequence
  mRNA product Design a-1 (hSL-A64-N5) comprising derived and/or modified sequence from LASV(LASV003-NIG-2008;Clade II)__AIT17580__GPCmut12 (opt5)
aggagagucccgcagucggcguccagcggcucugcuuguucgugugugugucguugcaggccuuauucaagcuuaccaugggccagaucauuaccuucuuucaagaggugccccacgucaucgaagagguuaugaacauugugcugaucgcccucagccugcuugcuauucugaaggggaucuacaauguggccacaugcggacucuucggccuggucuccuuucuucugcucugugggagaucuugcagcacgaccuauaaaggaguguacgaacugcagacacuggagcucgacauggcgucccugaacauguguaugccucuuucuugcaccaagaauaacagccaucacuauaucaugguuggcaaugaaacagggcuggagcucacccugacaaacaccuccauuaucaaucauaaauucuguaaccuuucugaugcucacaagaaaaaucuguacgaccaugcccucaugagcauuaucuccacguuucaccugagcauuccgaacuucaaucaguaugaggccaugucuugcgauuuuaacggaggcaagaucuccgugcaguacaaucugagccacaccuaugcugucgacgccgcuaaccauuguggcacaauugccaauggggugcuccaaaccuucaugcggauggcguggggaggcucuuacaucgcccuggauuccgggaagggaagcugggacugcaucaugacaucuuaccaguaucuuauuauccagaacaccacgugggaagaucacugucaguuuucccgccccagcccuauuggcuaccuggggcuccugucccaaagaacacgggacaucuauauuucucgcagacuucugggaaccuucacauggacccucagcgauuccgagagcaacgaaacccccggcggcuacugccugacacgguggaugcugaucgaggcugagcucaaauguuuugggaauacggccguugcuaagugcaacgaaaaacaugacgaggaguucugcgauaugcugcgccuuuuugacuucuguaagcaggccaucagacggcugaaagcggaagcccagaugucuauucagcucaucaauaaggcugugaacgcccugauuaaugaucaacuuaucaugaagaaccaucugcgcgacauuaugggaaucccuuauugcaauuacuccaaauauuguuaccucaaccacaccgucacaggcagaaccagccugccccggugcugucuggugucuaaugggagcuaccucaacgaaacacacuucuccgacgauaucgagcagcaggcugacaauaugauuaccgagcugcuucaaaaggaauauauggaucgccagggaaaaacgccucugggccucguggaccuguuugucuucucuaccagcuuuuaccugaucuccauuuuccuucaccucguuaagaucccgacacauagacacgugauugggaaacccugcccuaagccccaucggcugaaccacaugggaaucuguagcugcggccuguauaaacacccuggcgugcccgucaaguggaagcgcugaggacuagucccuguucccagagcccacuuuuuuuucuuuuuuugaaauaaaauagccugucuuucagaucucaaaggcucuuuucagagccaccaaaaaaaaaaaaaaaaaaaaaaaaaaaaaaaaaaaaaaaaaaaaaaaaaaaaaaaaaaaaaaaaagaauu

SEQ ID NO: 40180 - RNA, 1714 nt, Artificial Sequence
  mRNA product Design a-1 (hSL-A64-N5) comprising derived and/or modified sequence from LASV(LASV035-NIG-2009;Clade II)__AIT17588__GPCmut12 (opt5)
aggagagucccgcagucggcguccagcggcucugcuuguucgugugugugucguugcaggccuuauucaagcuuaccaugggccagaucauuaccuucuuucaagaggugccccacgucaucgaagagguuaugaacauugugcugaucgcccucagccugcuugcuauucugaaggggaucuacaauguggccacaugcggacucuucggccuggucuccuuucuucugcucugugggagaucuugcagcacgaccuauaaaggaguguacgaacugcagacacuggagcucgacauggcgucccugaacauguguaugccucuuucuugcaccaagaauaacagccaucacuauaucaugguuggcaaugaaacagggcuggagcucacccugacaaacaccuccauuaucaaucauaaauucuguaaccuuucugaugcucacaagaaaaaucuguacgaccaugcccucaugagcauuaucuccacguuucaccugagcauuccgaacuucaaucaguaugaggccaugucuugcgauuuuaacggaggcaagaucuccgugcaguacaaucugagccacgcuuaugccgucgacgcugccaaccauuguggcaccauugcgaauggggugcuccaaacauucaugcggauggccuggggaggcucuuacaucgcucuggauuccgggaagggaagcugggacugcaucaugaccucuuaccaguaucuuauuauccagaacacaaccugggaagaucacugucaguuuucccgccccagcccuauuggcuaccuggggcuccugucccaaagaacgcgggacaucuauauuucucgcagacuucugggaacauucaccuggacacucagcgauuccgagggcaacgaaacccccggcggguacugccugacccgguggaugcugaucgaggccgagcucaaauguuuuggaaauacagcuguugccaagugcaacgaaaaacaugacgaggaguucugcgauaugcugcgccuuuuugacuucuguaagcaggcgaucagacggcugaaagccgaagcucagaugagcauucagcucaucaauaaggccgugaacgcucugauuaaugaucaacuuaucaugaagaaccaucugcgcgacauuaugggcaucccuuauugcaauuacucuaaauauuguuaccucaaccacacggucaccgggaagacaucccugcccagaugcugucuggugagcaauggaucuuaccucaacgaaacccacuucagcgacgauaucgagcagcaggccgacaauaugauuacagagcugcuucaaaaagaauauaucgaucggcagggcaagaccccucuggggcucguggaccuguuugucuucuccacgucuuuuuaccugauuagcaucuuccuucaccucguuaaaauuccgacacaucgccacgugaucggaaagcccugcccuaaaccccauagacugaaccacaugggcauuuguuccugcggccuguauaagcacccuggggugcccgucaaguggaaacggugaggacuagucccuguucccagagcccacuuuuuuuucuuuuuuugaaauaaaauagccugucuuucagaucucaaaggcucuuuucagagccaccaaaaaaaaaaaaaaaaaaaaaaaaaaaaaaaaaaaaaaaaaaaaaaaaaaaaaaaaaaaaaaaaagaauu

SEQ ID NO: 40181 - RNA, 1714 nt, Artificial Sequence
  mRNA product Design a-1 (hSL-A64-N5) comprising derived and/or modified sequence from LASV(LASV1000-NIG-2009;Clade II)__AIT17782__GPCmut12 (opt5)
aggagagucccgcagucggcguccagcggcucugcuuguucgugugugugucguugcaggccuuauucaagcuuaccaugggccagaucauuaccuucuuucaagaggugccccacgucaucgaagagguuaugaacauugugcugaucgcccucagccugcuugcuauucugaaggggaucuacaauguggccacaugcggacucuucggccuggucuccuuucuucugcucugugggagaucuugcagcacgaccuauaaaggaguguacgaacugcagacacuggagcucgacauggcgucccugaacauguguaugccucuuucuugcaccaagaauaacagccaucacuauaucaugguuggcaaugaaacagggcuggagcucacccugacaaacaccuccauuaucaaucauaaauucuguaaccuuucugaugcucacaagaaaaaucuguacgaccaugcccucaugagcauuaucuccacguuucaccugagcauuccgaacuucaaucaguaugaggccaugucuugcgauuuuaacggaggcaagaucuccgugcaguacaaucugagccacaccuaugcugucgacgccgcuaaccauuguggcacaauugccaauggggugcuccaaaccuucaugcggauggcguggggaggcucuuacaucgcccuggauuccgggaagggaagcugggacugcaucaugacaucuuaccaguaucuuauuauccagaacaccacgugggaagaucacugucaguuuucccgccccagcccuauuggcuaccuggggcuccugucccaaagaacacgggacaucuauauuucucgcagacuucugggaaccuucacauggacccucagcgauuccgagggcaacgaaacccccggcggguacugccugacacgguggaugcugaucgaggcugagcucaaauguuuuggaaauacggccguugcuaagugcaacgaaaaacaugacgaggaguucugcgauaugcugcgccuuuuugacuucuguaagcaggccaucaaaagacugaagaccgaagcgcagaugagcauucagcucaucaauaaggccgugaacgcucugauuaaugaucaacuuaucaugaaaaaccaucugcgggacauuaugggcaucccuuauugcaauuacucuaaguauuguuaccucaaccacacagucaccgggaaaacaucccugccccgcugcugucuggugagcaauggaucuuaccucaacgaaacccacuucagcgacgauaucgagcagcaggccgacaauaugauuacggagcugcuucaaaaggaauauaucgauagacagggcaaaacaccucuggggcucguggaccuguuugucuucuccaccucuuuuuaccugauuagcaucuuccuucaccucguuaagauuccgacccaucggcacguggugggaaaacccugcccuaagccccaucgccugaaccacaugggcaucuguuccugcggccuguauaagcacccugggguccccgugaaauggaagagaugaggacuagucccuguucccagagcccacuuuuuuuucuuuuuuugaaauaaaauagccugucuuucagaucucaaaggcucuuuucagagccaccaaaaaaaaaaaaaaaaaaaaaaaaaaaaaaaaaaaaaaaaaaaaaaaaaaaaaaaaaaaaaaaaagaauu

SEQ ID NO: 40182 - RNA, 1714 nt, Artificial Sequence
  mRNA product Design a-1 (hSL-A64-N5) comprising derived and/or modified sequence from LASV(LASV221-NIG-2010;Clade II)__AIT17624__GPCmut12 (opt5)
aggagagucccgcagucggcguccagcggcucugcuuguucgugugugugucguugcaggccuuauucaagcuuaccaugggccagaucauuaccuucuuucaagaggugccccacgucaucgaagagguuaugaacauugugcugaucgcccucagccugcuugcuauucugaaggggaucuacaauguggccacaugcggacucuucggccuggucuccuuucuucugcucugugggagaucuugcagcacgaccuauaaaggaguguacgaacugcagacacuggagcucgacauggcgucccugaacauguguaugccucuuucuugcaccaagaauaacagccaucacuauaucaugguuggcaaugaaacagggcuggagcucacccugacaaacaccuccauuaucaaucauaaauucuguaaccuuucugaugcucacaagaaaaaucuguacgaccaugcccucaugagcauuaucuccacguuucaccugagcauuccgaacuucaaucaguaugaggccaugucuugcgauuuuaacggaggcaagaucuccgugcaguacaaucugagccacaccuaugcuauugacgccgcuaaccauuguggcacaaucgccaaugggguccuccaaaccuucaugcggauggcguggggaggcucuuacaucgcccuggauuccgggaagggaagcugggacugcauuaugacaucuuaccaguaucuuaucauucagaacaccacgugggaagaucacugucaguuuucccgccccagcccuaucggcuaccuggggcuccugucccaaagaacacgggacauuuauaucucucgcagacuucugggaaccuucacauggacccucagcgauuccgagggcaacgaaacccccggcggguacugccugacacgguggaugcugaucgaggcugagcucaaauguuuuggaaauacggccguggcuaagugcaacgaaaaacaugacgaggaguucugcgauaugcugcgccuuuuugacuucuguaagcaggccauuagacggcugaaaaccgaagcgcagaugagcauccagcucauuaauaaggccguuaacgcucugaucaaugaucaacuuauuaugaagaaccaucugcgcgacaucaugggcaucccuuauugcaauuacucuaaauauuguuaccucaaccacacagugaccgggaagacaucccugcccagaugcugucuggucagcaauggaucuuaccucaacgaaacccacuucagcgacgauauugagcagcaggccgacaauaugaucacggagaugcugcaaaaagaauauauggaucggcagggcaagacaccucuugggcugguggaccucuuuguguucuccaccucuuuuuaccugauuagcaucuuccugcaccuugucaaaauuccgacccaucgccacguuaucggaaagcccugcccuaaaccccauagacucaaccacaugggcauuuguuccugcggccuguauaagcacccuggggugcccgugaaguggaaacggugaggacuagucccuguucccagagcccacuuuuuuuucuuuuuuugaaauaaaauagccugucuuucagaucucaaaggcucuuuucagagccaccaaaaaaaaaaaaaaaaaaaaaaaaaaaaaaaaaaaaaaaaaaaaaaaaaaaaaaaaaaaaaaaaagaauu

SEQ ID NO: 40183 - RNA, 1714 nt, Artificial Sequence
  mRNA product Design a-1 (hSL-A64-N5) comprising derived and/or modified sequence from LASV(LASV237-NIG-2010;Clade II)__AIT17638__GPCmut12 (opt5)
aggagagucccgcagucggcguccagcggcucugcuuguucgugugugugucguugcaggccuuauucaagcuuaccaugggccagaucauuaccuucuuucaagaggugccccacgucaucgaagagguuaugaacauugugcugaucgcccucagccugcuugcuauucugaaggggaucuacaauguggccacaugcggacucuucggccuggucuccuuucuucugcucugugggagaucuugcagcacgaccuauaaaggaguguacgaacugcagacacuggagcucgacauggcgucccugaacauguguaugccucuuucuugcaccaagaauaacagccaucacuauaucaugguuggcaaugaaacagggcuggagcucacccugacaaacaccuccauuaucaaucauaaauucuguaaccuuucugaugcucacaagaaagaccuguacgaucaugcccucaugagcauuaucuccacguuucaccugagcauuccgaauuucaaccaguaugaggccaugucuugcgacuuuaauggaggcaagaucuccgugcaguacaaccugagccacaccuaugcugucgaugccgcuaaucauuguggcacaauugccaacggggugcuccaaaccuucaugcggauggcguggggaggcucuuacaucgcccuggacuccgggaagggaagcugggauugcaucaugacaucuuaccaguaucuuauuauccagaauaccacgugggaagaccacugucaguuuucccgccccagcccuauuggcuaccuggggcuccugucccaaagaacacgggauaucuauauuucucgcagacuucugggaaccuucacauggacccucagcgacuccgagggcaacgaaacccccggcggguacugccugacacgguggaugcugaucgaggcugagcucaaauguuuuggaaacacggccguugcuaagugcaaugaaaaacaugaugaggaguucugcgacaugcugcgccuuuuugauuucuguaagcaggccaucagacggcugaaaaccgaagcgcagaugagcauucagcucaucaacaaggccgugaaugcucugauuaacgaccaacuuaucaugaagaaucaucugcgcgacauuaugggcaucccuuauugcaacuacucuaaauauuguuaccucaaucacacagucaccgggaagacaucccugcccagaugcugucuggugagcaacggaucuuaccucaaugaaacccacuucagcgaugacaucgagcagcaggccgauaacaugauuacggagcugcuucaaaaagaauauauggaccggcagggcaagacaccucuggggcucguggaucuguuugucuucuccaccucuuuuuaccugaucagcauuuuccuucaccucaucaaaauuccgacccaucgccacaucacaggaaagcccugcccuaaaccccauagacugaaucacaugggcauuuguuccugcggccuguauaagcacccugggguucccgugaaguggaaacggugaggacuagucccuguucccagagcccacuuuuuuuucuuuuuuugaaauaaaauagccugucuuucagaucucaaaggcucuuuucagagccaccaaaaaaaaaaaaaaaaaaaaaaaaaaaaaaaaaaaaaaaaaaaaaaaaaaaaaaaaaaaaaaaaagaauu

SEQ ID NO: 40184 - RNA, 1714 nt, Artificial Sequence
  mRNA product Design a-1 (hSL-A64-N5) comprising derived and/or modified sequence from LASV(LASV253-NIG-2011;Clade II)__AIT17670__GPCmut12 (opt5)
aggagagucccgcagucggcguccagcggcucugcuuguucgugugugugucguugcaggccuuauucaagcuuaccaugggccagaucauuaccuucuuucaagaggugccccacgucaucgaagagguuaugaacauugugcugaucgcccucagccugcuugcuauucugaaggggaucuacaauguggccacaugcggacucuucggccuggucuccuuucuucugcucugugggagaucuugcagcacgaccuauaaaggaguguacgaacugcagacacuggagcucgacauggcgucccugaacauguguaugccucuuucuugcaccaagaauaacagccaucacuauaucaugguuggcaaugaaacagggcuggagcucacccugacaaacaccuccauuaucaaucauaaauucuguaaccuuucugaugcucacaagaaaaaucuguacgaccaugcccucaugagcauuaucuccacguuucaccugagcauuccgaacuucaaucaguaugaggccaugucuugcgauuuuaacggaggcaagaucuccgugcaguacaaucugagccacaccuaugcugucgacgccgcuaaccauuguggcacaauugccaauggggugcuccaaaccuucaugcggauggcguggggaggcucuuacaucgcccuggauuccgggaagggaagcugggacugcaucaugacaucuuaccaguaucuuauuauccagaacaccacgugggaagaucacugucaguuuucccgccccagcccuauuggcuaccuggggcuccugucccaaagaacacgggacaucuauauuucucgcagacuucugggaaccuucacauggacccucagcgauuccgagggcaacgaaacccccggcggguacugccugacacgguggaugcugaucgaggcugagcucaaauguuuuggaaauacggccguugcuaagugcaacgaaaaacaugacgaggaguucugcgauaugcugcgccuuuuugacuucuguaagcaggccaucagacggcugaaagcggaagcccagaugagcauucagcucaucaauaaggcugugaacgcccugauuaaugaucaacuuaucaugaagaaccaucugcgcgacauuaugggcaucccuuauugcaauuacucuaaauauuguuaccucaaccacaccgucacagggagaaccucccugccccggugcugucuggugagcaauggaucuuaccucaacgaaacacacuucagcgacgauaucgagcagcaggcugacaauaugauuaccgagcugcuucaaaaggaauauaucgaucgccagggcaaaacgccucuggggcucguggaccuguuugucuucuccacaucuuuuuaccugauuagcaucuuccuucaccucguuaagauuccgacccauagacacaucauuggaaaacccugcccuaagccccaucggcugaaccacaugggcaucuguuccugcggccuguauaaacacccuggggugcccgugaaguggaagcgcugaggacuagucccuguucccagagcccacuuuuuuuucuuuuuuugaaauaaaauagccugucuuucagaucucaaaggcucuuuucagagccaccaaaaaaaaaaaaaaaaaaaaaaaaaaaaaaaaaaaaaaaaaaaaaaaaaaaaaaaaaaaaaaaaagaauu

SEQ ID NO: 40185 - RNA, 1714 nt, Artificial Sequence
  mRNA product Design a-1 (hSL-A64-N5) comprising derived and/or modified sequence from LASV(LASV254-NIG-2011;Clade II)__AIT17674__GPCmut12 (opt5)
aggagagucccgcagucggcguccagcggcucugcuuguucgugugugugucguugcaggccuuauucaagcuuaccaugggccagaucauuaccuucuuucaagaggugccccacgucaucgaagagguuaugaacauugugcugaucgcccucagccugcuugcuauucugaaggggaucuacaauguggccacaugcggacucuucggccuggucuccuuucuucugcucugugggagaucuugcagcacgaccuauaaaggaguguacgaacugcagacacuggagcucgacaugaccaaccugaauauguguaugccucuuuccugcacaaagaacaauucucaucacuauaucaugguuggcaacgaaaccgggcuggagcucacacugaccaauacgagcauuaucaaccauaaauucuguaaucuuuccgaugcgcacaagaaaaaccuguacaaucaugcucucaugucuauuaucagcaccuuucaccuguccauuccgaacuucaaucaguaugaggccaugagcugcgacuuuaacggaggcaagaucucugugcaguacaaucugucccacagcuaugccgucgaugcugccaaccauuguggcacaauugcuaacggggugcuccaaaccuucaugcggauggccuggggaggcucuuacaucgcgcuggacuccgggaagggaaauugggauugcaucaugacaagcuaccaguaucuuauuauccagaacaccacgugggaagaccacugucaguuuucucgccccuccccuauuggcuaccuggggcuccugagccaaagaacacgggauaucuauauuucccgcagacuucugggaaccuucacauggacccucucugacagcgagggcaaugaaacccccggcggguacugccugacacgguggaugcugaucgaggccgagcucaaauguuuuggaaacacggcuguugccaagugcaaugaaaaacaugaugaggaguucugcgacaugcugcgccuuuuugauuucuguaagcaggcuaucagacggcugaaaaccgaagcccaggcgaacauucagcucaucaauaaggccgugaacgcucugauuaaugaccaacuuaucaugaagaaccaucugcgcgauauuaugggcaucccuuauugcaauuacuccaaauauuguuaccucaaccacacagucaccgggaagacaagccugcccagaugcugucuggugucuaauggauccuaccucaacgaaacccacuucagcgacgacaucgagcagcaggccgauaauaugauuacggagcugcuucaaaaagaauauauggaccggcagggcaagacaccucuggggcucguggaucuguuugucuucucuaccagcuuuuaccugaucuccauuuuccuucaccucguuaaaaucccgacccaucgccacgugauuggaaagcccugcccuaaaccccauagacugaaccacaugggcaucuguucuugcggccuguauaagcacccuggggugcccgucaaguggaaacggugaggacuagucccuguucccagagcccacuuuuuuuucuuuuuuugaaauaaaauagccugucuuucagaucucaaaggcucuuuucagagccaccaaaaaaaaaaaaaaaaaaaaaaaaaaaaaaaaaaaaaaaaaaaaaaaaaaaaaaaaaaaaaaaaagaauu

SEQ ID NO: 40186 - RNA, 1714 nt, Artificial Sequence
  mRNA product Design a-1 (hSL-A64-N5) comprising derived and/or modified sequence from LASV(Nig08-A19;Clade III)__ADU56618__GPCmut12 (opt5)
aggagagucccgcagucggcguccagcggcucugcuuguucgugugugugucguugcaggccuuauucaagcuuaccaugggccagaucgugaccuucuuucaagaggucccccacguuauugaagaggugaugaacaucgugcugauugcccucagcauccuggcuauucuuaaggggcuguacaauaucgccacaugcggacucaucggccuggucacguuccuucugcucuccgggagaucuuguagcaugaccuauaaaggaguguacgaacugcagacacuggagcucaacaugaauacccugaacaugugcaugccucuuuccuguacaaagaauaacucucaucacuauauuaugguuggcaaugaaaccgggcuggagcucacacugaccaacacgagccuucugcaucacaaauuuugcaaucucuccgacgcgcauaagaaaaaccuguacgaucacacccugaugucuaucauuagcacauuccaccucuccaucccgaauuuuaaccaguaugaggcuaugagcugugacuucaauggaggcaagauuaccgugcaguacaaccugucucauuccuaugccaucgaugccgcuaaucacugcggcacagucgccaacggggugcuucaaaccuuuaugcggauggcuuggggaggcagcuacauugcccuggacucugggcgcggaaagugggauuguaucaugacguccuaccaguaucucaucauucagaacacaaccugggaagaccauugccaguucagcagacccucuccuaucggcuaccuggggcuucugucccaacggacacgcgauauuuauaucagcagacggcuccugggaaccuuuaccuggacacuguccgacucugagggcaaugaaacgcccggcggguacugucucacccgcuggaugcugauugaggcggagcuuaaaugcuucggaaacacagccguugcuaaguguaaugaaaaacacgaugaggaauuuugcgacaugcugagacucuucgauuuuugcaagcaggccauccggcgccugaaagcugaggcccagaugagcauccagcuuauuaacaaggcggugaaugcccugaucaacgaccaacucauuaugaagaaucaccugagagauaucaugggcauuccuuauuguaacuacuccaaauauugcuaccugaaucauaccagcacagggcggaccucucucccccgcuguugccuggucuccaacggaagcuaccuuaaugaaacgcacuucucugacgacaucgagcagcaggcugauaacaugaucacagagaugcugcaaaaggaauaucucgacagacagggcaaaaccccucuggggcugguggaucuuuucguguuuagcaccuccuucuaccucauuucuaucuuucugcaucuggucaagauuccgacacaccggcauaucguuggaaaacccuguccuaagccccaccgccucaaucacaugggcauuugcagcuguggccuguauaaacagccuggggugcccgugagauggaagcggugaggacuagucccuguucccagagcccacuuuuuuuucuuuuuuugaaauaaaauagccugucuuucagaucucaaaggcucuuuucagagccaccaaaaaaaaaaaaaaaaaaaaaaaaaaaaaaaaaaaaaaaaaaaaaaaaaaaaaaaaaaaaaaaaagaauu

SEQ ID NO: 40187 - RNA, 1717 nt, Artificial Sequence
  mRNA product Design a-1 (hSL-A64-N5) comprising derived and/or modified sequence from LASV(G1180-SLE-2010;Clade IV)__AIT17168__GPCmut12 (opt5)
aggagagucccgcagucggcguccagcggcucugcuuguucgugugugugucguugcaggccuuauucaagcuuaccaugggccagaucgugaccuucuuucaagaggucccccacguuauugaagaggugaugaacaucgugcugauugcccucagcauccuggcuguccuuaaggggcuguacaauuucgccacaugcggacucgugggccugcuuacguuucugcuccugugugggagauccugcaccgcgucucgguauaaaggaguuuacgaacugcagacacucgagcugaacauggaaacccuuaauauguguaugccucugagcugcacaaagaacaauucccaucacuauauuauggugggcaacgagaccgggcucgagcugacacuuaccaauacgucuaucaucaaccauaaauucuguaaucugagcgacgcucacaagaaaaaccucuacgaucaugcccugauguccauuaucucuaccuuucaccugagcauuccgaauuucaaccaguaugaagccauguccugcgacuuuaauggaggcaagaucagcguccaguacaaccucucucacuccuaugcuggcgaugccgcuaaucauugugggacaguggccaacggaguucugcaaaccuucaugcgcauggcguggggcgggagcuacauugcccuugacucuggacacggcuccugggauugcaucaugacaagcuaccaguaucugauuauccagaacaccacgugggaggaccauugucaguuuucuagacccuccccuaucggguaccucggacugcuuagccaacggacacgcgauauuuauaucuccagacggcugcucggcaccuucacauggacccugucugacagcgaaggcaaggauacccccgggggauacugccugacacgcuggaugcucauugaggcugagcugaaauguuuuggcaauacggccguggcuaagugcaacgaaaaacacgacgaggaguucugcgauaugcuuagacuguuugacuucuguaagcaggccauccagcggcucaaagcggaagcccagauguccauucaacugaucaauaaggcugucaacgcccuuaucaaugaucagcugauuaugaagaaccaccuccgcgacaucauggggauuccuuauugcaauuacagcaaauauuguuaccugaaccauaccacaaccggaaagacaucucugcccaaaugcugucucguguccaauggcagcuaccugaacgaaacccacuucucugacgauaucgagcagcaagcugacaauaugauuacggagaugcuucagaaggaauauauggagagacaggggaaaacaccucugggacucguggaucuguuugucuucagcaccuccuuuuaccugaucucuaucuuccuucaucucguuaagauuccgacccaccggcauaucgugggcaaaagcugccccaagccucaccgccugaaccacaugggcauuuguuccugcgggcuguauaagcagcccggagugccugucaaauggaagagaugaggacuagucccuguucccagagcccacuuuuuuuucuuuuuuugaaauaaaauagccugucuuucagaucucaaaggcucuuuucagagccaccaaaaaaaaaaaaaaaaaaaaaaaaaaaaaaaaaaaaaaaaaaaaaaaaaaaaaaaaaaaaaaaaagaauu

SEQ ID NO: 40188 - RNA, 1717 nt, Artificial Sequence
  mRNA product Design a-1 (hSL-A64-N5) comprising derived and/or modified sequence from LASV(G1442-SLE-2011;Clade IV)__AIT17180__GPCmut12 (opt5)
aggagagucccgcagucggcguccagcggcucugcuuguucgugugugugucguugcaggccuuauucaagcuuaccaugggccagaucgugaccuucuuucaagaggucccccacguuauugaagaggugaugaacaucgugcugauugcccucagcauccuggcuguccuuaaggggcuguacaauguggccacaugcggacucauuggccugguuacguuccuucugcucugugggagauccugcaccacaacccuguauaaaggaguguacgaacugcagacacucgagcugaacauggaaacccuuaauauguguaugccucugucuugcacaaagaacaauagccaucacuauauccgggucggcaacgagaccgggcucgagcugacgcuuaccaauacauccaucauuaaccauaaauuuuguaaucugucugacgcgcacaagaaaaaccucuacgaucaugcucugaugagcaucauuuccaccuuccaccugucuaucccgaauuuuaaccaguaugaagccaugagcugcgacuucaauggaggcaagauuuccgugcaguacaaccucagccacucuuaugccggcgaugcugccaaucauugugggacaguugcuaacggagugcugcaaaccuuuaugcgcauggccuggggcggguccuacaucgcgcuugacagcggaagaggcaacugggauugcauuaugacgucuuaccaguaucugaucauccagaauacaaccugggacgaucacugucaguucucccggcccagcccuauuggguaccucggacugcuuucucaacgcacaagagacgucuauaucucccggcgccugcucggcaccuuuaccuggacacugagcgauuccgagggcaaggacacgcccgggggauacugccugaccagauggaugcucauugaagccgagcugaaauguuucggcaacacagcuguggccaagugcaaugagaaacaugaugaagaguuuugcgacaugcuucggcuguucgauuuuuguaagcaggcuauccagcgccucaaagccgaagcgcagaugucuauucaacugaucaacaaggccgugaaugcucuuaucaacgaccagcugauuaugaagaaucaccucagagacaucauggggauuccuuauugcaacuacagcaaauauuguuaccugaauaacaccgccacaggaaagaccucccugcccaaaugcugucucaucagcaauggcucuuaccugaacgagacgcacuucuccgaugacauugaacaggaggcugauaauaugaucacagagaugcuucaaaaggaauauauggagcggcaggggaaaaccccucugggacucgucgaccuguucguuuuuagcaccucuuucuaccugaucagcauuuuucuucaucucgugaagaucccgacacaccgccauauugugggcaaauccugccccaagccucacagacugaaccauaugggcaucuguucuugcgggcuguauaagcagcccggagucccugugcgguggaaacgcugaggacuagucccuguucccagagcccacuuuuuuuucuuuuuuugaaauaaaauagccugucuuucagaucucaaaggcucuuuucagagccaccaaaaaaaaaaaaaaaaaaaaaaaaaaaaaaaaaaaaaaaaaaaaaaaaaaaaaaaaaaaaaaaaagaauu

SEQ ID NO: 40189 - RNA, 1717 nt, Artificial Sequence
  mRNA product Design a-1 (hSL-A64-N5) comprising derived and/or modified sequence from LASV(G3010-SLE-2013;Clade IV)__AIT17344__GPCmut12 (opt5)
aggagagucccgcagucggcguccagcggcucugcuuguucgugugugugucguugcaggccuuauucaagcuuaccaugggccagaucgugaccuucuuucaagaggucccccacguuauugaagaggugaugaacaucgugcugauugcccucagcauccuggcuguccuuaaggggcuguacaauuucgccacaugcggacucgugggccugguuacguuucuucugcucugugggagauccugcaccacaucucuguauaaaggaguguacgaacugcagacccucgagcugaacauggaaacacuuaauauguguaugccucugagcugcaccaagaacaauucccaucacuauauuauggucggcaacgagacagggcucgagcugacccuuacgaauaccucuaucaucaaccauaaauucuguaaucugagcgacgcgcacaagaaaaaccucuacaaucaugcucugauguccauuaucucuacauuucaccugagcauuccgaacuucaaucaguaugaagccauguccugcgauuuuaacggaggcaagaucagcgugcaguacaaucucucucacuccuaugccggcgacgcugccagccauugugggaccguugcuaacggagugcugcaaacauucaugcggauggccuggggcgggucuuacauugcgcuugauuccggauacggcaagugggacugcaucaugaccagcuaucaguaccugauuauccagaacacgacaugggaggaucacugucaguuuucucgccccuccccuaucggguaucucggacugcuuagccaaagaacccgggacauuuacaucucccgcagacugcucggcacauucaccuggacccugucugauagcgaaggcaaagacacacccgggggauauugccugacgcgguggaugcucauugaggccgagcugaaguguuuuggcaauaccgcugucgccaaaugcaacgaaaagcaugaugaggaguucugcgacaugcuucgccuguuugauuucuguaaacaggcuauccagagacucaagacagaagcccagauguccauucaacugaucaauaaggcggugaacgcccuuaucaaugaccagcugauuaugaaaaaccaccuccgggauaucauggggauuccuuacugcaauuauagcaaguacuguuaccugaaccacaccacaaccggaaaaacgucucugcccaagugcugucucguguccaauggcagcuaucugaacgaaacacauuucucugacgacaucgagcagcaagcugauaauaugauuaccgagaugcuucagaaagaauacauggagcgccaggggaagaccccucugggacucgucgaccuguuuguuuucagcacauccuuuuaucugaucucuaucuuccuucaccucgugaaaauuccgacccauagacacaucgugggcaagagcugccccaagccucaucggcugaaccacaugggcauuuguuccugcgggcuguacaaacagcccggagucccugugcgcuggaagagaugaggacuagucccuguucccagagcccacuuuuuuuucuuuuuuugaaauaaaauagccugucuuucagaucucaaaggcucuuuucagagccaccaaaaaaaaaaaaaaaaaaaaaaaaaaaaaaaaaaaaaaaaaaaaaaaaaaaaaaaaaaaaaaaaagaauu

SEQ ID NO: 40190 - RNA, 1717 nt, Artificial Sequence
  mRNA product Design a-1 (hSL-A64-N5) comprising derived and/or modified sequence from LASV(G502-SLE-2009;Clade IV)__AIT17126__GPCmut12 (opt5)
aggagagucccgcagucggcguccagcggcucugcuuguucgugugugugucguugcaggccuuauucaagcuuaccaugggccagaucgugaccuucuuucaagaggucccccacguuauugaagaggugaugaacaucgugcugauugcccucagcauccuggcuguccuuaaggggcuguacaauuucgccacaugcggacucgugggccugcuuacguuucugcuccugugugggagauccugcaccacaggacuguauaaaggcguuuacgaacuccagacccuggagcuuaacauggaaacacugaauauguguaugccucucucuugcaccaagaacaauagccaucacuauauuaugguggggaacgagacaggacuggagcuuacccugacgaauaccuccaucaucaaccauaaauucuguaaucucucugacgcgcacaagaaaaaccuguacgaucaugcucugaugagcauuaucuccacauuucaccucucuauuccgaauuucaaccaguaugaagccaugagcugcgacuuuaauggcggcaagaucuccguccaguacaaccugagccacucuuaugccggggaugcugccgaccauuguggaaccguggcuaauggcguucuucaaacauucaugcggauggccuggggaggguccuacauugcgcuggauagcggccgcgggagaugggacugcaucaugaccucuuaccaguaucucauuauccagaacacgacaugggaggaucacugucaguuuucccggcccagcccuaucggauaccugggccuucugucucaacgcaccagagacauuuauaucucccggcgccuccugggcacauucaccuggacccugagcgauuccgaagggaaggacacacccggaggcuacugccucacgagauggaugcugauugaggccgagcuuaaauguuuugggaacaccgcuguggccaagugcaaugaaaaacaugaugaggaguucugcgacaugcugcggcucuuugauuucuguaagcaggcuauccagcgccugaaagccgaagcgcagaugucuauucaacuuaucaacaaggccgucaaugcucugaucaacgaccagcucgugaugaagaaucaccugagagacauuaugggaaucccuuauugcaacuacagccgguauuguuaccugaaucacacaaccacaggccgcaccucccuccccaaaugcugucuggugagcaacgggucuuaccuuaaugaaacgcauuucuccgaugacauugagcagcaagccgauaacaugaucacagagaugcugcagaaggaauauauggagagacagggaaaaaccccucucggccuggucgaccuguuuguuuucagcaccucuuuuuaccuuauuagcaucuuccuccaccuggugaagaucccgacacaucggcacauugugggcaaauccugccccaagccucaucgccugaaucacauggggaucuguucuugcggacucuauaaacagcccggcgucccugugaaguggaagagaugaggacuagucccuguucccagagcccacuuuuuuuucuuuuuuugaaauaaaauagccugucuuucagaucucaaaggcucuuuucagagccaccaaaaaaaaaaaaaaaaaaaaaaaaaaaaaaaaaaaaaaaaaaaaaaaaaaaaaaaaaaaaaaaaagaauu

SEQ ID NO: 40191 - RNA, 1717 nt, Artificial Sequence
  mRNA product Design a-1 (hSL-A64-N5) comprising derived and/or modified sequence from LASV(G733-SLE-2010;Clade IV)__AIT17154__GPCmut12 (opt5)
aggagagucccgcagucggcguccagcggcucugcuuguucgugugugugucguugcaggccuuauucaagcuuaccaugggccagaucgugaccuucuuucaagaggucccccacguuauugaagaggugaugaacaucgugcugauugcccucagcauccuggcuguccuuaaggggcuguacaauuucgccacaugcggaauugugggccucguuuccuuucugcuucugugugggagaucuugcacgaccagccucuauaaaggaguguacgaacugcagacacuggagcucaacauggaaacccugaauauguguaugccucuuuccugcacaaagaacaauucucaucacuauaucauggucggcaacgagaccgggcuggagcucacacugaccaauacgagcaucauuaaccauaaauucuguaaucuuuccgacgcgcacaagaaaaaccuguacgaucaugcucucaugucuaucauuagcaccuuucaccuguccaucccgaauuucaaccaguaugaagccaugagcugcgacuuuaauggaggcaagauuucugugcaguacaaccugucccacagcuaugccggcgaugcugccaaucauugugggacaaucgcuaacggaguucuccaaaccuucaugcggauggccuggggcgggucuuacauugcgcuggacuccggacgcgauagaugggacugcaucaugacaagcuaccaguaucuuaucauucagaacaccacgugggaggaucacugucaguuuucucggcccuccccuaucggcuaccuggggcuccugagccaacgcacaagagacauuuauaucucccggcgccuucugggaaccuucacauggacccucucugauagcgaaggcaaggacacccccggcggguacugccugacaagauggaugcugauugaggccgagcucaaauguuuuggaaauacggcuguggccaagugcaacgaaaaacaugaugaggaguucugcgacaugcugcggcuuuuugauuucuguaagcaggcuauccagcgccugaaagccgaagcgcagauguccauccaacucauuaauaaggccgucaacgcucugaucaaugaccagcuuauuaugaagaaccaccugagagacaucaugggcauuccuuauugcaauuacagcaaauauuguuaccucaaccacaccacaaccgggaagacaucucugcccaaaugcugucugguguccaauggaagcuaccucaacgaaacccauuucucugaugacaucgagcagcaagccgauaauaugaucacggagaugcugcagaaggaauauauggagcggcagggcaaaacaccucuugggcugguggaccucuuugucuucagcaccuccuuuuaccugauuucuaucuuccugcaccuuguuaagauuccgacccaucgccacguggugggaaaaagcugccccaagccucauagacucaaccacaugggcaucuguuccugcggccuguaugggcagcccggagucccugugaaguggaaacggugaggacuagucccuguucccagagcccacuuuuuuuucuuuuuuugaaauaaaauagccugucuuucagaucucaaaggcucuuuucagagccaccaaaaaaaaaaaaaaaaaaaaaaaaaaaaaaaaaaaaaaaaaaaaaaaaaaaaaaaaaaaaaaaaagaauu

SEQ ID NO: 40192 - RNA, 1717 nt, Artificial Sequence
  mRNA product Design a-1 (hSL-A64-N5) comprising derived and/or modified sequence from MOPV/LASV reassortant(IGS-1;Clade IV)__AFY05576__GPCmut12 (opt5)
aggagagucccgcagucggcguccagcggcucugcuuguucgugugugugucguugcaggccuuauucaagcuuaccaugggccagaucgugaccuucuuucaagaggucccccacguuauugaagaggugaugaacaucgugcugauugcccucagcguccuggcugugcuuaaggggcuguacaauuucgccacaugcggacucguuggccuggugacguuucuucugcucugugggagauccugcaccacaucucuguauaaaggagucuacgaacugcagacccucgagcugaacauggaaacacuuaauauguguaugccucugagcugcaccaagaacaauucccaucacuauaucauggugggcaacgagacagggcucgagcugacccuuacgaauaccucuauuaucaaccauaaauucuguaaucugagcgacgcgcacaagaaaaaccucuacgaucaugcucugauguccaucauuucuacauuucaccugagcaucccgaauuucaaccaguaugaagccauguccugcgacuuuaauggaggcaagauuagcguucaguacaaccucucucacuccuaugccggcgaugcugccaaucauugugggaccguggcuaacggaguccugcaaacauucaugcggauggccuggggcgggagcuacaucgcgcuugacucuggacgcggcaacugggauugcauuaugaccuccuaccaguaucugaucauucagaauacgacaugggaggaccacugucaguuuagcagacccucuccuaucggguaccucggacugcuuucccaacggacccgcgauaucuauauuagcagacggcugcucggcacauucaccuggacccuguccgacucugaaggcgaggauacacccgggggauacugccugacgcgcuggaugcucaucgaggccgaacugaaguguuuuggcaacaccgcuguggccaaaugcaaugagaagcaugacgaagaguucugcgauaugcuuagacuguuugacuucuguaaacaggcuauucagcggcucaaggccgaagcgcagaugagcauccaacugauuaacaaagccgugaaugcucuuaucaacgaucagcugaucaugaagaaucaccuccgcgacauuauggggaucccuuauugcaacuacuccaaguauuguuaccugaaucacacaaccacaggaagaaccagccugcccaaaugcugucucgucucuaacggcuccuaccugaaugagacgcauuucagcgacgauauugagcagcaagccgacaacaugaucacagaaaugcuucagaaggaguauauggaacggcaggggaaaaccccucugggacucguugaucuguuuguguucucuaccagcuuuuaccugauuuccaucuuccuucaccucgugaagaucccgacacaucgccacauugucggcaaaucuugccccaagccucauagacugaaucacaugggcaucuguagcugcgggcuguauaaacagcccggagugccuguuaaguggaagcggugaggacuagucccuguucccagagcccacuuuuuuuucuuuuuuugaaauaaaauagccugucuuucagaucucaaaggcucuuuucagagccaccaaaaaaaaaaaaaaaaaaaaaaaaaaaaaaaaaaaaaaaaaaaaaaaaaaaaaaaaaaaaaaaaagaauu

SEQ ID NO: 40193 - RNA, 1717 nt, Artificial Sequence
  mRNA product Design a-1 (hSL-A64-N5) comprising derived and/or modified sequence from LASV(LM765-SLE-2012;Clade IV)__AIT17814__GPCmut12 (opt5)
aggagagucccgcagucggcguccagcggcucugcuuguucgugugugugucguugcaggccuuauucaagcuuaccaugggccagaucgugaccuucuuucaagaggucccccacguuauugaagaggugaugaacaucgugcugauugcccucagcauccuggcuguccuuaaggggcuguacaauuucgccacaugcggacucgugggccugguuacguuucuucugcucugugggagauccugcaccacaucucuguauaaaggaguguacgaacugcagacccucgagcugaacauggaaacacuuaauauguguaugccucugagcugcaccaagaacaauucccaucacuauauuauggucggcaacgagacagggcucgagcugacccuuacgaauaccucuaucaucgaccauaaauucuguaaccugagcgaugcgcaccggaagaaucucuacgaccaugcucugauguccauuaucucuacauuucaccugagcauuccgaacuucaaucaguaugaagccauguccugcgauuuuaacggaggcaaaaucagcgugcaguacaaucucucucacuccuaugccaaggacgcugccgaucauuguggcaccguugcuaacggggugcugcaaacauucaugcgcauggccuggggaggcagcuacauugcgcuugacucugggagaggacggugggauugcaucaugaccuccuaccaguaucugauuauccagaauacgacaugggaggaccacugucaguuuagccgccccucuccuaucggcuaccucgggcugcuuucccaaagaacccgggauauuuauaucagccgcagacugcucggaacauucaccuggacccuguccgacucugaaggcaaggauacacccggcggguacugccugacgcgguggaugcucauugaggccgagcugaaauguuuuggaaacaccgcugucgccaagugcaacgaaaaacaugacgaggaguucugcgauaugcuucgccuguuugacuucuguaagcaggcuauccagagacucaaagccgaagcgcagaugagcauucaacugaucaauaaggccgugaacgcucuuaucaaugaccagcugauuaugaagaaccaccuccgggauaucaugggcauuccuuauugcaauuacuccaaauauuguuaccugaaccacacaaccacagggaagaccagccugcccaaaugcugucucgugucuaauggauccuaccugaacgaaacgcauuucagcgacgauaucgagcagcaagccgacaauaugauuacagagaugcuucagaaggaauauauggagcgccagggcaaaaccccucuggggcucgucgaucuguuuguuuucucuaccagcuuuuaccugaucuccaucuuccuucaccucgugaagauuccgacacauagacacaucgugggaaaacccugcccuaagccccaucggcugaaccacaugggcauuuguucuugcggccuguauaagcagccugggguccccgugaaauggaagcgcugaggacuagucccuguucccagagcccacuuuuuuuucuuuuuuugaaauaaaauagccugucuuucagaucucaaaggcucuuuucagagccaccaaaaaaaaaaaaaaaaaaaaaaaaaaaaaaaaaaaaaaaaaaaaaaaaaaaaaaaaaaaaaaaaagaauu

SEQ ID NO: 40194 - RNA, 1717 nt, Artificial Sequence
  mRNA product Design a-1 (hSL-A64-N5) comprising derived and/or modified sequence from LASV(LM776-SLE-2012;Clade IV)__AIT17824__GPCmut12 (opt5)
aggagagucccgcagucggcguccagcggcucugcuuguucgugugugugucguugcaggccuuauucaagcuuaccaugggccagaucgugaccuucuuucaagaggucccccacguuauugaagaggugaugaacaucgugcugauugcccucagcauccuggcuguccuuaaggggcuguacaauuucgccacaugcggacucgugggccugguuacguuucuucugcucugugggagauccugcaccacaucuguguauaaaggagucuacgaacugcagacccuggagcucaacauggaaacacugaauauguguaugccucuuagcugcaccaagaacaauucccaucacuauauuauggugggcaacgagacagggcuggagcucacccugacgaauaccucuaucaucaaccauaaauucuguaaucuuagcgacgcgcacaagaaaaaccuguacgaucaugcucucauguccauuaucucuacauuucaccugagcauuccgaauuucaaccaguaugaagccauguccugcgacuuuaauggaggcaagaucagcguucaguacaaccugucucacuccuaugccggcgaugcugccaaucauugugggaccguggcuaacggaguccuccaaacauucaugcggauggccuggggcgggagcuacauugcgcuggacucuggacacggcaagugggauugcaucaugaccuccuaccaguaucuuauuauccagaacacgacaugggaggaccauugucaguuuagccgccccucuccuaucggguaccugggacuccugucccaaagaacccgggauauuuauaucagccgcagacuucugggcacauucaccuggacccucuccgacucugaaggcaaagauacacccgggggauacugccugacgcgguggaugcugauugaggccgagcucaaguguuuuggcaauaccgcuguggccaaaugcaacgaaaagcacgacgaggaguucugcgauaugcugcgccuuuuugacuucuguaaacaggcuauccagagacugaaggccgaagcgcagaugagcauucaacucaucaauaaggccgugaacgcucugaucaaugaucagcuuauuaugaaaaaccaucugcgggacaucauggggauuccuuauugcaauuacuccaaguauuguuaccucaaccacacaaccacaggaaaaaccagccugcccaagugcugucuggucucuaauggcuccuaccucaacgaaacgcacuucagcgacgauaucgagcagcaagccgacaauaugauuacagagaugcugcagaaagaauauauggagcgccaggggaagaccccucuuggacugguugaucucuuuguguucucuaccagcuuuuaccugaucuccaucuuccugcaucuugugaaaauuccgacacacagacauaucgucggcaagucuugccccaagccucaccggcucaaccacaugggcauuuguagcugcgggcuguauaaacagcccggagugccuguucgcuggaagagaugaggacuagucccuguucccagagcccacuuuuuuuucuuuuuuugaaauaaaauagccugucuuucagaucucaaaggcucuuuucagagccaccaaaaaaaaaaaaaaaaaaaaaaaaaaaaaaaaaaaaaaaaaaaaaaaaaaaaaaaaaaaaaaaaagaauu

SEQ ID NO: 40195 - RNA, 1717 nt, Artificial Sequence
  mRNA product Design a-1 (hSL-A64-N5) comprising derived and/or modified sequence from LASV(Mad39;Clade IV)__ANH09722__GPCmut12 (opt5)
aggagagucccgcagucggcguccagcggcucugcuuguucgugugugugucguugcaggccuuauucaagcuuaccaugggccagaucgugaccuucuuucaagaggucccccacguuauugaagaggugaugaacaucgugcugauugcccucagcauccuggcuguccuuaaggggcuguacaauguggccacaugcggacucauuggccugguuacguuccuucugcucugugggagauccugcaccacaacccuguauaaaggaguguacgaacugcaggcgcucgagcugaacauggaaacacuuaauauguguaugccucugucuugcaccaagaacaauagccaucacuauauccgggucggcaacgagacagggcucgagcugacccuuacgaauaccucccugaucaaccauaaauuuuguaaucucucugacgcucacaagaaaaaccuguacgaucaugcccugaugagcauuaucuccacauuccaccucucuauuccgaauuuuaaccaguaugaagccaugagcugcgacuucaaugauggaaagaucuccgugcaguacaaccugagccacaccuaugcuggcgacacagccaaucauuguggcaccguugcuaacggggugcuucaaacguuuaugcgcauggccuggggaggcucuuacauugcgcuggauuccgggagaggaggcugggacugcaucaugacaagcuaccaguaucucauuauccagaacaccacaugggaggaucacugucaguucucucggcccuccccuaucggguaccugggacuucugagccaacgcaccagagacauuuauaucucucggcgccuccugggcaccuuuacauggacgcuguccgauagcgaaggcaaggacacccccgggggauacugccucacaagauggaugcugauugaggccgagcuuaaauguuucggcaauaccgcugucgccaagugcaacgaaaaacaugaugaggaauuuugcgacaugcugcgccucuucgauuuuuguaagcaggcuauccagcggcugaaagccgaggcgcagauguccauucaacuuaucaauaaggccgugaacgcucugaucaaugaccagcucauuaugaagaaccaccugagagacaucauggggauuccuuauugcaauuacucuaaauauuguuaccugaaccacacagugaccggaaagacgagccuccccaaaugcugucuggucuccaauggcagcuaccuuaacgaaacacauuucucugaugacaucgagcagcaagccgauaauaugauuaccgagaugcugcagaaggaauauauggagcggcaggggaaaaccccucucggacugguugaccuguucguguuuuccaccagcuucuaccuuaucucuaucuuucuccaccuggugaagauuccgacacaucgccacgucgugggcaaacccugcccuaagccccauagacugaaccacaugggcaucuguagcugcggguucuauaagcagccuggaguucccgugcgguggaaacgcugaggacuagucccuguucccagagcccacuuuuuuuucuuuuuuugaaauaaaauagccugucuuucagaucucaaaggcucuuuucagagccaccaaaaaaaaaaaaaaaaaaaaaaaaaaaaaaaaaaaaaaaaaaaaaaaaaaaaaaaaaaaaaaaaagaauu

SEQ ID NO: 40196 - RNA, 1717 nt, Artificial Sequence
  mRNA product Design a-1 (hSL-A64-N5) comprising derived and/or modified sequence from LASV(Z0947-SLE-2011;Clade IV)__AIT17840__GPCmut12 (opt5)
aggagagucccgcagucggcguccagcggcucugcuuguucgugugugugucguugcaggccuuauucaagcuuaccaugggccagaucgugaccuucuuucaagaggucccccacguuauugaagaggugaugaacaucgugcugauugcccucagcauccuggcuguccuuaaggggcuguacaauuucgccacaugcggacucgugggccugguuacguuucuucugcucugugggagauccugcaccauuucucuguauaaaggaguguacgaacugcagacacucgagcugaacauggaaacccuuaauauguguaugccucugagcugcacaaagaacaauucccaucacuauaucauggucggcaacgagaccgggcucgagcugacacuuaccaauacgucuaucauuaaccauaaauucuguaaucugagcgacgcgcacaagaaaaaccucuacgaucaugcucugauguccaucauuucuaccuuucaccugagcaucccgaauuucaaccaguaugaagccauguccugcgacuuuaauggaggcaagauuagcgugcaguacaaccucucucacuccuaugccggcgaugcugccaaucauugugggacaguugcuaacggagugcugcaaaccuucaugcggauggccuggggcgggagcuacaucgcgcuugacucuggacgcgauagaugggacugcauuaugacauccuaccaguaucugaucauccagaacaccacgugggaggaucacugucaguuuagccggcccucuccuauuggcuaccucgggcugcuuucccaacgcacaagagacaucuauauuagccggcgccugcucggaaccuucacauggacccuguccgauucugaaggcaaggacacccccggcggguacugccugacaagauggaugcucaucgaggccgagcugaaauguuuuggaaauacggcugucgccaagugcaacgaaaaacaugaugaggaguucugcgacaugcuucggcuguuugauuucuguaagcaggcuauucagcgccucaaagccgaagcgcagaugagcauccaacugaucaauaaggccgugaacgcucuuauuaaugaccagcugaucaugaagaaccaccucagagacauuaugggcaucccuuauugcaauuacuccaaauauuguuaccugaaccacaccacaaccgggaagacaagccugcccaaaugcugucucgugucuaauggauccuaccugaacgaaacccauuucagcgaugacauugagcagcaagccgauaauaugaucacggagaugcuucagaaggaauauauggagcggcagggcaaaacaccucuggggcucgucgaccuguuuguuuucucuaccagcuuuuaccugaucuccauuuuccuucaccucgugaagaucccgacccaucgccacauugugggaaaacccugcccuaagccccauagacugaaccacaugggcaucuguucuugcggccuguauaagcagccugggguccccgugaaauggaagcggugaggacuagucccuguucccagagcccacuuuuuuuucuuuuuuugaaauaaaauagccugucuuucagaucucaaaggcucuuuucagagccaccaaaaaaaaaaaaaaaaaaaaaaaaaaaaaaaaaaaaaaaaaaaaaaaaaaaaaaaaaaaaaaaaagaauu

SEQ ID NO: 40197 - RNA, 1748 nt, Artificial Sequence
  mRNA product Design a-1 (hSL-A100) comprising derived and/or modified sequence from LASV(Josiah;Clade IV)__NP_694870__GPCmut12 (opt1)
aggagagucccgcagucggcguccagcggcucugcuuguucgugugugugucguugcaggccuuauucaagcuuaccaugggccagaucgugaccuucuuccaggaggucccccacgugaucgaggaggugaugaacaucguccugaucgcccucagcgugcuggccgugcugaaggggcucuacaacuucgcgaccugcggccuggucgggcuggugacguuccuccugcugugcggccgcuccugcaccaccagccucuacaaggggguguacgagcugcagacccuggagcucaacauggagacgcugaacaugugcaugccgcuguccugcaccaagaacaacagccaccacuacaucauggucggcaacgagaccggccucgagcugacgcugaccaacaccuccaucaucaaccacaaguucugcaaccucagcgacgcccacaagaagaaccuguacgaccacgcccugauguccaucaucagcaccuuccaccucuccauccccaacuucaaccaguacgaggccaugagcugcgacuucaacgggggcaagaucuccgugcaguacaaccugagccacuccuacgccggggacgcggccaaccacugcggcacgguggccaacgggguccugcagaccuucaugcggauggccuggggcggcagcuacaucgcgcucgacuccgggcgcggcaacugggacugcaucaugaccagcuaccaguaccugaucauccagaacaccacgugggaggaccacugccaguucucccggcccagccccaucggguaccugggccuccugucccagcgcacccgggacaucuacaucagccgccggcugcucggcaccuucaccuggacgcugagcgacuccgaggggaaggacaccccgggcggguacugccugacccgcuggaugcucaucgaggccgagcugaagugcuucggcaacaccgccguggccaagugcaacgagaagcacgacgaggaguucugcgacaugcugcggcuguucgacuucugcaagcaggccauccagcgccugaaggcggaggcccagaugagcauccagcugaucaacaaggccgugaacgcccucaucaacgaccagcugaucaugaagaaccaccuccgggacaucauggggauccccuacugcaacuacuccaaguacugcuaccucaaccacacgaccaccggccgcaccagccugcccaagugcugccuggucuccaacggcagcuaccucaacgagacgcacuucuccgacgacaucgagcagcaggccgacaacaugaucaccgagaugcugcagaaggaguacauggagcggcaggggaagacgccccugggccucguggaccuguucguguucagcaccuccuucuaccugaucagcaucuuccugcaccucgucaagaucccgacccaccgccacaucguggggaaguccugccccaagccccaccggcugaaccacaugggcaucugcagcugcgggcuguacaagcagcccggcgugccggucaaguggaagcgcugaggacuagucccuguucccagagcccacuuuuuuuucuuuuuuugaaauaaaauagccugucuuucagaucucaaaggcucuuuucagagccaccaaaaaaaaaaaaaaaaaaaaaaaaaaaaaaaaaaaaaaaaaaaaaaaaaaaaaaaaaaaaaaaaaaaaaaaaaaaaaaaaaaaaaaaaaaaaaaaaaaaaa

SEQ ID NO: 40198 - RNA, 1745 nt, Artificial Sequence
  mRNA product Design a-1 (hSL-A100) comprising derived and/or modified sequence from LASV(LP;Clade I)__AAF86701__GPCmut12 (opt1)
aggagagucccgcagucggcguccagcggcucugcuuguucgugugugugucguugcaggccuuauucaagcuuaccaugggccagaucaucaccuucuuccaggaggugccccacgucaucgaggaggugaugaacaucgugcugaucgcccucagccugcuggccauccucaaggggcuguacaacaucgcgaccugcggcaucaucgggcuggucgccuuccucuuccugugcggcaaguccugcagccugacgcucaagggcggguacgagcugcagacccuggagcucaacauggagacccugaacaugugcaugccgcuguccugcacgaagaacagcucccaccacuacauccgcgugggcaacgagaccgggcucgagcugacccugaccaacacgagcaucaucaaccacaaguucugcaaccucuccgacgcccacaagaagaaccuguacgaccacgcccugaugagcaucaucuccaccuuccaccucagcauccccaacuucaaccaguacgaggccauguccugcgacuucaacggcgggaagaucagcgugcaguacaaccugucccacagcuacgcgggcgacgccgccgagcacugcgggaccgucgccaacggcgugcugcagaccuucaugcggauggcguggggcgggcgcuacaucgcccucgacuccggcaaggggaacugggacugcaucaugacgagcuaccaguaccugaucauccagaacaccaccugggaggaccacugccaguucucccggcccagccccaucggcuaccugggccuccugucccagcgcacccgggacaucuacaucagccgccggcugcucgggacguucaccuggacccugagcgacuccgagggcaacgagacccccgggggcuacugccugacgcgcuggaugcucaucgaggccgagcugaagugcuucgggaacaccgccguggccaagugcaacgagaagcacgacgaggaguucugcgacaugcugcggcuguucgacuucugcaagcaggcgauccgccggcugaaggccgaggcccagaugagcauccagcugaucaacaaggccgucaacgcccucaucaacgaccagcugaucaugaagaaccaccuccgcgacaucaugggcauccccuacugcaacuacuccaaguacugcuaccucaaccacaccagcuccggccggaccagccugcccaagugcugccugaucuccaacgggagcuaccucaacgagacgcaguucuccgacgacaucgagcagcaggcggacaacaugaucaccgagaugcugcagaaggaguacaucgagcgccagggcaagaccccgcuggggcucguggacaucuucaucuucagcaccuccuucuaccugaucagcaucuuccugcaccugaucaagaucccgacgcaccggcacaucgugggcaagcccugccccaagccccaccgccucaaccacaugggggucugcuccugcggccuguacaagcacccgggcgugcccaccaaguggaagcggugaggacuagucccuguucccagagcccacuuuuuuuucuuuuuuugaaauaaaauagccugucuuucagaucucaaaggcucuuuucagagccaccaaaaaaaaaaaaaaaaaaaaaaaaaaaaaaaaaaaaaaaaaaaaaaaaaaaaaaaaaaaaaaaaaaaaaaaaaaaaaaaaaaaaaaaaaaaaaaaaaaaaa

SEQ ID NO: 40199 - RNA, 1745 nt, Artificial Sequence
  mRNA product Design a-1 (hSL-A100) comprising derived and/or modified sequence from LASV(803213;Clade II)__AAF86703__GPCmut12 (opt1)
aggagagucccgcagucggcguccagcggcucugcuuguucgugugugugucguugcaggccuuauucaagcuuaccaugggccagaucaucaccuucuuccaggaggugccccacgucaucgaggaggugaugaacaucgugcugaucgcccucagccugcuggccauccucaaggggaucuacaacgucgcgaccugcggccuguucgggcugaucuccuuccuccugcugugcggccgcagcugcuccgugacguacaaggggguguacgagcuccagacccuggagcugaacauggccaaccucaacaugugcaugccgcugagcugcaccaagaacaacucccaccacuacaucauggucggcaacgagacgggccuggagcucacccugaccaacaccagcaucaucaaccacaaguucugcaaccuguccgacgcccacaagaagaaccucuacgaccacgcccugaugagcaucaucuccacguuccaccugagcauccccaacuucaaccaguacgaggccauguccugcgacuucaacgggggcaagaucagcgugcaguacaaccucucccacagcuucgcgguggacgccgccaaccacugcgggaccaucgccaacggcguccugcagaccuucaugcggauggcguggggcggguccuacaucgcccuggacagcggcaaggggaacugggacugcaucaugaccuccuaccaguaccucaucauccagaacacgaccugggaggaccacugccaguucagccgccccucccccaucggcuaccuggggcugcucagccagcggacccgcgacaucuacaucagccggcgccugcugggcaccuucacguggacccucuccgacagcgagggcaacgaggcccccgggggcuacugccugacccgguggaugcugaucgaggccgagcucaagugcuucgggaacaccgccguggcgaagugcaacgagaagcacgacgaggaguucugcgacaugcugcgccuguucgacuucugcaagcaggccaucaagcggcucaagacggaggcccagauguccauccagcugaucaacaaggccgugaacgcccugaucaacgaccagcucaucaugaagaaccaccuccgcgacaucaugggcauccccuacugcaacuacagccgguacugcuaccugaaccacaccgucaccgggaagaccucccugccccgcugcugccuggugagcaacggcuccuaccugaacgagacgcacuucagcgacgacaucgagcagcaggcggacaacaugaucaccgagaugcuccagaaggaguacauggaccggcagggcaagaccccgcuggggcugguggaccucuucgucuucuccaccagcuucuaccugaucuccaucuuccugcaccuggugaagaucccgacgcaccgccacaucgugggcaagcccugccccaagccccaccggcucaaccacauggggaucugcagcugcggccuguacaagcacccggggguccccgugaaguggaagcgcugaggacuagucccuguucccagagcccacuuuuuuuucuuuuuuugaaauaaaauagccugucuuucagaucucaaaggcucuuuucagagccaccaaaaaaaaaaaaaaaaaaaaaaaaaaaaaaaaaaaaaaaaaaaaaaaaaaaaaaaaaaaaaaaaaaaaaaaaaaaaaaaaaaaaaaaaaaaaaaaaaaaaa

SEQ ID NO: 40200 - RNA, 1745 nt, Artificial Sequence
  mRNA product Design a-1 (hSL-A100) comprising derived and/or modified sequence from LASV(GA391;Clade III)__CAA36645__GPCmut12 (opt1)
aggagagucccgcagucggcguccagcggcucugcuuguucgugugugugucguugcaggccuuauucaagcuuaccaugggccagaucgugaccuucuuccaggaggucccccacgugaucgaggaggugaugaacaucguccugaucgcccucagcauccuggccauccugaaggggcucuacaacguggcgaccugcggccugaucgggcuggugacguuccuccugcuguccggccgcagcugcucccucaucuacaaggggaccuacgagcugcagacccuggagcucaacauggagacccugaacaugugcaugccgcugagcugcaccaagaacaacucccaccacuacauccgggucggcaacgagaccggccucgagcugacccugacgaacaccagcauccucaaccacaaguucugcaaccuguccgacgcccacaagcgcaaccuguacgaccacagccucauguccaucaucagcaccuuccaccuguccauccccaacuucaaccaguacgaggccaugagcugcgacuucaacgggggcaagaucaccgugcaguacaaccugucccacagcuucgccguggacgccgcggggcacugcggcacgcucgccaacgggguccugcagaccuucaugcggauggccuggggcggcuccuacaucgcccuggacagcgggcgcggcaacugggacugcaucaugaccuccuaccaguaccucaucauccagaacaccacgugggacgaccacugccaguucagccggcccucccccaucggguaccugggccugcucagccagcgcacccgggacaucuacaucagccgccggcugcugggcaccuucaccuggacgcucuccgacagcgaggggaacgagaccccgggcggguacugccugacccgcuggaugcugaucgaggcggagcucaagugcuucggcaacaccgccguggccaagugcaacgagaagcacgacgaggaguucugcgacaugcugcggcuguucgacuucugcaagcaggccauccgccggcucaagacggaggcccagauguccauccagcugaucaacaaggcggugaacgcccugaucaacgaccagcucaucaugaagaaccaccuccgcgacaucauggggauccccuacugcaacuacagccgguacugcuaccugaaccacaccuccaccggcaagaccagccugccccgcugcugccugaucuccaacggcagcuaccugaacgagacgaaguucuccgacgacaucgagcagcaggccgacaacaugaucaccgagaugcuccagaaggaguacaucgaccggcaggggaagacgccccugggccuggucgaccuguucguguucagcaccuccuucuaccucaucagcaucuuccugcaccuggugaagaucccgacccaccgccacaucgucgggaagcccugccccaagccccaccggcucaaccacaugggcaucugcuccugcgggcuguacaagcagccgggcgugcccgugcgcuggaagcggugaggacuagucccuguucccagagcccacuuuuuuuucuuuuuuugaaauaaaauagccugucuuucagaucucaaaggcucuuuucagagccaccaaaaaaaaaaaaaaaaaaaaaaaaaaaaaaaaaaaaaaaaaaaaaaaaaaaaaaaaaaaaaaaaaaaaaaaaaaaaaaaaaaaaaaaaaaaaaaaaaaaaa

SEQ ID NO: 40201 - RNA, 1748 nt, Artificial Sequence
  mRNA product Design a-1 (hSL-A100) comprising derived and/or modified sequence from LASV(AV;Clade V)__CCA30314__GPCmut12 (opt1)
aggagagucccgcagucggcguccagcggcucugcuuguucgugugugugucguugcaggccuuauucaagcuuaccaugggccagaucgugaccuucuuccaggaggucccccacgugaucgaggaggugaugaacaucguccugaucgcccucagcauccuggccgugcugaaggggcucuacaacaucgcgaccugcggccugaucgggcugaucacguuccuccugcugugcggccgcuccugcagcuccaaccucuacaaggggguguacgagcugcagagccuggaccucaacauggagacccugaacaugugcaugccgcuguccugcaccaagaacaacagccaccacuacauccgggucggcaacgacacgggccucgagcugacccugaccaacaccuccauccucaaccacaaguucugcaaccugagcgacgcccacaagaaggaccuguacgaccacgcccucauguccaucaucagcacguuccaccuguccauccccaacuucaaccaguacgaggccaugagcugcgacuucaacgggggcaagaucuccgugcaguacaaccugagccacuccuacgccaucgacgcggccaaccacugcgggaccguggccaacggcauccuccagaccuucaugcgcauggccuggggcgggagcuacaucgcgcuggacuccggccgggggaacugggacugcaucaugaccagcuaccaguaccugaucauccagaacacgaccugggagaaccacugccaguucucccgccccagccccaucggcuaccucgggcugcugagccagcggacccgcgacaucuacaucucccggcgccuccugggcaccuucacguggacccugagcgacuccgagggcaacgccacccccgggggcuacugccucacccgguggaugcugaucgaggccgagcugaagugcuucgggaacacggccgucgccaagugcaacgagaagcacgacgaggaguucugcgacaugcuccgccuguucgacuucugcaagcaggcgaucagccggcugaaguccgaggcccagaugagcauccagcucaucaacaaggccgugaacgcccugaucaacgaccagcugaucaugaagaaccaccuccgcgacaucaugggcauccccuacugcaacuacuccaaguacugcuaccugaaccacaccaucaccgggaagaccagccugcccaagugcugccucguguccaacggcagcuaccugaacgagacgcacuucuccgacgacaucgagcagcaggccgacaacaugaucaccgagaugcugcagaaggaguacauggagcggcagggcaagaccccgcucgggcuggucgaccuguucguguucagcaccuccuucuaccugaucagcaucuuccuccgccuggugaagaucccgacgcaccggcacaucgucggcaagcccugccccaagccccaccgccugaaccacauggggaucugcuccugcggccucuacaagcagccgggggugcccgugcgguggaagcgcugaggacuagucccuguucccagagcccacuuuuuuuucuuuuuuugaaauaaaauagccugucuuucagaucucaaaggcucuuuucagagccaccaaaaaaaaaaaaaaaaaaaaaaaaaaaaaaaaaaaaaaaaaaaaaaaaaaaaaaaaaaaaaaaaaaaaaaaaaaaaaaaaaaaaaaaaaaaaaaaaaaaaa

SEQ ID NO: 40202 - RNA, 1745 nt, Artificial Sequence
  mRNA product Design a-1 (hSL-A100) comprising derived and/or modified sequence from LASV(Togo/2016/7082;Clade VI)__AMR44577__GPCmut12 (opt1)
aggagagucccgcagucggcguccagcggcucugcuuguucgugugugugucguugcaggccuuauucaagcuuaccaugggccagaucaucaccuucuuccaggaggugccccacgucaucgaggaggugaugaacaucgugcugaucgcccucagccugcuggccauccucaagggggucuacaacguggcgaccugcggcaucaucgggcuggugacguuccuguuccucugcggccgcuccugcagccugaucuacaagggguccuacgagcugcagacccucgagcugaacauggagacccugaacaugugcaugccgcucagcugcacgaagaacuccagccaccacuacauccgggucggcaacgagaccggccuggagcugacccucaccaacacguccaucaucaaccacaaguucugcaaccugagcgacgcccacaagcgcaaccuguacgaccacgcccucauguccauccugagcaccuuccaccuguccauccccaacuucaaccaguacgaggccaugagcugcgacuucaacgggggcaagaucuccgugcaguacaaccucagccacgccuacgcgguggacgccgccgagcacugcgggaccgucgccaacggcgugcugcagaccuucaugcggauggcguggggcggguccuacaucgcccuggacagcggccgcgggaacugggacugcaucaugacguccuaccaguaccucaucauccagaacaccaccugggaggaccacugccaguucagccggcccucccccaucggcuaccuggggcugcucagccagcgcacccgggacaucuacaucagccgccggcugcugggcacguucaccuggacccucuccgacagcgagggcaacgagacccccgggggcuacugccugacgcgcuggaugcugaucgaggccgagcucaagugcuucgggaacaccgccguggccaagugcaacgagaagcacgacgaggaguucugcgacaugcugcggcuguucgacuucugcaagcaggcgauccagcgccucaaguccgaggcccagaugagcauccagcugaucaacaaggccgucaacgcccugaucaacgaccagcucaucaugaagaaccaccuccgggacaugaugggcauccccuacugcaacuacuccaaguacugcuaccugaaccacaccagcuccgggcgcaccagccugcccaagugcugccugguguccaacggcagcuaccugaacgagacgcacuucuccgacgacaucgagcagcaggccgacaacaugaucaccgagaugcuccagaaggaguacaucgaccggcagggcaagaccccgcuggggcugguggaccucuucgucuucagcaccuccuucuaccugaucagcaucuuccugcaccugaucaagaucccgacgcaccgccacaucgugggcaagcccugccccaagccccaccggcucaaccacauggggaucugcuccugcggccuguacaagcagccgggggugcccacccgcuggaagcggugaggacuagucccuguucccagagcccacuuuuuuuucuuuuuuugaaauaaaauagccugucuuucagaucucaaaggcucuuuucagagccaccaaaaaaaaaaaaaaaaaaaaaaaaaaaaaaaaaaaaaaaaaaaaaaaaaaaaaaaaaaaaaaaaaaaaaaaaaaaaaaaaaaaaaaaaaaaaaaaaaaaaa

SEQ ID NO: 40203 - RNA, 1745 nt, Artificial Sequence
  mRNA product Design a-1 (hSL-A100) comprising derived and/or modified sequence from LASV(KAK-428;Clade n.d. (VII))__ANH09740__GPCmut12 (opt1)
aggagagucccgcagucggcguccagcggcucugcuuguucgugugugugucguugcaggccuuauucaagcuuaccaugggccagaucgugaccuucuuccaggaggucccccacgugaucgaggaggugaugaacaucguccugaucgcccucagccugcuggccauccucaaggggcuguacaacuucgcgaccugcggcgugaucgggcugaucacguuccuccugcugugcggccgcuccugcagcgccaccuacaaggggcaguacgagcuccagacccuggagcugaacauggagucccucaacaugugcaugccgcugagcugcacgaagaacaacucccaccacuacauccgggccggcaacaacaccggccuggagcucacccugaccaacacgagcaucaucucccacaaguucugcaaccugagcgacgcccacaagaagaaccucuacgaccacacccugauguccaucaucaccaccuuccaccugagcauccccaacuucaaccaguacgaggccauguccugcgacuucaacgggggcaagaucagcauccaguacaaccucucccacagcuacgcgggggacgccgcccagcacugcggcacgguggccaacgggguccugcagaccuucaugcgcauggcguggggcggcuccuaccuggcccucgacagcgggcggcgcggcugggacugcaucaucuccagcuaccaguaccugaucauccagaacaccaccugggacgaccacugccaguucucccggcccagccccaucggguaccugggcuucgugagccagaagacgcgcgacaucuacaucucccggcgccuccugggcaccuucaccuggacccugagcgacuccgaggggcacgacaugccgggcggguacugccucacgcgguggaugcugaucgaggccgaccugaagugcuucggcaacaccgccguggccaagugcaacgagaagcacgacgaggaguucugcgacauguggcgccucuucgacuucugcaagcaggcgauccagcggcugaaggccgaggcccagaugaacauccagcugaucaacaaggccgucaacgcccucaucaacgaccagcugaugaugaagaaccaccuccgcgacaucauggggauccccuacugcaacuacagcaaguucugcuaccugaacaacaccaccacgggccggaccucccugccccgcugcugccugaucagcaacggcuccuaccucaacgagacccacuucagcgacgacaucgagcagcaggcggacaacaugaucaccgagaugcugcagaaggaguacauggaccggcaggggaagacgccccugggccucguggaccuguucguguucuccaccagcuucuaccugaucaccaucuuccuccaccuggucaagaucccgacccaccgccacaucguggggaagcccugccccaagccccaccggcugaaccacaugggcaucugcuccugcgggcuguacaagcagccgggcgugcccguccgcuggaagcggugaggacuagucccuguucccagagcccacuuuuuuuucuuuuuuugaaauaaaauagccugucuuucagaucucaaaggcucuuuucagagccaccaaaaaaaaaaaaaaaaaaaaaaaaaaaaaaaaaaaaaaaaaaaaaaaaaaaaaaaaaaaaaaaaaaaaaaaaaaaaaaaaaaaaaaaaaaaaaaaaaaaaa

SEQ ID NO: 40204 - RNA, 1745 nt, Artificial Sequence; identical to SEQ ID NO: 40198
  mRNA product Design a-1 (hSL-A100) comprising derived and/or modified sequence from LASV(Pinneo-NIG-1969;Clade I)__AIT17836__GPCmut12 (opt1)

SEQ ID NO: 40205 - RNA, 1745 nt, Artificial Sequence
  mRNA product Design a-1 (hSL-A100) comprising derived and/or modified sequence from LASV(ISTH0009-NIG-2011;Clade II)__AIT17404__GPCmut12 (opt1)
aggagagucccgcagucggcguccagcggcucugcuuguucgugugugugucguugcaggccuuauucaagcuuaccaugggccagaucaucaccuucuuccaggaggugccccacgucaucgaggaggugaugaacaucgugcugaucgcccucagccugcuggccauccucaaggggaucuacaacgucgcgaccugcggccuguucgggcugguguccuuccuccugcugugcggccgcagcugcuccacgaccuacaaggggguguacgagcuccagacccuggagcuggacauggccagccucaacaugugcaugccgcuguccugcacgaagaacaacagccaccacuacaucauggucggcaacgagaccggccuggagcucacccugaccaacacguccaucaucaaccacaaguucugcaaccugagcgacgcccacaagaagaaccucuacgaccacgcccugauguccaucaucagcaccuuccaccuguccauccccaacuucaaccaguacgaggccaugagcugcgacuucaacgggggcaagaucuccgugcaguacaaccucagccacgcguacgccguggacgccgccaaccacugcgggaccaucgcgaacggcguccugcagaccuucaugcggauggccuggggcggguccuacaucgcccuggacagcggcaagggguccugggacugcaucaugacgagcuaccaguaccucaucauccagaacaccaccugggaggaccacugccaguucucccgccccagccccaucggcuaccuggggcugcucagccagcggacccgcgacaucuacaucucccggcgccugcugggcacguucaccuggacccucagcgacuccgagggcaacgagacccccgggggcuacugccugacgcgguggaugcugaucgaggccgagcucaagugcuucgggaacaccgccguggcgaagugcaacgagaagcacgacgaggaguucugcgacaugcugcgccuguucgacuucugcaagcaggccauccggcgccucaagaccgaggcccagaugagcauccagcugaucaacaaggccgugaacgcccugaucaacgaccagcucaucaugaagaaccaccuccgggacaucaugggcaucccguacugcaacuacuccaaguacugcuaccugaaccacaccgucacggggaagaccagccugccccgcugcugccugguguccaacggcagcuaccugaacgagacccacuucuccgacgacaucgagcagcaggcggacaacaugaucaccgagcuccugcagaaggaguacauggaccggcagggcaagacgccccuggggcucguggaccuguucgucuucagcaccuccuucuaccugaucagcaucuuccugcaccucaucaagaucccgacccaccgccacaucaccggcaagcccugccccaagccccaccggcugaaccacauggggaucugcuccugcggccuguacaagcacccgggggugcccgugaaguggaagcgcugaggacuagucccuguucccagagcccacuuuuuuuucuuuuuuugaaauaaaauagccugucuuucagaucucaaaggcucuuuucagagccaccaaaaaaaaaaaaaaaaaaaaaaaaaaaaaaaaaaaaaaaaaaaaaaaaaaaaaaaaaaaaaaaaaaaaaaaaaaaaaaaaaaaaaaaaaaaaaaaaaaaaa

SEQ ID NO: 40206 - RNA, 1745 nt, Artificial Sequence
  mRNA product Design a-1 (hSL-A100) comprising derived and/or modified sequence from LASV(ISTH2010-NIG-2012;Clade II)__AIT17482__GPCmut12 (opt1)
aggagagucccgcagucggcguccagcggcucugcuuguucgugugugugucguugcaggccuuauucaagcuuaccaugggccagaucaucaccuucuuccaggaggugccccacgucaucgaggaggugaugaacaucgugcugaucgcccucagccugcuggccauccucaaggggaucuacaacgucgcgaccugcggccuguucgggcugguguccuuccuccugcugugcggccgcagcugcuccacgaccuacaaggggguguacgagcuccagacccuggagcuggacauggccagccucaacaugugcaugccgcuguccugcacgaagaacaacagccaccacuacaucauggucggcaacgagaccggccuggagcucacccugaccaacacguccaucaucaaccacaaguucugcaaccugagcgacgcccacaagaagaaccucuacgaccacgcccugauguccaucaucagcaccuuccaccuguccauccccaacuucaaccaguacgaggccaugagcugcgacuucaacgggggcaagaucuccgugcaguacaaccucagccacgcguacgccguggacgccgccaaccacugcgggaccaucgcgaacggcguccugcagaccuucaugcggauggccuggggcggguccuacaucgcccuggacagcggcaagggguccugggacugcaucaugacgagcuaccaguaccucaucauccagaacaucaccugggaggaccacugccaguucucccgccccagccccaucggcuaccuggggcugcucagccagcggacccgcgacaucuacaucucccggcgccugcugggcaccuucacguggacccucagcgacuccgagggcaacgagacccccgggggcuacugccugacccgguggaugcugaucgaggccgagcucaagugcuucgggaacacggccguggcgaagugcaacgagaagcacgacgaggaguucugcgacaugcugcgccuguucgacuucugcaagcaggccauccggcgccucaagaccgaggcccagaugagcauccagcugaucaacaaggccgugaacgcccugaucaacgaccagcucaucaugaagaaccaccuccgggacaucaugggcauccccuacugcaacuacuccaaguacugcuaccugaaccacaccgucaccgggaagacgagccugccccgcugcugccugguguccaacggcagcuaccugaacgagacccacuucuccgacgacaucgagcagcaggcggacaacaugaucaccgagcuccugcagaaggaguacaucgaccggcagggcaagaccccgcuggggcucguggaccuguucgucuucagcacguccuucuaccugaucagcaucuuccugcaccucgugaagaucccgacccaccgccacguggucggcaagcccugccccaagccccaccggcugaaccacauggggaucugcuccugcggccuguacaagcacccgggggugcccgugaaguggaagcgcugaggacuagucccuguucccagagcccacuuuuuuuucuuuuuuugaaauaaaauagccugucuuucagaucucaaaggcucuuuucagagccaccaaaaaaaaaaaaaaaaaaaaaaaaaaaaaaaaaaaaaaaaaaaaaaaaaaaaaaaaaaaaaaaaaaaaaaaaaaaaaaaaaaaaaaaaaaaaaaaaaaaaa

SEQ ID NO: 40207 - RNA, 1745 nt, Artificial Sequence
  mRNA product Design a-1 (hSL-A100) comprising derived and/or modified sequence from LASV(Lassa virus/H.sapiens-wt/NGA/2015/ISTH_0543;Clade II)__AVO03639__GPCmut12 (opt1)
aggagagucccgcagucggcguccagcggcucugcuuguucgugugugugucguugcaggccuuauucaagcuuaccaugggccagaucaucaccuucuuccaggaggugccccacgucaucgaggaggugaugaacaucgugcugaucgcccucagccugcuggccauccucaaggggaucuacaacgucgcgaccugcggccuguucgggcugguguccuuccuccugcugugcggccgcagcugcuccacgaccuacaaggggguguacgagcuccagacccuggagcuggacauggccaaccucaacaugugcaugccgcugagcugcacgaagaacaacucccaccacuacaucauggucggcaacgagaccggccuggagcucacccugaccaacacgagcaucaucaaccacaaguucugcaaccuguccgacgcccacaagaagaaccucuacgaccacgcccugaugagcaucaucuccaccuuccaccugagcauccccaacuucaaccaguacgaggccauguccugcgacuucaacgggggcaagaucagcgugcaguacaaccucucccacaccuacgcgguggacgccgccaaccacugcgggaccaucgccaacggcguccugcagacguucaugcggauggcguggggcgggagcuacaucgcccuggacuccggcaaggggagcugggacugcaucaugaccuccuaccaguaccucgugauccagaacaccaccugggaggaccacugccaguucagccgccccucccccaucggcuaccuggggcugcucagccagcggacgcgcgacaucuacaucagccggcgccugcugggcaccuucaccuggacccucuccgacagcgagggcaacgagacgcccgggggcuacugccugacccgguggaugcugaucgaggccgagcucaagugcuucgggaacaccgccguggccaagugcaacgagaagcacgacgaggaguucugcgacaugcugcgccuguucgacuucugcaagcaggcgauccggcgccucaagaccgaggcccagauguccauccagcugaucaacaaggccgucaacgcccugaucaacgaccagcucaucaugaagaaccaccuccgggacaucaugggcauccccuacugcaacuacagcaaguacugcuaccugaaccacacggugaccgggaagaccucccugccccgcugcugccuggugagcaacggcuccuaccugaacgagacccacuucagcgacgacaucgagcagcaggccgacaacaugaucacggagcuccugcagaaggaguacaucgaccggcagggcaagaccccgcuggggcucgucgaccuguucguguucuccaccagcuucuaccugaucuccaucuuccugcaccucgugaagaucccgacccaccgccacaucacgggcaagcccugccccaagccccaccggcugaaccacauggggaucugcagcugcggccuguacaagcacccggggguccccgugaaguggaagcgcugaggacuagucccuguucccagagcccacuuuuuuuucuuuuuuugaaauaaaauagccugucuuucagaucucaaaggcucuuuucagagccaccaaaaaaaaaaaaaaaaaaaaaaaaaaaaaaaaaaaaaaaaaaaaaaaaaaaaaaaaaaaaaaaaaaaaaaaaaaaaaaaaaaaaaaaaaaaaaaaaaaaaa

SEQ ID NO: 40208 - RNA, 1745 nt, Artificial Sequence
  mRNA product Design a-1 (hSL-A100) comprising derived and/or modified sequence from LASV(Lassa virus/H.sapiens-wt/NGA/2016/ISTH_0009;Clade II)__AVO03571__GPCmut12 (opt1)
aggagagucccgcagucggcguccagcggcucugcuuguucgugugugugucguugcaggccuuauucaagcuuaccaugggccagaucaucaccuucuuccaggaggugccccacgucaucgaggaggugaugaacaucgugcugaucgcccucagccugcuggccauccucaaggggaucuacaacgucgcgaccugcggccugcuggggcucguguccuuccugcugcucugcggccgcagcugcuccacgaccuacaaggggguguacgagcugcagacccuggagcucgacauggccagccugaacaugugcaugccgcuguccugcacgaagaacaacagccaccacuacaucauggucggcaacgagaccggccucgagcugacccugaccaacacguccaucaucaaccacaaguucugcaaccucagcgacgcccacaagaagaaccuguacgaccacgcccugauguccaucaucagcaccuuccaccucuccauccccaacuucaaccaguacgaggccaugagcugcgacuucaacgggggccggaucuccgugcaguacaaccugagccacuccuacgcgguggacgccgccaaccacugcgggaccaucgccaacggcguccugcagaccuucaugcgcauggcguggggcgggagcuacaucgcccucgacuccggcaaggggagcugggacugcaucaugacguccuaccaguaccugaucauccagaacaccaccugggaggaccacugccaguucagccggcccagccccaucggcuaccuggggcuccugucccagcgcacccgggacaucuacaucagccgccggcugcucggcacguucaccuggacccuguccgacagcgagggcaacgagacccccgggggcuacugccugacgcgcuggaugcucaucgaggccgagcugaagugcuucgggaacaccgccguggccaagugcaacgagaagcacgacgaggaguucugcgacaugcugcggcuguucgacuucugcaagcaggcgauccgccggcugaagaccgaggcccagauguccauccagcugaucaacaaggccgugaacgcccucaucaacgaccagcugaucaugaagaaccaccuccgcgacaucaugggcaucccguacugcaacuacagcaaguacugcuaccucaaccacaccgucacggggaagaccucccugccccggugcugccuggugagcaacggcuccuaccucaacgagacccacuucagcgacgacaucgagcagcaggccgacaacaugaucaccgagcugcugcagaaggaguacaucgaccgccagggcaagacgccccucgggcugguggaccuguucgucuucuccaccagcuucuaccugaucuccaucuuccuccaccuggugaagaucccgacccaccggcacaucaccggcaagcccugccccaagccccaccgccugaaccacauggggaucugcagcugcggccucuacaaccacccgggggugcccgucaaguggaagcggugaggacuagucccuguucccagagcccacuuuuuuuucuuuuuuugaaauaaaauagccugucuuucagaucucaaaggcucuuuucagagccaccaaaaaaaaaaaaaaaaaaaaaaaaaaaaaaaaaaaaaaaaaaaaaaaaaaaaaaaaaaaaaaaaaaaaaaaaaaaaaaaaaaaaaaaaaaaaaaaaaaaaa

SEQ ID NO: 40209 - RNA, 1745 nt, Artificial Sequence
  mRNA product Design a-1 (hSL-A100) comprising derived and/or modified sequence from LASV(Lassa virus/H.sapiens-wt/NGA/2016/ISTH_0017;Clade II)__AVO03567__GPCmut12 (opt1)
aggagagucccgcagucggcguccagcggcucugcuuguucgugugugugucguugcaggccuuauucaagcuuaccaugggccagaucaucaccuucuuccaggaggugccccacgucaucgaggaggugaugaacaucgugcugaucgcccucagccugcuggccauccucaaggggaucuacaacgucgcgaccugcggccuguucgggcugguguccuuccuccugcugugcggccgcagcugcuccacgaccuacaaggggguguacgagcuccagacccuggagcuggacauggccagccucaacaugugcaugccgcuguccugcacgaagaacaacagccaccacuacaucauggucggcaacgagaccggccuggagcucacccugaccaacacguccaucaucaaccacaaguucugcaaccugagcgacgcccacaagaagaaccucuacgaccacgcccugauguccaucaucagcaccuuccaccuguccauccccaacuucaaccaguacgaggccaugagcugcgacuucaacgggggcaagaucuccgugcaguacaaccucagccacaccuacgcgaucgacgccgccaaccacugcgggaccaucgccaacggcgugcugcagacguucaugcggauggcguggggcggguccuacaucgcccuggacagcggcaagggguccugggacugcaucaugaccagcuaccaguaccucaucauccagaacaccaccugggaggaccacugccaguucucccgccccagccccaucggcuaccuggggcugcucagccagcggacgcgcgacaucuacaucucccggcgccugcugggcaccuucaccuggacccucagcgacuccgagggcaacgagacgcccgggggcuacugccugacccgguggaugcugaucgaggccgagcucaagugcuucgggaacaccgccgucgccaagugcaacgagaagcacgacgaggaguucugcgacaugcugcgccuguucgacuucugcaagcaggcgauccggcgccucaagaccgaggcccagaugagcauccagcugaucaacaaggccgugaacgcccugaucaacgaccagcucaucaugaagaaccaccuccgggacaucaugggcauccccuacugcaacuacuccaaguacugcuaccugaaccacacggugaccgggaagaccagccugccccgcugcugccuggucuccaacggcagcuaccugaacgagacccacuucuccgacgacaucgagcagcaggccgacaacaugaucacggagcuccugcagaaggaguacauggaccggcagggcaagaccccgcuggggcucguggaccuguucguguucagcaccuccuucuaccugaucagcaucuuccugcaccucguccgcaucccgacccaccggcacgugaucggcaagcccugccccaagccccaccgccugaaccacauggggaucugcuccugcggccuguacaagcacccgggggugcccgucaaguggaagcggugaggacuagucccuguucccagagcccacuuuuuuuucuuuuuuugaaauaaaauagccugucuuucagaucucaaaggcucuuuucagagccaccaaaaaaaaaaaaaaaaaaaaaaaaaaaaaaaaaaaaaaaaaaaaaaaaaaaaaaaaaaaaaaaaaaaaaaaaaaaaaaaaaaaaaaaaaaaaaaaaaaaaa

SEQ ID NO: 40210 - RNA, 1745 nt, Artificial Sequence
  mRNA product Design a-1 (hSL-A100) comprising derived and/or modified sequence from LASV(Lassa virus/H.sapiens-wt/NGA/2018/ISTH_0959;Clade II)__AVV65099__GPCmut12 (opt1)
aggagagucccgcagucggcguccagcggcucugcuuguucgugugugugucguugcaggccuuauucaagcuuaccaugggccagaucaucaccuucuuccaggaggugccccacgucaucgaggaggugaugaacaucgugcugaucgcccucagccugcuggccauccucaaggggaucuacaacgucgugaccugcggccuguucgggcugguguccuuccuccugcugugcggccgcagcugcuccacgaccuacaagggggucuacgagcuccagacccuggagcuggacauggcgagccucaacaugugcaugccgcuguccugcacgaagaacaacagccaccacuacaucauggugggcaacgagaccggccuggagcucacccugaccaacacguccaucaucaaccacaaguucugcaaccugagcgacgcccacaagaagaaccucuacgaccacgcccugauguccaucaucagcaccuuccaccuguccauccccaacuucaaccaguacgaggccaugagcugcgacuucaacgggggcaagaucuccgugcaguacaaccucagccacgccuacgcgaucgacgccgccaaccacugcgggaccaucgccaacggcguccugcagaccuucaugcggauggcguggggcggguccuacaucgcccuggacagcggcaagggguccugggacugcaucaugacgagcuaccaguaccucaucauccagaacaccaccugggaggaccacugccaguucucccgccccagccccaucggcuaccuggggcugcucagccagcggacccgcgacaucuacaucucccggcgccugcugggcacguucaccuggacccucagcgacuccgagggcaacgagacccccgggggcuacugccugacgcgguggaugcugaucgaggccgagcucaagugcuucgggaacaccgccguggccaagugcaacgagaagcacgacgaggaguucugcgacaugcugcgccuguucgacuucugcaagcaggcgauccggcgccucaagaccgaggcccagaugagcauccagcugaucaacaaggccgugaacgcccugaucaacgaccagcucaucaugaagaaccaccuccgggacaucaugggcaucccguacugcaacuacuccaaguacugcuaccugaaccacaccgucacggggaagaccagccugccccgcugcugccugguguccaacggcagcuaccugaacgagacccacuucuccgacgacaucgagcagcaggccgacaacaugaucaccgagcuccugcagaaggaguacaucgaccggcagggcaagacgccccuggggcucguggaccuguucgucuucagcaccuccuucuaccugaucagcaucuuccugcaccucgugaagaucccgacccaccgccacgugaucggcaagcccugccccaagccccaccggcugaaccacauggggaucugcuccugcggccuguacaagcacccggggguccccgugaaguggaagcgcugaggacuagucccuguucccagagcccacuuuuuuuucuuuuuuugaaauaaaauagccugucuuucagaucucaaaggcucuuuucagagccaccaaaaaaaaaaaaaaaaaaaaaaaaaaaaaaaaaaaaaaaaaaaaaaaaaaaaaaaaaaaaaaaaaaaaaaaaaaaaaaaaaaaaaaaaaaaaaaaaaaaaa

SEQ ID NO: 40211 - RNA, 1745 nt, Artificial Sequence
  mRNA product Design a-1 (hSL-A100) comprising derived and/or modified sequence from LASV(LASV003-NIG-2008;Clade II)__AIT17580__GPCmut12 (opt1)
aggagagucccgcagucggcguccagcggcucugcuuguucgugugugugucguugcaggccuuauucaagcuuaccaugggccagaucaucaccuucuuccaggaggugccccacgucaucgaggaggugaugaacaucgugcugaucgcccucagccugcuggccauccucaaggggaucuacaacgucgcgaccugcggccuguucgggcugguguccuuccuccugcugugcggccgcagcugcuccacgaccuacaaggggguguacgagcuccagacccuggagcuggacauggccagccucaacaugugcaugccgcuguccugcacgaagaacaacagccaccacuacaucauggucggcaacgagaccggccuggagcucacccugaccaacacguccaucaucaaccacaaguucugcaaccugagcgacgcccacaagaagaaccucuacgaccacgcccugauguccaucaucagcaccuuccaccuguccauccccaacuucaaccaguacgaggccaugagcugcgacuucaacgggggcaagaucuccgugcaguacaaccucagccacaccuacgcgguggacgccgccaaccacugcgggaccaucgccaacggcguccugcagacguucaugcggauggcguggggcggguccuacaucgcccuggacagcggcaagggguccugggacugcaucaugaccagcuaccaguaccucaucauccagaacaccaccugggaggaccacugccaguucucccgccccagccccaucggcuaccuggggcugcucagccagcggacgcgcgacaucuacaucucccggcgccugcugggcaccuucaccuggacccucagcgacuccgagagcaacgagacgccgggcggguacugccugacccgguggaugcugaucgaggccgagcucaagugcuucggcaacaccgccguggccaagugcaacgagaagcacgacgaggaguucugcgacaugcugcgccuguucgacuucugcaagcaggcgauccggcgccucaaggccgaggcccagauguccauccagcugaucaacaaggccgugaacgcccugaucaacgaccagcucaucaugaagaaccaccuccgggacaucauggggauccccuacugcaacuacagcaaguacugcuaccugaaccacaccgucacgggccgcaccucccugccccggugcugccuggugagcaacggguccuaccugaacgagacccacuucagcgacgacaucgagcagcaggcggacaacaugaucaccgagcuccugcagaaggaguacauggaccgccagggcaagacgccccugggccucguggaccuguucgucuucuccaccagcuucuaccugaucuccaucuuccugcaccucgugaagaucccgacccaccggcacgugaucgggaagcccugccccaagccccaccgccugaaccacaugggcaucugcagcugcgggcuguacaagcacccgggcguccccgugaaguggaagcggugaggacuagucccuguucccagagcccacuuuuuuuucuuuuuuugaaauaaaauagccugucuuucagaucucaaaggcucuuuucagagccaccaaaaaaaaaaaaaaaaaaaaaaaaaaaaaaaaaaaaaaaaaaaaaaaaaaaaaaaaaaaaaaaaaaaaaaaaaaaaaaaaaaaaaaaaaaaaaaaaaaaaa

SEQ ID NO: 40212 - RNA, 1745 nt, Artificial Sequence
  mRNA product Design a-1 (hSL-A100) comprising derived and/or modified sequence from LASV(LASV035-NIG-2009;Clade II)__AIT17588__GPCmut12 (opt1)
aggagagucccgcagucggcguccagcggcucugcuuguucgugugugugucguugcaggccuuauucaagcuuaccaugggccagaucaucaccuucuuccaggaggugccccacgucaucgaggaggugaugaacaucgugcugaucgcccucagccugcuggccauccucaaggggaucuacaacgucgcgaccugcggccuguucgggcugguguccuuccuccugcugugcggccgcagcugcuccacgaccuacaaggggguguacgagcuccagacccuggagcuggacauggccagccucaacaugugcaugccgcuguccugcacgaagaacaacagccaccacuacaucauggucggcaacgagaccggccuggagcucacccugaccaacacguccaucaucaaccacaaguucugcaaccugagcgacgcccacaagaagaaccucuacgaccacgcccugauguccaucaucagcaccuuccaccuguccauccccaacuucaaccaguacgaggccaugagcugcgacuucaacgggggcaagaucuccgugcaguacaaccucagccacgcguacgccguggacgccgccaaccacugcgggaccaucgcgaacggcguccugcagaccuucaugcggauggccuggggcggguccuacaucgcccuggacagcggcaagggguccugggacugcaucaugacgagcuaccaguaccucaucauccagaacaccaccugggaggaccacugccaguucucccgccccagccccaucggcuaccuggggcugcucagccagcggacccgcgacaucuacaucucccggcgccugcugggcacguucaccuggacccucagcgacuccgagggcaacgagacccccgggggcuacugccugacgcgguggaugcugaucgaggccgagcucaagugcuucgggaacaccgccguggcgaagugcaacgagaagcacgacgaggaguucugcgacaugcugcgccuguucgacuucugcaagcaggccauccggcgccucaaggccgaggcccagaugagcauccagcugaucaacaaggccgugaacgcgcugaucaacgaccagcucaucaugaagaaccaccuccgggacaucaugggcauccccuacugcaacuacuccaaguacugcuaccugaaccacaccgucaccgggaagacgagccugccccgcugcugccugguguccaacggcagcuaccugaacgagacccacuucuccgacgacaucgagcagcaggccgacaacaugaucaccgagcuccugcagaaggaguacaucgaccggcagggcaagaccccgcuggggcucguggaccuguucgucuucagcacguccuucuaccugaucagcaucuuccugcaccucgugaagaucccgacccaccgccacgugaucggcaagcccugccccaagccccaccggcugaaccacauggggaucugcuccugcggccuguacaagcacccggggguccccgugaaguggaagcgcugaggacuagucccuguucccagagcccacuuuuuuuucuuuuuuugaaauaaaauagccugucuuucagaucucaaaggcucuuuucagagccaccaaaaaaaaaaaaaaaaaaaaaaaaaaaaaaaaaaaaaaaaaaaaaaaaaaaaaaaaaaaaaaaaaaaaaaaaaaaaaaaaaaaaaaaaaaaaaaaaaaaaa

SEQ ID NO: 40213 - RNA, 1745 nt, Artificial Sequence
  mRNA product Design a-1 (hSL-A100) comprising derived and/or modified sequence from LASV(LASV1000-NIG-2009;Clade II)__AIT17782__GPCmut12 (opt1)
aggagagucccgcagucggcguccagcggcucugcuuguucgugugugugucguugcaggccuuauucaagcuuaccaugggccagaucaucaccuucuuccaggaggugccccacgucaucgaggaggugaugaacaucgugcugaucgcccucagccugcuggccauccucaaggggaucuacaacgucgcgaccugcggccuguucgggcugguguccuuccuccugcugugcggccgcagcugcuccacgaccuacaaggggguguacgagcuccagacccuggagcuggacauggccagccucaacaugugcaugccgcuguccugcacgaagaacaacagccaccacuacaucauggucggcaacgagaccggccuggagcucacccugaccaacacguccaucaucaaccacaaguucugcaaccugagcgacgcccacaagaagaaccucuacgaccacgcccugauguccaucaucagcaccuuccaccuguccauccccaacuucaaccaguacgaggccaugagcugcgacuucaacgggggcaagaucuccgugcaguacaaccucagccacaccuacgcgguggacgccgccaaccacugcgggaccaucgccaacggcguccugcagacguucaugcggauggcguggggcggguccuacaucgcccuggacagcggcaagggguccugggacugcaucaugaccagcuaccaguaccucaucauccagaacaccaccugggaggaccacugccaguucucccgccccagccccaucggcuaccuggggcugcucagccagcggacgcgcgacaucuacaucucccggcgccugcugggcaccuucaccuggacccucagcgacuccgagggcaacgagacgcccgggggcuacugccugacccgguggaugcugaucgaggccgagcucaagugcuucgggaacaccgccguggccaagugcaacgagaagcacgacgaggaguucugcgacaugcugcgccuguucgacuucugcaagcaggcgaucaagcggcucaagaccgaggcccagaugagcauccagcugaucaacaaggccgugaacgcccugaucaacgaccagcucaucaugaagaaccaccuccgcgacaucaugggcauccccuacugcaacuacuccaaguacugcuaccugaaccacacggucaccgggaagaccagccugccccggugcugccugguguccaacggcagcuaccugaacgagacccacuucuccgacgacaucgagcagcaggccgacaacaugaucacggagcuccugcagaaggaguacaucgaccgccagggcaagaccccgcuggggcucguggaccuguucgucuucagcaccuccuucuaccugaucagcaucuuccugcaccucgugaagaucccgacccaccggcacguggucggcaagcccugccccaagccccaccgccugaaccacauggggaucugcuccugcggccuguacaagcacccgggggugcccgugaaguggaagcggugaggacuagucccuguucccagagcccacuuuuuuuucuuuuuuugaaauaaaauagccugucuuucagaucucaaaggcucuuuucagagccaccaaaaaaaaaaaaaaaaaaaaaaaaaaaaaaaaaaaaaaaaaaaaaaaaaaaaaaaaaaaaaaaaaaaaaaaaaaaaaaaaaaaaaaaaaaaaaaaaaaaaa

SEQ ID NO: 40214 - RNA, 1745 nt, Artificial Sequence
  mRNA product Design a-1 (hSL-A100) comprising derived and/or modified sequence from LASV(LASV221-NIG-2010;Clade II)__AIT17624__GPCmut12 (opt1)
aggagagucccgcagucggcguccagcggcucugcuuguucgugugugugucguugcaggccuuauucaagcuuaccaugggccagaucaucaccuucuuccaggaggugccccacgucaucgaggaggugaugaacaucgugcugaucgcccucagccugcuggccauccucaaggggaucuacaacgucgcgaccugcggccuguucgggcugguguccuuccuccugcugugcggccgcagcugcuccacgaccuacaaggggguguacgagcuccagacccuggagcuggacauggccagccucaacaugugcaugccgcuguccugcacgaagaacaacagccaccacuacaucauggucggcaacgagaccggccuggagcucacccugaccaacacguccaucaucaaccacaaguucugcaaccugagcgacgcccacaagaagaaccucuacgaccacgcccugauguccaucaucagcaccuuccaccuguccauccccaacuucaaccaguacgaggccaugagcugcgacuucaacgggggcaagaucuccgugcaguacaaccucagccacaccuacgcgaucgacgccgccaaccacugcgggaccaucgccaacggcgugcugcagacguucaugcggauggcguggggcggguccuacaucgcccuggacagcggcaagggguccugggacugcaucaugaccagcuaccaguaccucaucauccagaacaccaccugggaggaccacugccaguucucccgccccagccccaucggcuaccuggggcugcucagccagcggacgcgcgacaucuacaucucccggcgccugcugggcaccuucaccuggacccucagcgacuccgagggcaacgagacgcccgggggcuacugccugacccgguggaugcugaucgaggccgagcucaagugcuucgggaacaccgccgucgccaagugcaacgagaagcacgacgaggaguucugcgacaugcugcgccuguucgacuucugcaagcaggcgauccggcgccucaagaccgaggcccagaugagcauccagcugaucaacaaggccgugaacgcccugaucaacgaccagcucaucaugaagaaccaccuccgggacaucaugggcauccccuacugcaacuacuccaaguacugcuaccugaaccacacggugaccgggaagaccagccugccccgcugcugccuggucuccaacggcagcuaccugaacgagacccacuucuccgacgacaucgagcagcaggccgacaacaugaucacggagaugcuccagaaggaguacauggaccggcagggcaagaccccgcuggggcugguggaccucuucguguucagcaccuccuucuaccugaucagcaucuuccugcaccuggucaagaucccgacccaccgccacgugaucggcaagcccugccccaagccccaccggcucaaccacauggggaucugcuccugcggccuguacaagcacccgggggugcccgucaaguggaagcgcugaggacuagucccuguucccagagcccacuuuuuuuucuuuuuuugaaauaaaauagccugucuuucagaucucaaaggcucuuuucagagccaccaaaaaaaaaaaaaaaaaaaaaaaaaaaaaaaaaaaaaaaaaaaaaaaaaaaaaaaaaaaaaaaaaaaaaaaaaaaaaaaaaaaaaaaaaaaaaaaaaaaaa

SEQ ID NO: 40215 - RNA, 1745 nt, Artificial Sequence
  mRNA product Design a-1 (hSL-A100) comprising derived and/or modified sequence from LASV(LASV237-NIG-2010;Clade II)__AIT17638__GPCmut12 (opt1)
aggagagucccgcagucggcguccagcggcucugcuuguucgugugugugucguugcaggccuuauucaagcuuaccaugggccagaucaucaccuucuuccaggaggugccccacgucaucgaggaggugaugaacaucgugcugaucgcccucagccugcuggccauccucaaggggaucuacaacgucgcgaccugcggccuguucgggcugguguccuuccuccugcugugcggccgcagcugcuccacgaccuacaaggggguguacgagcuccagacccuggagcuggacauggccagccucaacaugugcaugccgcuguccugcacgaagaacaacagccaccacuacaucauggucggcaacgagaccggccuggagcucacccugaccaacacguccaucaucaaccacaaguucugcaaccugagcgacgcccacaagaaggaccucuacgaccacgcccugauguccaucaucagcaccuuccaccuguccauccccaacuucaaccaguacgaggccaugagcugcgacuucaacgggggcaagaucuccgugcaguacaaccucagccacaccuacgcgguggacgccgccaaccacugcgggaccaucgccaacggcguccugcagacguucaugcggauggcguggggcggguccuacaucgcccuggacagcggcaagggguccugggacugcaucaugaccagcuaccaguaccucaucauccagaacaccaccugggaggaccacugccaguucucccgccccagccccaucggcuaccuggggcugcucagccagcggacgcgcgacaucuacaucucccggcgccugcugggcaccuucaccuggacccucagcgacuccgagggcaacgagacgcccgggggcuacugccugacccgguggaugcugaucgaggccgagcucaagugcuucgggaacaccgccguggccaagugcaacgagaagcacgacgaggaguucugcgacaugcugcgccuguucgacuucugcaagcaggcgauccggcgccucaagaccgaggcccagaugagcauccagcugaucaacaaggccgugaacgcccugaucaacgaccagcucaucaugaagaaccaccuccgggacaucaugggcauccccuacugcaacuacuccaaguacugcuaccugaaccacacggucaccgggaagaccagccugccccgcugcugccugguguccaacggcagcuaccugaacgagacccacuucuccgacgacaucgagcagcaggccgacaacaugaucacggagcuccugcagaaggaguacauggaccggcagggcaagaccccgcuggggcucguggaccuguucgucuucagcaccuccuucuaccugaucagcaucuuccugcaccucaucaagaucccgacccaccgccacaucacgggcaagcccugccccaagccccaccggcugaaccacauggggaucugcuccugcggccuguacaagcacccgggggugcccgugaaguggaagcgcugaggacuagucccuguucccagagcccacuuuuuuuucuuuuuuugaaauaaaauagccugucuuucagaucucaaaggcucuuuucagagccaccaaaaaaaaaaaaaaaaaaaaaaaaaaaaaaaaaaaaaaaaaaaaaaaaaaaaaaaaaaaaaaaaaaaaaaaaaaaaaaaaaaaaaaaaaaaaaaaaaaaaa

SEQ ID NO: 40216 - RNA, 1745 nt, Artificial Sequence
  mRNA product Design a-1 (hSL-A100) comprising derived and/or modified sequence from LASV(LASV253-NIG-2011;Clade II)__AIT17670__GPCmut12 (opt1)
aggagagucccgcagucggcguccagcggcucugcuuguucgugugugugucguugcaggccuuauucaagcuuaccaugggccagaucaucaccuucuuccaggaggugccccacgucaucgaggaggugaugaacaucgugcugaucgcccucagccugcuggccauccucaaggggaucuacaacgucgcgaccugcggccuguucgggcugguguccuuccuccugcugugcggccgcagcugcuccacgaccuacaaggggguguacgagcuccagacccuggagcuggacauggccagccucaacaugugcaugccgcuguccugcacgaagaacaacagccaccacuacaucauggucggcaacgagaccggccuggagcucacccugaccaacacguccaucaucaaccacaaguucugcaaccugagcgacgcccacaagaagaaccucuacgaccacgcccugauguccaucaucagcaccuuccaccuguccauccccaacuucaaccaguacgaggccaugagcugcgacuucaacgggggcaagaucuccgugcaguacaaccucagccacaccuacgcgguggacgccgccaaccacugcgggaccaucgccaacggcguccugcagacguucaugcggauggcguggggcggguccuacaucgcccuggacagcggcaagggguccugggacugcaucaugaccagcuaccaguaccucaucauccagaacaccaccugggaggaccacugccaguucucccgccccagccccaucggcuaccuggggcugcucagccagcggacgcgcgacaucuacaucucccggcgccugcugggcaccuucaccuggacccucagcgacuccgagggcaacgagacgcccgggggcuacugccugacccgguggaugcugaucgaggccgagcucaagugcuucgggaacaccgccguggccaagugcaacgagaagcacgacgaggaguucugcgacaugcugcgccuguucgacuucugcaagcaggcgauccggcgccucaaggccgaggcccagaugagcauccagcugaucaacaaggccgugaacgcccugaucaacgaccagcucaucaugaagaaccaccuccgggacaucaugggcaucccguacugcaacuacuccaaguacugcuaccugaaccacaccgucacggggcgcaccagccugccccggugcugccugguguccaacggcagcuaccugaacgagacccacuucuccgacgacaucgagcagcaggcggacaacaugaucaccgagcuccugcagaaggaguacaucgaccgccagggcaagacgccccuggggcucguggaccuguucgucuucagcaccuccuucuaccugaucagcaucuuccugcaccucgugaagaucccgacccaccggcacaucaucggcaagcccugccccaagccccaccgccugaaccacauggggaucugcuccugcggccuguacaagcacccgggggugcccgucaaguggaagcggugaggacuagucccuguucccagagcccacuuuuuuuucuuuuuuugaaauaaaauagccugucuuucagaucucaaaggcucuuuucagagccaccaaaaaaaaaaaaaaaaaaaaaaaaaaaaaaaaaaaaaaaaaaaaaaaaaaaaaaaaaaaaaaaaaaaaaaaaaaaaaaaaaaaaaaaaaaaaaaaaaaaaa

SEQ ID NO: 40217 - RNA, 1745 nt, Artificial Sequence
  mRNA product Design a-1 (hSL-A100) comprising derived and/or modified sequence from LASV(LASV254-NIG-2011;Clade II)__AIT17674__GPCmut12 (opt1)
aggagagucccgcagucggcguccagcggcucugcuuguucgugugugugucguugcaggccuuauucaagcuuaccaugggccagaucaucaccuucuuccaggaggugccccacgucaucgaggaggugaugaacaucgugcugaucgcccucagccugcuggccauccucaaggggaucuacaacgucgcgaccugcggccuguucgggcugguguccuuccuccugcugugcggccgcagcugcuccacgaccuacaaggggguguacgagcuccagacccuggagcuggacaugaccaaccucaacaugugcaugccgcugagcugcaccaagaacaacucccaccacuacaucauggucggcaacgagaccggccuggagcucacccugacgaacaccagcaucaucaaccacaaguucugcaaccuguccgacgcccacaagaagaaccucuacaaccacgcccugaugagcaucaucuccaccuuccaccugagcauccccaacuucaaccaguacgaggccauguccugcgacuucaacgggggcaagaucagcgugcaguacaaccucucccacagcuacgccguggacgcggccaaccacugcgggaccaucgccaacggcguccugcagacguucaugcggauggccuggggcggguccuacaucgcgcuggacagcggcaaggggaacugggacugcaucaugaccuccuaccaguaccucaucauccagaacaccaccugggaggaccacugccaguucagccgccccucccccaucggcuaccuggggcugcucagccagcggacgcgcgacaucuacaucagccggcgccugcugggcaccuucaccuggacccucuccgacagcgagggcaacgagacgcccgggggcuacugccugacccgguggaugcugaucgaggccgagcucaagugcuucgggaacaccgccguggccaagugcaacgagaagcacgacgaggaguucugcgacaugcugcgccuguucgacuucugcaagcaggccauccggcgccucaagaccgaggcgcaggccaacauccagcugaucaacaaggccgugaacgcccugaucaacgaccagcucaucaugaagaaccaccuccgggacaucaugggcauccccuacugcaacuacuccaaguacugcuaccugaaccacacggucaccgggaagaccagccugccccgcugcugccugguguccaacggcagcuaccugaacgagacccacuucuccgacgacaucgagcagcaggccgacaacaugaucacggagcuccugcagaaggaguacauggaccggcagggcaagaccccgcuggggcucguggaccuguucgucuucagcaccuccuucuaccugaucagcaucuuccugcaccucgugaagaucccgacccaccgccacgugaucggcaagcccugccccaagccccaccggcugaaccacauggggaucugcuccugcggccuguacaagcacccggggguccccgugaaguggaagcgcugaggacuagucccuguucccagagcccacuuuuuuuucuuuuuuugaaauaaaauagccugucuuucagaucucaaaggcucuuuucagagccaccaaaaaaaaaaaaaaaaaaaaaaaaaaaaaaaaaaaaaaaaaaaaaaaaaaaaaaaaaaaaaaaaaaaaaaaaaaaaaaaaaaaaaaaaaaaaaaaaaaaaa

SEQ ID NO: 40218 - RNA, 1745 nt, Artificial Sequence
  mRNA product Design a-1 (hSL-A100) comprising derived and/or modified sequence from LASV(Nig08-A19;Clade III)__ADU56618__GPCmut12 (opt1)
aggagagucccgcagucggcguccagcggcucugcuuguucgugugugugucguugcaggccuuauucaagcuuaccaugggccagaucgugaccuucuuccaggaggucccccacgugaucgaggaggugaugaacaucguccugaucgcccucagcauccuggccauccugaaggggcucuacaacaucgcgaccugcggccugaucgggcuggugacguuccuccugcuguccggccgcagcugcuccaugaccuacaaggggguguacgagcuccagacccuggagcugaacaugaacacccucaacaugugcaugccgcugagcugcaccaagaacaacucccaccacuacaucauggucggcaacgagaccggccuggagcucacccugacgaacaccagccugcuccaccacaaguucugcaaccuguccgacgcccacaagaagaaccuguacgaccacacccucaugagcaucaucuccaccuuccaccugagcauccccaacuucaaccaguacgaggccauguccugcgacuucaacgggggcaagaucacggugcaguacaaccugagccacuccuacgccaucgacgccgcgaaccacugcgggaccguggccaacggcguccuccagaccuucaugcggauggccuggggcgggagcuacaucgcccuggacuccggccgcgggaagugggacugcaucaugaccagcuaccaguaccugaucauccagaacacgaccugggaggaccacugccaguucucccggcccagccccaucggcuaccucgggcugcugucccagcgcacccgggacaucuacaucagccgccggcuccugggcaccuucacguggacccugagcgacuccgagggcaacgagacccccgggggcuacugccucacccgcuggaugcugaucgaggcggagcugaagugcuucgggaacacggccguggccaagugcaacgagaagcacgacgaggaguucugcgacaugcuccggcuguucgacuucugcaagcaggccauccgccggcugaaggccgaggcgcagaugagcauccagcucaucaacaaggccgugaacgcccugaucaacgaccagcugaucaugaagaaccaccuccgcgacaucaugggcauccccuacugcaacuacuccaaguacugcuaccugaaccacaccagcaccgggcggaccucccugccccgcugcugccucgucagcaacggcuccuaccugaacgagacgcacuucagcgacgacaucgagcagcaggccgacaacaugaucaccgagaugcugcagaaggaguaccucgaccggcagggcaagaccccgcuggggcugguggaccuguucguguucuccaccagcuucuaccucaucuccaucuuccugcaccuggucaagaucccgacgcaccgccacaucgugggcaagcccugccccaagccccaccggcucaaccacauggggaucugcagcugcggccuguacaagcagccgggggugcccguccgcuggaagcggugaggacuagucccuguucccagagcccacuuuuuuuucuuuuuuugaaauaaaauagccugucuuucagaucucaaaggcucuuuucagagccaccaaaaaaaaaaaaaaaaaaaaaaaaaaaaaaaaaaaaaaaaaaaaaaaaaaaaaaaaaaaaaaaaaaaaaaaaaaaaaaaaaaaaaaaaaaaaaaaaaaaaa

SEQ ID NO: 40219 - RNA, 1748 nt, Artificial Sequence
  mRNA product Design a-1 (hSL-A100) comprising derived and/or modified sequence from LASV(G1180-SLE-2010;Clade IV)__AIT17168__GPCmut12 (opt1)
aggagagucccgcagucggcguccagcggcucugcuuguucgugugugugucguugcaggccuuauucaagcuuaccaugggccagaucgugaccuucuuccaggaggucccccacgugaucgaggaggugaugaacaucguccugaucgcccucagcauccuggccgugcugaaggggcucuacaacuucgcgaccugcggccugguggggcugcucaccuuccugcugcucugcggccgcuccugcaccgccagccgguacaagggggucuacgagcugcagacccuggagcucaacauggagacccugaacaugugcaugccgcuguccugcaccaagaacaacagccaccacuacaucauggugggcaacgagaccggccucgagcugacccugacgaacaccuccaucaucaaccacaaguucugcaaccucagcgacgcccacaagaagaaccuguacgaccacgcccugauguccaucaucagcaccuuccaccucuccauccccaacuucaaccaguacgaggccaugagcugcgacuucaacgggggcaagaucuccgugcaguacaaccugagccacuccuacgcgggggacgccgccaaccacugcggcaccgucgccaacggggugcugcagacguucaugcgcauggcguggggcggcagcuacaucgcccucgacuccgggcacggcagcugggacugcaucaugaccuccuaccaguaccugaucauccagaacaccaccugggaggaccacugccaguucagccggcccucccccaucggguaccugggccuccugagccagcgcacgcgggacaucuacaucagccgccggcugcucggcaccuucaccuggacccuguccgacagcgaggggaaggacacgccgggcggguacugccugacccgcuggaugcucaucgaggccgagcugaagugcuucggcaacaccgccguggccaagugcaacgagaagcacgacgaggaguucugcgacaugcugcggcuguucgacuucugcaagcaggcgauccagcgccugaaggccgaggcccagauguccauccagcugaucaacaaggccgucaacgcccucaucaacgaccagcugaucaugaagaaccaccuccgggacaucauggggauccccuacugcaacuacagcaaguacugcuaccucaaccacaccacgaccggcaagaccucccugcccaagugcugccuggugagcaacggcuccuaccucaacgagacccacuucagcgacgacaucgagcagcaggcggacaacaugaucacggagaugcugcagaaggaguacauggagcgccaggggaagacgccccugggccucguggaccuguucgucuucuccaccagcuucuaccugaucuccaucuuccugcaccucgugaagaucccgacccaccggcacaucgugggcaagagcugccccaagccccaccgccugaaccacauggggaucugcuccugcgggcuguacaagcagcccggcgucccggugaaguggaagcggugaggacuagucccuguucccagagcccacuuuuuuuucuuuuuuugaaauaaaauagccugucuuucagaucucaaaggcucuuuucagagccaccaaaaaaaaaaaaaaaaaaaaaaaaaaaaaaaaaaaaaaaaaaaaaaaaaaaaaaaaaaaaaaaaaaaaaaaaaaaaaaaaaaaaaaaaaaaaaaaaaaaaa

SEQ ID NO: 40220 - RNA, 1748 nt, Artificial Sequence
  mRNA product Design a-1 (hSL-A100) comprising derived and/or modified sequence from LASV(G1442-SLE-2011;Clade IV)__AIT17180__GPCmut12 (opt1)
aggagagucccgcagucggcguccagcggcucugcuuguucgugugugugucguugcaggccuuauucaagcuuaccaugggccagaucgugaccuucuuccaggaggucccccacgugaucgaggaggugaugaacaucguccugaucgcccucagcauccuggccgugcugaaggggcucuacaacguggcgaccugcggccugaucgggcuggucacguuccuccugcugugcggccgcuccugcaccaccacccucuacaaggggguguacgagcugcagacgcuggagcucaacauggagacccugaacaugugcaugccgcugagcugcaccaagaacaacucccaccacuacauccgggugggcaacgagacgggccucgagcugacccugaccaacaccagcaucaucaaccacaaguucugcaaccucuccgacgcccacaagaagaaccuguacgaccacgcccugaugagcaucaucuccacguuccaccucagcauccccaacuucaaccaguacgaggccauguccugcgacuucaacgggggcaagaucagcguccaguacaaccugucccacagcuacgccggggacgcggccaaccacugcggcaccguggccaacggggugcugcagaccuucaugcgcauggccuggggcggcuccuacaucgcgcucgacagcgggcggggcaacugggacugcaucaugaccuccuaccaguaccugaucauccagaacacgaccugggacgaccacugccaguucagccgccccucccccaucggguaccugggccuccugagccagcggacccgcgacgucuacaucucccggcgccugcucggcaccuucacguggacccugagcgacagcgaggggaaggacaccccgggcggguacugccugacccgguggaugcucaucgaggccgagcugaagugcuucggcaacacggccguggccaagugcaacgagaagcacgacgaggaguucugcgacaugcugcgccucuucgacuucugcaagcaggccauccagcggcugaaggcggaggcccagauguccauccagcugaucaacaaggccgugaacgcccucaucaacgaccagcugaucaugaagaaccaccuccgcgacaucauggggauccccuacugcaacuacagcaaguacugcuaccugaacaacaccgccaccggcaagaccucccugcccaagugcugccugaucagcaacggcuccuaccucaacgagacgcacuucagcgacgacaucgagcaggaggcggacaacaugaucaccgagaugcugcagaaggaguacauggagcggcaggggaagacgccccugggccucgucgaccuguucguguucuccaccagcuucuaccugaucuccaucuuccugcaccucgugaagaucccgacccaccgccacaucgucggcaagagcugccccaagccccaccggcugaaccacauggggaucugcuccugcgggcuguacaagcagcccggcgugccggugcgcuggaagcggugaggacuagucccuguucccagagcccacuuuuuuuucuuuuuuugaaauaaaauagccugucuuucagaucucaaaggcucuuuucagagccaccaaaaaaaaaaaaaaaaaaaaaaaaaaaaaaaaaaaaaaaaaaaaaaaaaaaaaaaaaaaaaaaaaaaaaaaaaaaaaaaaaaaaaaaaaaaaaaaaaaaaa

SEQ ID NO: 40221 - RNA, 1748 nt, Artificial Sequence
  mRNA product Design a-1 (hSL-A100) comprising derived and/or modified sequence from LASV(G3010-SLE-2013;Clade IV)__AIT17344__GPCmut12 (opt1)
aggagagucccgcagucggcguccagcggcucugcuuguucgugugugugucguugcaggccuuauucaagcuuaccaugggccagaucgugaccuucuuccaggaggucccccacgugaucgaggaggugaugaacaucguccugaucgcccucagcauccuggccgugcugaaggggcucuacaacuucgcgaccugcggccugguggggcuggucacguuccuccugcugugcggccgcuccugcaccaccagccucuacaaggggguguacgagcugcagacccuggagcucaacauggagacgcugaacaugugcaugccgcuguccugcaccaagaacaacagccaccacuacaucauggugggcaacgagaccggccucgagcugacgcugaccaacaccuccaucaucaaccacaaguucugcaaccucagcgacgcccacaagaagaaccuguacaaccacgcccugauguccaucaucagcaccuuccaccucuccauccccaacuucaaccaguacgaggccaugagcugcgacuucaacgggggcaagaucuccguccaguacaaccugagccacuccuacgccggggacgcggccagccacugcggcacgguggccaacggggugcugcagaccuucaugcggauggccuggggcggcuccuacaucgcgcucgacagcggguacggcaagugggacugcaucaugaccuccuaccaguaccugaucauccagaacaccacgugggaggaccacugccaguucagccgccccucccccaucggguaccugggccuccugagccagcggacccgcgacaucuacaucagccggcgccugcucggcaccuucaccuggacgcuguccgacagcgaggggaaggacaccccgggcggguacugccugacccgguggaugcucaucgaggccgagcugaagugcuucggcaacaccgccgucgccaagugcaacgagaagcacgacgaggaguucugcgacaugcugcgccucuucgacuucugcaagcaggccauccagcggcugaagacggaggcgcagauguccauccagcugaucaacaaggccgugaacgcccucaucaacgaccagcugaucaugaagaaccaccuccgcgacaucauggggauccccuacugcaacuacagcaaguacugcuaccugaaccacaccaccaccggcaagacgucccugcccaagugcugccuggugagcaacggcuccuaccucaacgagacccacuucagcgacgacaucgagcagcaggccgacaacaugaucaccgagaugcugcagaaggaguacauggagcggcaggggaagacgccccugggccucgucgaccuguucguguucuccaccagcuucuaccugaucuccaucuuccugcaccucgugaagaucccgacccaccgccacaucgucggcaagagcugccccaagccccaccggcugaaccacauggggaucugcuccugcgggcuguacaagcagcccggcgugccggugcgcuggaagcggugaggacuagucccuguucccagagcccacuuuuuuuucuuuuuuugaaauaaaauagccugucuuucagaucucaaaggcucuuuucagagccaccaaaaaaaaaaaaaaaaaaaaaaaaaaaaaaaaaaaaaaaaaaaaaaaaaaaaaaaaaaaaaaaaaaaaaaaaaaaaaaaaaaaaaaaaaaaaaaaaaaaaa

SEQ ID NO: 40222 - RNA, 1748 nt, Artificial Sequence
  mRNA product Design a-1 (hSL-A100) comprising derived and/or modified sequence from LASV(G502-SLE-2009;Clade IV)__AIT17126__GPCmut12 (opt1)
aggagagucccgcagucggcguccagcggcucugcuuguucgugugugugucguugcaggccuuauucaagcuuaccaugggccagaucgugaccuucuuccaggaggucccccacgugaucgaggaggugaugaacaucguccugaucgcccucagcauccuggccgugcugaaggggcucuacaacuucgcgaccugcggccugguggggcugcucacguuccugcugcucugcggccgcuccugcaccaccgggcuguacaagggcgucuacgagcugcagacccucgagcugaacauggagacgcugaacaugugcaugccgcucagcugcaccaagaacaacucccaccacuacaucauggugggcaacgagaccgggcuggagcugacgcucaccaacaccagcaucaucaaccacaaguucugcaaccuguccgacgcccacaagaagaaccuguacgaccacgcccucaugagcaucaucuccaccuuccaccugagcauccccaacuucaaccaguacgaggccauguccugcgacuucaacggcgggaagaucagcgugcaguacaaccugucccacagcuacgccggcgacgcggccgaccacugcgggacggucgccaacggcgugcuccagaccuucaugcggauggccuggggcggguccuacaucgcgcuggacagcggccgcgggcggugggacugcaucaugaccuccuaccaguaccugaucauccagaacaccacgugggaggaccacugccaguucagccgccccucccccaucggcuaccucggccugcugagccagcggacccgcgacaucuacaucucccggcgccuccuggggaccuucaccuggacgcugagcgacagcgagggcaaggacacccccgggggcuacugccucacccgguggaugcugaucgaggccgagcugaagugcuucgggaacaccgccguggccaagugcaacgagaagcacgacgaggaguucugcgacaugcuccgccuguucgacuucugcaagcaggccauccagcggcugaaggcggaggcccagauguccauccagcucaucaacaaggccgucaacgcccugaucaacgaccagcuggugaugaagaaccaccuccgcgacaucaugggcauccccuacugcaacuacagccgguacugcuaccugaaccacacgaccaccggccgcaccucccugcccaagugcugccucgugagcaacggguccuaccugaacgagacgcacuucagcgacgacaucgagcagcaggccgacaacaugaucaccgagaugcugcagaaggaguacauggagcggcagggcaagaccccgcucgggcuggucgaccuguucguguucuccaccagcuucuaccugaucuccaucuuccuccaccuggugaagaucccgacgcaccgccacaucgucggcaagagcugccccaagccccaccggcugaaccacauggggaucugcuccugcggccucuacaagcagcccggcgugccggugaaguggaagcgcugaggacuagucccuguucccagagcccacuuuuuuuucuuuuuuugaaauaaaauagccugucuuucagaucucaaaggcucuuuucagagccaccaaaaaaaaaaaaaaaaaaaaaaaaaaaaaaaaaaaaaaaaaaaaaaaaaaaaaaaaaaaaaaaaaaaaaaaaaaaaaaaaaaaaaaaaaaaaaaaaaaaaa

SEQ ID NO: 40223 - RNA, 1748 nt, Artificial Sequence
  mRNA product Design a-1 (hSL-A100) comprising derived and/or modified sequence from LASV(G733-SLE-2010;Clade IV)__AIT17154__GPCmut12 (opt1)
aggagagucccgcagucggcguccagcggcucugcuuguucgugugugugucguugcaggccuuauucaagcuuaccaugggccagaucgugaccuucuuccaggaggucccccacgugaucgaggaggugaugaacaucguccugaucgcccucagcauccuggccgugcugaaggggcucuacaacuucgcgaccugcggcaucguggggcuggucuccuuccugcuccugugcggccgcagcugcacgaccucccuguacaaggggguguacgagcuccagacccuggagcugaacauggagacccucaacaugugcaugccgcugagcugcaccaagaacaacucccaccacuacaucauggugggcaacgagaccggccuggagcucacccugacgaacaccagcaucaucaaccacaaguucugcaaccuguccgacgcccacaagaagaaccucuacgaccacgcccugaugagcaucaucuccaccuuccaccugagcauccccaacuucaaccaguacgaggccauguccugcgacuucaacgggggcaagaucagcguccaguacaaccucucccacagcuacgccggggacgcggccaaccacugcggcaccaucgccaacggggugcugcagacguucaugcggauggccuggggcggcuccuacaucgcgcuggacagcgggcgcgaccggugggacugcaucaugaccuccuaccaguaccucaucauccagaacaccaccugggaggaccacugccaguucagccgccccucccccaucggcuaccuggggcugcucagccagcggacgcgcgacaucuacaucagccggcgccugcugggcaccuucaccuggacccucuccgacagcgagggcaaggacacgcccgggggcuacugccugacccgguggaugcugaucgaggccgagcucaagugcuucgggaacaccgccguggccaagugcaacgagaagcacgacgaggaguucugcgacaugcugcgccuguucgacuucugcaagcaggccauccagcggcucaaggcggaggcccagauguccauccagcugaucaacaaggccgucaacgcccugaucaacgaccagcucaucaugaagaaccaccuccgcgacaucaugggcauccccuacugcaacuacagcaaguacugcuaccugaaccacaccacgaccgggaagaccucccugcccaagugcugccuggugagcaacggcuccuaccugaacgagacccacuucagcgacgacaucgagcagcaggccgacaacaugaucacggagaugcuccagaaggaguacauggagcggcagggcaagaccccgcuggggcugguggaccucuucgucuucuccaccagcuucuaccugaucuccaucuuccugcaccuggugaagaucccgacccaccgccacguggucggcaagagcugccccaagccccaccggcucaaccacauggggaucugcuccugcggccuguacgggcagcccggcgugccggugaaguggaagcgcugaggacuagucccuguucccagagcccacuuuuuuuucuuuuuuugaaauaaaauagccugucuuucagaucucaaaggcucuuuucagagccaccaaaaaaaaaaaaaaaaaaaaaaaaaaaaaaaaaaaaaaaaaaaaaaaaaaaaaaaaaaaaaaaaaaaaaaaaaaaaaaaaaaaaaaaaaaaaaaaaaaaaa

SEQ ID NO: 40224 - RNA, 1748 nt, Artificial Sequence
  mRNA product Design a-1 (hSL-A100) comprising derived and/or modified sequence from MOPV/LASV reassortant(IGS-1;Clade IV)__AFY05576__GPCmut12 (opt1)
aggagagucccgcagucggcguccagcggcucugcuuguucgugugugugucguugcaggccuuauucaagcuuaccaugggccagaucgugaccuucuuccaggaggucccccacgugaucgaggaggugaugaacaucguccugaucgcccucagcgugcuggccgugcugaaggggcucuacaacuucgcgaccugcggccuggucgggcuggugacguuccuccugcugugcggccgcuccugcaccaccagccucuacaaggggguguacgagcugcagacccuggagcucaacauggagacgcugaacaugugcaugccgcuguccugcaccaagaacaacagccaccacuacaucauggucggcaacgagaccggccucgagcugacgcugaccaacaccuccaucaucaaccacaaguucugcaaccucagcgacgcccacaagaagaaccuguacgaccacgcccugauguccaucaucagcaccuuccaccucuccauccccaacuucaaccaguacgaggccaugagcugcgacuucaacgggggcaagaucuccgugcaguacaaccugagccacuccuacgccggggacgcggccaaccacugcggcacgguggccaacgggguccugcagaccuucaugcggauggccuggggcggcagcuacaucgcgcucgacuccgggcgcggcaacugggacugcaucaugaccagcuaccaguaccugaucauccagaacaccacgugggaggaccacugccaguucucccggcccagccccaucggguaccugggccuccugucccagcgcacccgggacaucuacaucagccgccggcugcucggcaccuucaccuggacgcugagcgacuccgagggggaggacaccccgggcggguacugccugacccgcuggaugcucaucgaggccgagcugaagugcuucggcaacaccgccguggccaagugcaacgagaagcacgacgaggaguucugcgacaugcugcggcuguucgacuucugcaagcaggccauccagcgccugaaggcggaggcccagaugagcauccagcugaucaacaaggccgugaacgcccucaucaacgaccagcugaucaugaagaaccaccuccgggacaucauggggauccccuacugcaacuacuccaaguacugcuaccucaaccacacgaccaccggccgcaccagccugcccaagugcugccuggucuccaacggcagcuaccucaacgagacgcacuucuccgacgacaucgagcagcaggccgacaacaugaucaccgagaugcugcagaaggaguacauggagcggcaggggaagacgccccugggccucguggaccuguucguguucagcaccuccuucuaccugaucagcaucuuccugcaccucgucaagaucccgacccaccgccacaucguggggaaguccugccccaagccccaccggcugaaccacaugggcaucugcagcugcgggcuguacaagcagcccggcgugccggucaaguggaagcgcugaggacuagucccuguucccagagcccacuuuuuuuucuuuuuuugaaauaaaauagccugucuuucagaucucaaaggcucuuuucagagccaccaaaaaaaaaaaaaaaaaaaaaaaaaaaaaaaaaaaaaaaaaaaaaaaaaaaaaaaaaaaaaaaaaaaaaaaaaaaaaaaaaaaaaaaaaaaaaaaaaaaaa

SEQ ID NO: 40225 - RNA, 1748 nt, Artificial Sequence
  mRNA product Design a-1 (hSL-A100) comprising derived and/or modified sequence from LASV(LM765-SLE-2012;Clade IV)__AIT17814__GPCmut12 (opt1)
aggagagucccgcagucggcguccagcggcucugcuuguucgugugugugucguugcaggccuuauucaagcuuaccaugggccagaucgugaccuucuuccaggaggucccccacgugaucgaggaggugaugaacaucguccugaucgcccucagcauccuggccgugcugaaggggcucuacaacuucgcgaccugcggccugguggggcuggucacguuccuccugcugugcggccgcuccugcaccaccagccucuacaaggggguguacgagcugcagacccuggagcucaacauggagacgcugaacaugugcaugccgcuguccugcaccaagaacaacagccaccacuacaucauggugggcaacgagaccggccucgagcugacgcugaccaacaccuccaucaucgaccacaaguucugcaaccucagcgacgcccaccggaagaaccuguacgaccacgcccugauguccaucaucagcaccuuccaccucuccauccccaacuucaaccaguacgaggccaugagcugcgacuucaacgggggcaagaucuccguccaguacaaccugagccacuccuacgccaaggacgcggccgaccacugcgggacgguggccaacggcgugcugcagaccuucaugcgcauggccuggggcgggagcuacaucgcgcucgacuccggccgggggcgcugggacugcaucaugaccagcuaccaguaccugaucauccagaacaccacgugggaggaccacugccaguucucccggcccagccccaucggcuaccuggggcuccugucccagcgcacccgggacaucuacaucagccgccggcugcucggcaccuucaccuggacgcugagcgacuccgagggcaaggacacccccgggggcuacugccugacccgcuggaugcucaucgaggccgagcugaagugcuucgggaacaccgccgucgccaagugcaacgagaagcacgacgaggaguucugcgacaugcugcggcuguucgacuucugcaagcaggccauccagcgccugaaggcggaggcccagaugagcauccagcugaucaacaaggccgugaacgcccucaucaacgaccagcugaucaugaagaaccaccuccgggacaucaugggcauccccuacugcaacuacuccaaguacugcuaccucaaccacacgaccaccgggaagaccagccugcccaagugcugccugguguccaacggcagcuaccucaacgagacgcacuucuccgacgacaucgagcagcaggccgacaacaugaucaccgagaugcugcagaaggaguacauggagcgccagggcaagaccccgcuggggcucgucgaccuguucguguucagcaccuccuucuaccugaucagcaucuuccugcaccucgugaagaucccgacgcaccggcacaucgucggcaagcccugccccaagccccaccgccugaaccacauggggaucugcuccugcggccuguacaagcagccgggggugcccgugaaguggaagcggugaggacuagucccuguucccagagcccacuuuuuuuucuuuuuuugaaauaaaauagccugucuuucagaucucaaaggcucuuuucagagccaccaaaaaaaaaaaaaaaaaaaaaaaaaaaaaaaaaaaaaaaaaaaaaaaaaaaaaaaaaaaaaaaaaaaaaaaaaaaaaaaaaaaaaaaaaaaaaaaaaaaaa

SEQ ID NO: 40226 - RNA, 1748 nt, Artificial Sequence
  mRNA product Design a-1 (hSL-A100) comprising derived and/or modified sequence from LASV(LM776-SLE-2012;Clade IV)__AIT17824__GPCmut12 (opt1)
aggagagucccgcagucggcguccagcggcucugcuuguucgugugugugucguugcaggccuuauucaagcuuaccaugggccagaucgugaccuucuuccaggaggucccccacgugaucgaggaggugaugaacaucguccugaucgcccucagcauccuggccgugcugaaggggcucuacaacuucgcgaccugcggccugguggggcuggucacguuccuccugcugugcggccgcuccugcaccaccagcguguacaaggggguguacgagcuccagacccuggagcugaacauggagacgcucaacaugugcaugccgcuguccugcaccaagaacaacagccaccacuacaucauggucggcaacgagaccggccuggagcucacgcugaccaacaccuccaucaucaaccacaaguucugcaaccugagcgacgcccacaagaagaaccucuacgaccacgcccugauguccaucaucagcaccuuccaccuguccauccccaacuucaaccaguacgaggccaugagcugcgacuucaacgggggcaagaucuccgugcaguacaaccucagccacuccuacgccggggacgcggccaaccacugcggcacgguggccaacgggguccugcagaccuucaugcggauggccuggggcggcagcuacaucgcgcuggacuccgggcacggcaagugggacugcaucaugaccagcuaccaguaccucaucauccagaacaccacgugggaggaccacugccaguucucccgccccagccccaucggguaccugggccugcucucccagcggacccgcgacaucuacaucagccggcgccugcugggcaccuucaccuggacgcucagcgacuccgaggggaaggacaccccgggcggguacugccugacccgguggaugcugaucgaggccgagcucaagugcuucggcaacaccgccguggccaagugcaacgagaagcacgacgaggaguucugcgacaugcugcgccuguucgacuucugcaagcaggccauccagcggcucaaggcggaggcccagaugagcauccagcugaucaacaaggccgugaacgcccugaucaacgaccagcucaucaugaagaaccaccuccgcgacaucauggggauccccuacugcaacuacuccaaguacugcuaccugaaccacacgaccaccggcaagaccagccugcccaagugcugccuggucuccaacggcagcuaccugaacgagacgcacuucuccgacgacaucgagcagcaggccgacaacaugaucaccgagaugcuccagaaggaguacauggagcggcaggggaagacgccccugggccugguggaccucuucguguucagcaccuccuucuaccugaucagcaucuuccugcaccuggucaagaucccgacccaccgccacaucguggggaaguccugccccaagccccaccggcucaaccacaugggcaucugcagcugcgggcuguacaagcagcccggcgugccgguccgcuggaagcggugaggacuagucccuguucccagagcccacuuuuuuuucuuuuuuugaaauaaaauagccugucuuucagaucucaaaggcucuuuucagagccaccaaaaaaaaaaaaaaaaaaaaaaaaaaaaaaaaaaaaaaaaaaaaaaaaaaaaaaaaaaaaaaaaaaaaaaaaaaaaaaaaaaaaaaaaaaaaaaaaaaaaa

SEQ ID NO: 40227 - RNA, 1748 nt, Artificial Sequence
  mRNA product Design a-1 (hSL-A100) comprising derived and/or modified sequence from LASV(Mad39;Clade IV)__ANH09722__GPCmut12 (opt1)
aggagagucccgcagucggcguccagcggcucugcuuguucgugugugugucguugcaggccuuauucaagcuuaccaugggccagaucgugaccuucuuccaggaggucccccacgugaucgaggaggugaugaacaucguccugaucgcccucagcauccuggccgugcugaaggggcucuacaacguggcgaccugcggccugaucgggcuggucacguuccuccugcugugcggccgcuccugcaccaccacccucuacaaggggguguacgagcugcaggcccuggagcucaacauggagacgcugaacaugugcaugccgcugagcugcaccaagaacaacucccaccacuacauccgggugggcaacgagaccggccucgagcugacgcugaccaacaccagccucaucaaccacaaguucugcaaccuguccgacgcccacaagaagaaccuguacgaccacgcccucaugagcaucaucuccaccuuccaccugagcauccccaacuucaaccaguacgaggccauguccugcgacuucaacgacgggaagaucagcguccaguacaaccugucccacacguacgcgggcgacaccgccaaccacugcgggaccguggccaacggcgugcuccagaccuucaugcgcauggccuggggcgggagcuacaucgcgcuggacuccggccgcgggggcugggacugcaucaugacgagcuaccaguaccugaucauccagaacaccaccugggaggaccacugccaguucucccggcccagccccaucggguaccucggccugcugucccagcggacccgcgacaucuacaucagccggcgccuccugggcacguucaccuggacccuguccgacagcgaggggaaggacaccccgggcggguacugccucacgcgguggaugcugaucgaggccgagcugaagugcuucggcaacaccgccgucgccaagugcaacgagaagcacgacgaggaguucugcgacaugcuccgccuguucgacuucugcaagcaggccauccagcggcugaaggcggaggcccagaugagcauccagcucaucaacaaggccgugaacgcccugaucaacgaccagcugaucaugaagaaccaccuccgcgacaucauggggauccccuacugcaacuacuccaaguacugcuaccugaaccacaccgugaccggcaagacgagccugcccaagugcugccucgucuccaacggcagcuaccugaacgagacccacuucuccgacgacaucgagcagcaggccgacaacaugaucaccgagaugcugcagaaggaguacauggagcggcaggggaagacgccccucggccugguggaccuguucguguucagcaccuccuucuaccugaucagcaucuuccuccaccuggucaagaucccgacccaccgccacgugguggggaagcccugccccaagccccaccggcugaaccacaugggcaucugcuccugcggguucuacaagcagccgggcguccccgugcgcuggaagcggugaggacuagucccuguucccagagcccacuuuuuuuucuuuuuuugaaauaaaauagccugucuuucagaucucaaaggcucuuuucagagccaccaaaaaaaaaaaaaaaaaaaaaaaaaaaaaaaaaaaaaaaaaaaaaaaaaaaaaaaaaaaaaaaaaaaaaaaaaaaaaaaaaaaaaaaaaaaaaaaaaaaaa

SEQ ID NO: 40228 - RNA, 1748 nt, Artificial Sequence
  mRNA product Design a-1 (hSL-A100) comprising derived and/or modified sequence from LASV(Z0947-SLE-2011;Clade IV)__AIT17840__GPCmut12 (opt1)
aggagagucccgcagucggcguccagcggcucugcuuguucgugugugugucguugcaggccuuauucaagcuuaccaugggccagaucgugaccuucuuccaggaggucccccacgugaucgaggaggugaugaacaucguccugaucgcccucagcauccuggccgugcugaaggggcucuacaacuucgcgaccugcggccugguggggcuggucacguuccuccugcugugcggccgcuccugcaccaucagccucuacaaggggguguacgagcugcagacccuggagcucaacauggagacccugaacaugugcaugccgcuguccugcaccaagaacaacagccaccacuacaucauggugggcaacgagaccggccucgagcugacccugacgaacaccuccaucaucaaccacaaguucugcaaccucagcgacgcccacaagaagaaccuguacgaccacgcccugauguccaucaucagcaccuuccaccucuccauccccaacuucaaccaguacgaggccaugagcugcgacuucaacgggggcaagaucuccguccaguacaaccugagccacuccuacgccggggacgcggccaaccacugcggcaccguggccaacggggugcugcagacguucaugcggauggccuggggcggcagcuacaucgcgcucgacuccgggcgcgaccggugggacugcaucaugaccagcuaccaguaccugaucauccagaacaccaccugggaggaccacugccaguucucccgccccagccccaucggcuaccuggggcuccugucccagcggacgcgcgacaucuacaucagccggcgccugcucggcaccuucaccuggacccugagcgacuccgagggcaaggacacgcccgggggcuacugccugacccgguggaugcucaucgaggccgagcugaagugcuucgggaacaccgccgucgccaagugcaacgagaagcacgacgaggaguucugcgacaugcugcgccucuucgacuucugcaagcaggccauccagcggcugaaggcggaggcccagaugagcauccagcugaucaacaaggccgugaacgcccucaucaacgaccagcugaucaugaagaaccaccuccgcgacaucaugggcauccccuacugcaacuacuccaaguacugcuaccugaaccacaccacgaccgggaagaccagccugcccaagugcugccugguguccaacggcagcuaccucaacgagacccacuucuccgacgacaucgagcagcaggccgacaacaugaucacggagaugcugcagaaggaguacauggagcggcagggcaagaccccgcuggggcucgucgaccuguucguguucagcaccuccuucuaccugaucagcaucuuccugcaccucgugaagaucccgacccaccgccacaucgucggcaagcccugccccaagccccaccggcugaaccacauggggaucugcuccugcggccuguacaagcagccgggggugcccgugaaguggaagcgcugaggacuagucccuguucccagagcccacuuuuuuuucuuuuuuugaaauaaaauagccugucuuucagaucucaaaggcucuuuucagagccaccaaaaaaaaaaaaaaaaaaaaaaaaaaaaaaaaaaaaaaaaaaaaaaaaaaaaaaaaaaaaaaaaaaaaaaaaaaaaaaaaaaaaaaaaaaaaaaaaaaaaa

SEQ ID NO: 40229 - RNA, 1748 nt, Artificial Sequence
  mRNA product Design a-1 (hSL-A100) comprising derived and/or modified sequence from LASV(Josiah;Clade IV)__NP_694870__GPCmut12 (opt1)
aggagagucccgcagucggcguccagcggcucugcuuguucgugugugugucguugcaggccuuauucaagcuuaccaugggccagaucgugaccuucuuccaggaggucccccacgugaucgaggaggugaugaacaucguccugaucgcccucagcgugcuggccgugcugaaggggcucuacaacuucgcgaccugcggccuggucgggcuggugaccuuccuccugcugugcggccgcuccugcaccaccagccucuacaaggggguguacgagcugcagacccuggagcucaacauggagacgcugaacaugugcaugccgcuguccugcaccaagaacaacagccaccacuacaucauggucggcaacgagaccggccucgagcugacccugacgaacaccuccaucaucaaccacaaguucugcaaccucagcgacgcccacaagaagaaccuguacgaccacgcccugauguccaucaucagcaccuuccaccucuccauccccaacuucaaccaguacgaggccaugagcugcgacuucaacgggggcaagaucuccgugcaguacaaccugagccacuccuacgccggggacgcggccaaccacugcggcaccguggccaacgggguccugcagacguucaugcggauggccuggggcggcagcuacaucgcgcucgacuccgggcgcggcaacugggacugcaucaugaccagcuaccaguaccugaucauccagaacaccaccugggaggaccacugccaguucucccggcccagccccaucggguaccugggccuccugucccagcgcacgcgggacaucuacaucagccgccggcugcucggcaccuucaccuggacccugagcgacuccgaggggaaggacacgccgggcggguacugccugacccgcuggaugcucaucgaggccgagcugaagugcuucggcaacaccgccguggccaagugcaacgagaagcacgacgaggaguucugcgacaugcugcggcuguucgacuucugcaagcaggccauccagcgccugaaggcggaggcccagaugagcauccagcugaucaacaaggccgugaacgcccucaucaacgaccagcugaucaugaagaaccaccuccgggacaucauggggauccccuacugcaacuacuccaaguacugcuaccucaaccacaccacgaccggccgcaccagccugcccaagugcugccuggucuccaacggcagcuaccucaacgagacccacuucuccgacgacaucgagcagcaggccgacaacaugaucacggagaugcugcagaaggaguacauggagcggcaggggaagacgccccugggccugguggaccucuucguguucagcaccuccuucuaccugaucagcaucuuccugcaccucgucaagaucccgacccaccgccacaucguggggaaguccugccccaagccccaccggcugaaccacaugggcaucugcagcugcgggcuguacaagcagcccggcgugccggucaaguggaagcgcugaggacuagucccuguucccagagcccacuuuuuuuucuuuuuuugaaauaaaauagccugucuuucagaucucaaaggcucuuuucagagccaccaaaaaaaaaaaaaaaaaaaaaaaaaaaaaaaaaaaaaaaaaaaaaaaaaaaaaaaaaaaaaaaaaaaaaaaaaaaaaaaaaaaaaaaaaaaaaaaaaaaaa

SEQ ID NO: 40230 - RNA, 1745 nt, Artificial Sequence
  mRNA product Design a-1 (hSL-A100) comprising derived and/or modified sequence from LASV(LP;Clade I)__AAF86701__GPCmut12 (opt1)
aggagagucccgcagucggcguccagcggcucugcuuguucgugugugugucguugcaggccuuauucaagcuuaccaugggccagaucaucaccuucuuccaggaggugccccacgucaucgaggaggugaugaacaucgugcugaucgcccucagccugcuggccauccucaaggggcuguacaacaucgcgaccugcggcaucaucgggcuggucgccuuccucuuccugugcggcaaguccugcagccugacgcucaagggcggguacgagcugcagacccuggagcucaacauggagacccugaacaugugcaugccgcuguccugcaccaagaacagcucccaccacuacauccgcgugggcaacgagacggggcucgagcugacccugaccaacaccagcaucaucaaccacaaguucugcaaccucuccgacgcccacaagaagaaccuguacgaccacgcccugaugagcaucaucuccacguuccaccucagcauccccaacuucaaccaguacgaggccauguccugcgacuucaacggcgggaagaucagcgugcaguacaaccugucccacagcuacgcgggcgacgccgccgagcacugcgggaccgucgccaacggcgugcugcagaccuucaugcggauggcguggggcgggcgcuacaucgcccucgacuccggcaaggggaacugggacugcaucaugaccagcuaccaguaccugaucauccagaacacgaccugggaggaccacugccaguucucccggcccagccccaucggcuaccugggccuccugucccagcgcacccgggacaucuacaucagccgccggcugcucgggaccuucacguggacccugagcgacuccgagggcaacgagacccccgggggcuacugccugacccgcuggaugcucaucgaggccgagcugaagugcuucgggaacacggccguggccaagugcaacgagaagcacgacgaggaguucugcgacaugcugcggcuguucgacuucugcaagcaggcgauccgccggcugaaggccgaggcccagaugagcauccagcugaucaacaaggccgucaacgcccucaucaacgaccagcugaucaugaagaaccaccuccgcgacaucaugggcauccccuacugcaacuacuccaaguacugcuaccucaaccacaccagcuccggccggaccagccugcccaagugcugccugaucuccaacgggagcuaccucaacgagacccaguucuccgacgacaucgagcagcaggcggacaacaugaucacggagaugcugcagaaggaguacaucgagcgccagggcaagaccccgcuggggcugguggacaucuucaucuucagcaccuccuucuaccucaucagcaucuuccugcaccugaucaagaucccgacccaccggcacaucgugggcaagcccugccccaagccccaccgccucaaccacaugggggucugcuccugcggccuguacaagcacccgggcgugcccacgaaguggaagcggugaggacuagucccuguucccagagcccacuuuuuuuucuuuuuuugaaauaaaauagccugucuuucagaucucaaaggcucuuuucagagccaccaaaaaaaaaaaaaaaaaaaaaaaaaaaaaaaaaaaaaaaaaaaaaaaaaaaaaaaaaaaaaaaaaaaaaaaaaaaaaaaaaaaaaaaaaaaaaaaaaaaaa

SEQ ID NO: 40231 - RNA, 1745 nt, Artificial Sequence
  mRNA product Design a-1 (hSL-A100) comprising derived and/or modified sequence from LASV(803213;Clade II)__AAF86703__GPCmut12 (opt1)
aggagagucccgcagucggcguccagcggcucugcuuguucgugugugugucguugcaggccuuauucaagcuuaccaugggccagaucaucaccuucuuccaggaggugccccacgucaucgaggaggugaugaacaucgugcugaucgcccucagccugcuggccauccucaaggggaucuacaacgucgcgaccugcggccuguucgggcugaucuccuuccuccugcugugcggccgcagcugcuccgugacguacaaggggguguacgagcuccagacccuggagcugaacauggccaaccucaacaugugcaugccgcugagcugcaccaagaacaacucccaccacuacaucauggucggcaacgagaccggccuggagcucacgcugaccaacaccagcaucaucaaccacaaguucugcaaccuguccgacgcccacaagaagaaccucuacgaccacgcccugaugagcaucaucuccaccuuccaccugagcauccccaacuucaaccaguacgaggccauguccugcgacuucaacgggggcaagaucagcgugcaguacaaccucucccacagcuucgcgguggacgccgccaaccacugcgggacgaucgccaacggcguccugcagaccuucaugcggauggcguggggcggguccuacaucgcccuggacagcggcaaggggaacugggacugcaucaugaccuccuaccaguaccucaucauccagaacaccacgugggaggaccacugccaguucagccgccccucccccaucggcuaccuggggcugcucagccagcggacccgcgacaucuacaucagccggcgccugcugggcaccuucaccuggacgcucuccgacagcgagggcaacgaggcccccgggggcuacugccugacccgguggaugcugaucgaggccgagcucaagugcuucgggaacaccgccguggcgaagugcaacgagaagcacgacgaggaguucugcgacaugcugcgccuguucgacuucugcaagcaggccaucaagcggcucaagaccgaggcccagauguccauccagcugaucaacaaggccgugaacgcccugaucaacgaccagcucaucaugaagaaccaccuccgcgacaucaugggcauccccuacugcaacuacagccgguacugcuaccugaaccacacggucaccgggaagaccucccugccccgcugcugccuggugagcaacggcuccuaccugaacgagacccacuucagcgacgacaucgagcagcaggcggacaacaugaucacggagaugcuccagaaggaguacauggaccggcagggcaagaccccgcuggggcugguggaccuguucgucuucuccaccagcuucuaccucaucuccaucuuccugcaccuggugaagaucccgacccaccgccacaucgugggcaagcccugccccaagccccaccggcucaaccacauggggaucugcagcugcggccuguacaagcacccggggguccccgugaaguggaagcgcugaggacuagucccuguucccagagcccacuuuuuuuucuuuuuuugaaauaaaauagccugucuuucagaucucaaaggcucuuuucagagccaccaaaaaaaaaaaaaaaaaaaaaaaaaaaaaaaaaaaaaaaaaaaaaaaaaaaaaaaaaaaaaaaaaaaaaaaaaaaaaaaaaaaaaaaaaaaaaaaaaaaaa

SEQ ID NO: 40232 - RNA, 1745 nt, Artificial Sequence
  mRNA product Design a-1 (hSL-A100) comprising derived and/or modified sequence from LASV(GA391;Clade III)__CAA36645__GPCmut12 (opt1)
aggagagucccgcagucggcguccagcggcucugcuuguucgugugugugucguugcaggccuuauucaagcuuaccaugggccagaucgugaccuucuuccaggaggucccccacgugaucgaggaggugaugaacaucguccugaucgcccucagcauccuggccauccugaaggggcucuacaacguggcgaccugcggccugaucgggcuggugaccuuccuccugcuguccggccgcagcugcucccucaucuacaaggggaccuacgagcugcagacccuggagcucaacauggagacccugaacaugugcaugccgcugagcugcacgaagaacaacucccaccacuacauccgggucggcaacgagaccggccucgagcugacccugaccaacacgagcauccucaaccacaaguucugcaaccuguccgacgcccacaagcgcaaccuguacgaccacagccucauguccaucaucagcaccuuccaccuguccauccccaacuucaaccaguacgaggccaugagcugcgacuucaacgggggcaagaucaccgugcaguacaaccugucccacagcuucgccguggacgccgcggggcacugcggcacccucgccaacgggguccugcagacguucaugcggauggccuggggcggcuccuacaucgcccuggacagcgggcgcggcaacugggacugcaucaugaccuccuaccaguaccucaucauccagaacaccaccugggacgaccacugccaguucagccggcccucccccaucggguaccugggccugcucagccagcgcacgcgggacaucuacaucagccgccggcugcugggcaccuucaccuggacccucuccgacagcgaggggaacgagacgccgggcggguacugccugacccgcuggaugcugaucgaggcggagcucaagugcuucggcaacaccgccguggccaagugcaacgagaagcacgacgaggaguucugcgacaugcugcggcuguucgacuucugcaagcaggccauccgccggcucaagaccgaggcccagauguccauccagcugaucaacaaggcggugaacgcccugaucaacgaccagcucaucaugaagaaccaccuccgcgacaucauggggauccccuacugcaacuacagccgguacugcuaccugaaccacacguccaccggcaagaccagccugccccgcugcugccugaucuccaacggcagcuaccugaacgagaccaaguucuccgacgacaucgagcagcaggccgacaacaugaucacggagaugcugcagaaggaguacaucgaccggcaggggaagacgccccucggccuggucgaccuguucguguucagcaccuccuucuaccucaucagcaucuuccugcaccuggugaagaucccgacccaccgccacaucgucgggaagcccugccccaagccccaccggcucaaccacaugggcaucugcuccugcgggcuguacaagcagccgggcgugcccgugcgcuggaagcggugaggacuagucccuguucccagagcccacuuuuuuuucuuuuuuugaaauaaaauagccugucuuucagaucucaaaggcucuuuucagagccaccaaaaaaaaaaaaaaaaaaaaaaaaaaaaaaaaaaaaaaaaaaaaaaaaaaaaaaaaaaaaaaaaaaaaaaaaaaaaaaaaaaaaaaaaaaaaaaaaaaaaa

SEQ ID NO: 40233 - RNA, 1748 nt, Artificial Sequence
  mRNA product Design a-1 (hSL-A100) comprising derived and/or modified sequence from LASV(AV;Clade V)__CCA30314__GPCmut12 (opt1)
aggagagucccgcagucggcguccagcggcucugcuuguucgugugugugucguugcaggccuuauucaagcuuaccaugggccagaucgugaccuucuuccaggaggucccccacgugaucgaggaggugaugaacaucguccugaucgcccucagcauccuggccgugcugaaggggcucuacaacaucgcgaccugcggccugaucgggcugaucacguuccuccugcugugcggccgcuccugcagcuccaaccucuacaaggggguguacgagcugcagagccuggaccucaacauggagacccugaacaugugcaugccgcuguccugcaccaagaacaacagccaccacuacauccgggucggcaacgacaccggccucgagcugacgcugaccaacaccuccauccucaaccacaaguucugcaaccugagcgacgcccacaagaaggaccuguacgaccacgcccucauguccaucaucagcaccuuccaccuguccauccccaacuucaaccaguacgaggccaugagcugcgacuucaacgggggcaagaucuccgugcaguacaaccugagccacuccuacgccaucgacgcggccaaccacugcgggacgguggccaacggcauccuccagaccuucaugcgcauggccuggggcgggagcuacaucgcgcuggacuccggccgggggaacugggacugcaucaugaccagcuaccaguaccugaucauccagaacaccacgugggagaaccacugccaguucucccgccccagccccaucggcuaccucgggcugcugagccagcggacccgcgacaucuacaucucccggcgccuccugggcaccuucaccuggacgcugagcgacuccgagggcaacgccacccccgggggcuacugccucacccgguggaugcugaucgaggccgagcugaagugcuucgggaacaccgccgucgccaagugcaacgagaagcacgacgaggaguucugcgacaugcuccgccuguucgacuucugcaagcaggcgaucagccggcugaaguccgaggcccagaugagcauccagcucaucaacaaggccgugaacgcccugaucaacgaccagcugaucaugaagaaccaccuccgcgacaucaugggcauccccuacugcaacuacuccaaguacugcuaccugaaccacacgaucaccgggaagaccagccugcccaagugcugccucguguccaacggcagcuaccugaacgagacccacuucuccgacgacaucgagcagcaggccgacaacaugaucacggagaugcugcagaaggaguacauggagcggcagggcaagaccccgcuggggcucgucgaccuguucguguucagcaccuccuucuaccugaucagcaucuuccuccgccuggugaagaucccgacccaccggcacaucgucggcaagcccugccccaagccccaccgccugaaccacauggggaucugcuccugcggccucuacaagcagccgggggugcccgugcgguggaagcgcugaggacuagucccuguucccagagcccacuuuuuuuucuuuuuuugaaauaaaauagccugucuuucagaucucaaaggcucuuuucagagccaccaaaaaaaaaaaaaaaaaaaaaaaaaaaaaaaaaaaaaaaaaaaaaaaaaaaaaaaaaaaaaaaaaaaaaaaaaaaaaaaaaaaaaaaaaaaaaaaaaaaaa

SEQ ID NO: 40234 - RNA, 1745 nt, Artificial Sequence
  mRNA product Design a-1 (hSL-A100) comprising derived and/or modified sequence from LASV(Togo/2016/7082;Clade VI)__AMR44577__GPCmut12 (opt1)
aggagagucccgcagucggcguccagcggcucugcuuguucgugugugugucguugcaggccuuauucaagcuuaccaugggccagaucaucaccuucuuccaggaggugccccacgucaucgaggaggugaugaacaucgugcugaucgcccucagccugcuggccauccucaagggggucuacaacguggcgaccugcggcaucaucgggcuggugacguuccuguuccucugcggccgcuccugcagccugaucuacaagggguccuacgagcugcagacccucgagcugaacauggagacccugaacaugugcaugccgcucagcugcaccaagaacuccagccaccacuacauccgggucggcaacgagacgggccuggagcugacccucaccaacaccuccaucaucaaccacaaguucugcaaccugagcgacgcccacaagcgcaaccuguacgaccacgcccucauguccauccugagcacguuccaccuguccauccccaacuucaaccaguacgaggccaugagcugcgacuucaacgggggcaagaucuccgugcaguacaaccucagccacgccuacgcgguggacgccgccgagcacugcgggaccgucgccaacggcgugcugcagaccuucaugcggauggcguggggcggguccuacaucgcccuggacagcggccgcgggaacugggacugcaucaugaccuccuaccaguaccucaucauccagaacacgaccugggaggaccacugccaguucagccggcccucccccaucggcuaccuggggcugcucagccagcgcacccgggacaucuacaucagccgccggcugcugggcaccuucacguggacccucuccgacagcgagggcaacgagacccccgggggcuacugccugacccgcuggaugcugaucgaggccgagcucaagugcuucgggaacacggccguggccaagugcaacgagaagcacgacgaggaguucugcgacaugcugcggcuguucgacuucugcaagcaggcgauccagcgccucaaguccgaggcccagaugagcauccagcugaucaacaaggccgucaacgcccugaucaacgaccagcucaucaugaagaaccaccuccgggacaugaugggcauccccuacugcaacuacuccaaguacugcuaccugaaccacaccagcuccgggcgcaccagccugcccaagugcugccugguguccaacggcagcuaccugaacgagacccacuucuccgacgacaucgagcagcaggccgacaacaugaucacggagaugcuccagaaggaguacaucgaccggcagggcaagaccccgcuggggcugguggaccuguucgucuucagcaccuccuucuaccucaucagcaucuuccugcaccugaucaagaucccgacccaccgccacaucgugggcaagcccugccccaagccccaccggcucaaccacauggggaucugcuccugcggccuguacaagcagccgggggugcccacgcgcuggaagcggugaggacuagucccuguucccagagcccacuuuuuuuucuuuuuuugaaauaaaauagccugucuuucagaucucaaaggcucuuuucagagccaccaaaaaaaaaaaaaaaaaaaaaaaaaaaaaaaaaaaaaaaaaaaaaaaaaaaaaaaaaaaaaaaaaaaaaaaaaaaaaaaaaaaaaaaaaaaaaaaaaaaaa

SEQ ID NO: 40235 - RNA, 1745 nt, Artificial Sequence
  mRNA product Design a-1 (hSL-A100) comprising derived and/or modified sequence from LASV(KAK-428;Clade n.d. (VII))__ANH09740__GPCmut12 (opt1)
aggagagucccgcagucggcguccagcggcucugcuuguucgugugugugucguugcaggccuuauucaagcuuaccaugggccagaucgugaccuucuuccaggaggucccccacgugaucgaggaggugaugaacaucguccugaucgcccucagccugcuggccauccucaaggggcuguacaacuucgcgaccugcggcgugaucgggcugaucacguuccuccugcugugcggccgcuccugcagcgccaccuacaaggggcaguacgagcuccagacccuggagcugaacauggagucccucaacaugugcaugccgcugagcugcaccaagaacaacucccaccacuacauccgggccggcaacaacacgggccuggagcucacccugaccaacaccagcaucaucucccacaaguucugcaaccugagcgacgcccacaagaagaaccucuacgaccacacgcugauguccaucaucaccaccuuccaccugagcauccccaacuucaaccaguacgaggccauguccugcgacuucaacgggggcaagaucagcauccaguacaaccucucccacagcuacgcgggggacgccgcccagcacugcggcaccguggccaacgggguccugcagacguucaugcgcauggcguggggcggcuccuaccuggcccucgacagcgggcggcgcggcugggacugcaucaucuccagcuaccaguaccugaucauccagaacaccaccugggacgaccacugccaguucucccggcccagccccaucggguaccugggcuucgugagccagaagacccgcgacaucuacaucucccggcgccuccugggcacguucaccuggacccugagcgacuccgaggggcacgacaugccgggcggguacugccucacccgguggaugcugaucgaggccgaccugaagugcuucggcaacacggccguggccaagugcaacgagaagcacgacgaggaguucugcgacauguggcgccucuucgacuucugcaagcaggcgauccagcggcugaaggccgaggcccagaugaacauccagcugaucaacaaggccgucaacgcccucaucaacgaccagcugaugaugaagaaccaccuccgcgacaucauggggauccccuacugcaacuacagcaaguucugcuaccugaacaacaccaccaccggccggacgucccugccccgcugcugccugaucagcaacggcuccuaccucaacgagacccacuucagcgacgacaucgagcagcaggcggacaacaugaucaccgagaugcugcagaaggaguacauggaccggcaggggaagacgccccugggccucguggaccuguucguguucuccaccagcuucuaccugaucaccaucuuccugcaccucgucaagaucccgacccaccgccacaucguggggaagcccugccccaagccccaccggcugaaccacaugggcaucugcuccugcgggcuguacaagcagccgggcgugcccguccgcuggaagcggugaggacuagucccuguucccagagcccacuuuuuuuucuuuuuuugaaauaaaauagccugucuuucagaucucaaaggcucuuuucagagccaccaaaaaaaaaaaaaaaaaaaaaaaaaaaaaaaaaaaaaaaaaaaaaaaaaaaaaaaaaaaaaaaaaaaaaaaaaaaaaaaaaaaaaaaaaaaaaaaaaaaaa

SEQ ID NO: 40236 - RNA, 1745 nt, Artificial Sequence; identical to SEQ ID NO: 40230
  mRNA product Design a-1 (hSL-A100) comprising derived and/or modified sequence from LASV(Pinneo-NIG-1969;Clade I)__AIT17836__GPCmut12 (opt1)

SEQ ID NO: 40237 - RNA, 1745 nt, Artificial Sequence
  mRNA product Design a-1 (hSL-A100) comprising derived and/or modified sequence from LASV(ISTH0009-NIG-2011;Clade II)__AIT17404__GPCmut12 (opt1)
aggagagucccgcagucggcguccagcggcucugcuuguucgugugugugucguugcaggccuuauucaagcuuaccaugggccagaucaucaccuucuuccaggaggugccccacgucaucgaggaggugaugaacaucgugcugaucgcccucagccugcuggccauccucaaggggaucuacaacgucgcgaccugcggccuguucgggcugguguccuuccuccugcugugcggccgcagcugcuccacgaccuacaaggggguguacgagcuccagacccuggagcuggacauggccagccucaacaugugcaugccgcuguccugcaccaagaacaacagccaccacuacaucauggucggcaacgagacgggccuggagcucacccugaccaacaccuccaucaucaaccacaaguucugcaaccugagcgacgcccacaagaagaaccucuacgaccacgcccugauguccaucaucagcacguuccaccuguccauccccaacuucaaccaguacgaggccaugagcugcgacuucaacgggggcaagaucuccgugcaguacaaccucagccacgcguacgccguggacgccgccaaccacugcgggaccaucgcgaacggcguccugcagaccuucaugcggauggccuggggcggguccuacaucgcccuggacagcggcaagggguccugggacugcaucaugaccagcuaccaguaccucaucauccagaacacgaccugggaggaccacugccaguucucccgccccagccccaucggcuaccuggggcugcucagccagcggacccgcgacaucuacaucucccggcgccugcugggcaccuucacguggacccucagcgacuccgagggcaacgagacccccgggggcuacugccugacccgguggaugcugaucgaggccgagcucaagugcuucgggaacacggccguggcgaagugcaacgagaagcacgacgaggaguucugcgacaugcugcgccuguucgacuucugcaagcaggccauccggcgccucaagaccgaggcccagaugagcauccagcugaucaacaaggccgugaacgcccugaucaacgaccagcucaucaugaagaaccaccuccgggacaucaugggcauccccuacugcaacuacuccaaguacugcuaccugaaccacaccgucaccgggaagacgagccugccccgcugcugccugguguccaacggcagcuaccugaacgagacccacuucuccgacgacaucgagcagcaggcggacaacaugaucaccgagcuccugcagaaggaguacauggaccggcagggcaagaccccgcuggggcugguggaccucuucgucuucagcacguccuucuaccugaucagcaucuuccugcaccucaucaagaucccgacccaccgccacaucaccggcaagcccugccccaagccccaccggcugaaccacauggggaucugcuccugcggccuguacaagcacccgggggugcccgugaaguggaagcgcugaggacuagucccuguucccagagcccacuuuuuuuucuuuuuuugaaauaaaauagccugucuuucagaucucaaaggcucuuuucagagccaccaaaaaaaaaaaaaaaaaaaaaaaaaaaaaaaaaaaaaaaaaaaaaaaaaaaaaaaaaaaaaaaaaaaaaaaaaaaaaaaaaaaaaaaaaaaaaaaaaaaaa

SEQ ID NO: 40238 - RNA, 1745 nt, Artificial Sequence
  mRNA product Design a-1 (hSL-A100) comprising derived and/or modified sequence from LASV(ISTH2010-NIG-2012;Clade II)__AIT17482__GPCmut12 (opt1)
aggagagucccgcagucggcguccagcggcucugcuuguucgugugugugucguugcaggccuuauucaagcuuaccaugggccagaucaucaccuucuuccaggaggugccccacgucaucgaggaggugaugaacaucgugcugaucgcccucagccugcuggccauccucaaggggaucuacaacgucgcgaccugcggccuguucgggcugguguccuuccuccugcugugcggccgcagcugcuccacgaccuacaaggggguguacgagcuccagacccuggagcuggacauggccagccucaacaugugcaugccgcuguccugcaccaagaacaacagccaccacuacaucauggucggcaacgagacgggccuggagcucacccugaccaacaccuccaucaucaaccacaaguucugcaaccugagcgacgcccacaagaagaaccucuacgaccacgcccugauguccaucaucagcacguuccaccuguccauccccaacuucaaccaguacgaggccaugagcugcgacuucaacgggggcaagaucuccgugcaguacaaccucagccacgcguacgccguggacgccgccaaccacugcgggaccaucgcgaacggcguccugcagaccuucaugcggauggccuggggcggguccuacaucgcccuggacagcggcaagggguccugggacugcaucaugaccagcuaccaguaccucaucauccagaacaucacgugggaggaccacugccaguucucccgccccagccccaucggcuaccuggggcugcucagccagcggacccgcgacaucuacaucucccggcgccugcugggcaccuucaccuggacgcucagcgacuccgagggcaacgagacccccgggggcuacugccugacccgguggaugcugaucgaggccgagcucaagugcuucgggaacaccgccguggcgaagugcaacgagaagcacgacgaggaguucugcgacaugcugcgccuguucgacuucugcaagcaggccauccggcgccucaagacggaggcccagaugagcauccagcugaucaacaaggccgugaacgcccugaucaacgaccagcucaucaugaagaaccaccuccgggacaucaugggcauccccuacugcaacuacuccaaguacugcuaccugaaccacaccgucaccgggaagaccagccugccccgcugcugccugguguccaacggcagcuaccugaacgagacgcacuucuccgacgacaucgagcagcaggcggacaacaugaucaccgagcuccugcagaaggaguacaucgaccggcagggcaagaccccgcuggggcugguggaccucuucgucuucagcaccuccuucuaccugaucagcaucuuccugcaccucgugaagaucccgacgcaccgccacguggucggcaagcccugccccaagccccaccggcugaaccacauggggaucugcuccugcggccuguacaagcacccgggggugcccgugaaguggaagcgcugaggacuagucccuguucccagagcccacuuuuuuuucuuuuuuugaaauaaaauagccugucuuucagaucucaaaggcucuuuucagagccaccaaaaaaaaaaaaaaaaaaaaaaaaaaaaaaaaaaaaaaaaaaaaaaaaaaaaaaaaaaaaaaaaaaaaaaaaaaaaaaaaaaaaaaaaaaaaaaaaaaaaa

SEQ ID NO: 40239 - RNA, 1745 nt, Artificial Sequence
  mRNA product Design a-1 (hSL-A100) comprising derived and/or modified sequence from LASV(Lassa virus/H.sapiens-wt/NGA/2015/ISTH_0543;Clade II)__AVO03639__GPCmut12 (opt1)
aggagagucccgcagucggcguccagcggcucugcuuguucgugugugugucguugcaggccuuauucaagcuuaccaugggccagaucaucaccuucuuccaggaggugccccacgucaucgaggaggugaugaacaucgugcugaucgcccucagccugcuggccauccucaaggggaucuacaacgucgcgaccugcggccuguucgggcugguguccuuccuccugcugugcggccgcagcugcuccacgaccuacaaggggguguacgagcuccagacccuggagcuggacauggccaaccucaacaugugcaugccgcugagcugcaccaagaacaacucccaccacuacaucauggucggcaacgagacgggccuggagcucacccugaccaacaccagcaucaucaaccacaaguucugcaaccuguccgacgcccacaagaagaaccucuacgaccacgcccugaugagcaucaucuccacguuccaccugagcauccccaacuucaaccaguacgaggccauguccugcgacuucaacgggggcaagaucagcgugcaguacaaccucucccacaccuacgcgguggacgccgccaaccacugcgggaccaucgccaacggcguccugcagaccuucaugcggauggcguggggcgggagcuacaucgcccuggacuccggcaaggggagcugggacugcaucaugacguccuaccaguaccucgugauccagaacaccaccugggaggaccacugccaguucagccgccccucccccaucggcuaccuggggcugcucagccagcggacccgcgacaucuacaucagccggcgccugcugggcacguucaccuggacccucuccgacagcgagggcaacgagacccccgggggcuacugccugacgcgguggaugcugaucgaggccgagcucaagugcuucgggaacaccgccguggccaagugcaacgagaagcacgacgaggaguucugcgacaugcugcgccuguucgacuucugcaagcaggcgauccggcgccucaagaccgaggcccagauguccauccagcugaucaacaaggccgucaacgcccugaucaacgaccagcucaucaugaagaaccaccuccgggacaucaugggcaucccguacugcaacuacagcaaguacugcuaccugaaccacaccgugacggggaagaccucccugccccgcugcugccuggugagcaacggcuccuaccugaacgagacccacuucagcgacgacaucgagcagcaggccgacaacaugaucaccgagcuccugcagaaggaguacaucgaccggcagggcaagacgccccuggggcuggucgaccucuucguguucuccaccagcuucuaccugaucuccaucuuccugcaccucgugaagaucccgacccaccgccacaucaccggcaagcccugccccaagccccaccggcugaaccacauggggaucugcagcugcggccuguacaagcacccggggguccccgugaaguggaagcgcugaggacuagucccuguucccagagcccacuuuuuuuucuuuuuuugaaauaaaauagccugucuuucagaucucaaaggcucuuuucagagccaccaaaaaaaaaaaaaaaaaaaaaaaaaaaaaaaaaaaaaaaaaaaaaaaaaaaaaaaaaaaaaaaaaaaaaaaaaaaaaaaaaaaaaaaaaaaaaaaaaaaaa

SEQ ID NO: 40240 - RNA, 1745 nt, Artificial Sequence
  mRNA product Design a-1 (hSL-A100) comprising derived and/or modified sequence from LASV(Lassa virus/H.sapiens-wt/NGA/2016/ISTH_0009;Clade II)__AVO03571__GPCmut12 (opt1)
aggagagucccgcagucggcguccagcggcucugcuuguucgugugugugucguugcaggccuuauucaagcuuaccaugggccagaucaucaccuucuuccaggaggugccccacgucaucgaggaggugaugaacaucgugcugaucgcccucagccugcuggccauccucaaggggaucuacaacgucgcgaccugcggccugcuggggcucguguccuuccugcugcucugcggccgcagcugcuccacgaccuacaaggggguguacgagcugcagacccuggagcucgacauggccagccugaacaugugcaugccgcuguccugcaccaagaacaacagccaccacuacaucauggucggcaacgagacgggccucgagcugacccugaccaacaccuccaucaucaaccacaaguucugcaaccucagcgacgcccacaagaagaaccuguacgaccacgcccugauguccaucaucagcacguuccaccucuccauccccaacuucaaccaguacgaggccaugagcugcgacuucaacgggggccggaucuccgugcaguacaaccugagccacuccuacgcgguggacgccgccaaccacugcgggaccaucgccaacggcguccugcagaccuucaugcgcauggcguggggcgggagcuacaucgcccucgacuccggcaaggggagcugggacugcaucaugaccuccuaccaguaccugaucauccagaacacgaccugggaggaccacugccaguucagccggcccagccccaucggcuaccuggggcuccugucccagcgcacccgggacaucuacaucagccgccggcugcucggcaccuucacguggacccuguccgacagcgagggcaacgagacccccgggggcuacugccugacccgcuggaugcucaucgaggccgagcugaagugcuucgggaacacggccguggccaagugcaacgagaagcacgacgaggaguucugcgacaugcugcggcuguucgacuucugcaagcaggcgauccgccggcugaagaccgaggcccagauguccauccagcugaucaacaaggccgugaacgcccucaucaacgaccagcugaucaugaagaaccaccuccgcgacaucaugggcauccccuacugcaacuacagcaaguacugcuaccucaaccacaccgucaccgggaagacgucccugccccggugcugccuggugagcaacggcuccuaccucaacgagacccacuucagcgacgacaucgagcagcaggccgacaacaugaucaccgagcugcugcagaaggaguacaucgaccgccagggcaagaccccgcuggggcucguggaccuguucgucuucuccacgagcuucuaccugaucuccaucuuccuccaccuggugaagaucccgacccaccggcacaucaccggcaagcccugccccaagccccaccgccugaaccacauggggaucugcagcugcggccucuacaaccacccgggggugcccgucaaguggaagcggugaggacuagucccuguucccagagcccacuuuuuuuucuuuuuuugaaauaaaauagccugucuuucagaucucaaaggcucuuuucagagccaccaaaaaaaaaaaaaaaaaaaaaaaaaaaaaaaaaaaaaaaaaaaaaaaaaaaaaaaaaaaaaaaaaaaaaaaaaaaaaaaaaaaaaaaaaaaaaaaaaaaaa

SEQ ID NO: 40241 - RNA, 1745 nt, Artificial Sequence
  mRNA product Design a-1 (hSL-A100) comprising derived and/or modified sequence from LASV(Lassa virus/H.sapiens-wt/NGA/2016/ISTH_0017;Clade II)__AVO03567__GPCmut12 (opt1)
aggagagucccgcagucggcguccagcggcucugcuuguucgugugugugucguugcaggccuuauucaagcuuaccaugggccagaucaucaccuucuuccaggaggugccccacgucaucgaggaggugaugaacaucgugcugaucgcccucagccugcuggccauccucaaggggaucuacaacgucgcgaccugcggccuguucgggcugguguccuuccuccugcugugcggccgcagcugcuccacgaccuacaaggggguguacgagcuccagacccuggagcuggacauggccagccucaacaugugcaugccgcuguccugcaccaagaacaacagccaccacuacaucauggucggcaacgagacgggccuggagcucacccugaccaacaccuccaucaucaaccacaaguucugcaaccugagcgacgcccacaagaagaaccucuacgaccacgcccugauguccaucaucagcacguuccaccuguccauccccaacuucaaccaguacgaggccaugagcugcgacuucaacgggggcaagaucuccgugcaguacaaccucagccacaccuacgcgaucgacgccgccaaccacugcgggaccaucgccaacggcgugcugcagaccuucaugcggauggcguggggcggguccuacaucgcccuggacagcggcaagggguccugggacugcaucaugacgagcuaccaguaccucaucauccagaacaccaccugggaggaccacugccaguucucccgccccagccccaucggcuaccuggggcugcucagccagcggacccgcgacaucuacaucucccggcgccugcugggcacguucaccuggacccucagcgacuccgagggcaacgagacccccgggggcuacugccugacgcgguggaugcugaucgaggccgagcucaagugcuucgggaacaccgccgucgccaagugcaacgagaagcacgacgaggaguucugcgacaugcugcgccuguucgacuucugcaagcaggcgauccggcgccucaagaccgaggcccagaugagcauccagcugaucaacaaggccgugaacgcccugaucaacgaccagcucaucaugaagaaccaccuccgggacaucaugggcaucccguacugcaacuacuccaaguacugcuaccugaaccacaccgugacggggaagaccagccugccccgcugcugccuggucuccaacggcagcuaccugaacgagacccacuucuccgacgacaucgagcagcaggccgacaacaugaucaccgagcuccugcagaaggaguacauggaccggcagggcaagacgccccuggggcugguggaccucuucguguucagcaccuccuucuaccugaucagcaucuuccugcaccucguccgcaucccgacccaccggcacgugaucggcaagcccugccccaagccccaccgccugaaccacauggggaucugcuccugcggccuguacaagcacccgggggugcccgucaaguggaagcggugaggacuagucccuguucccagagcccacuuuuuuuucuuuuuuugaaauaaaauagccugucuuucagaucucaaaggcucuuuucagagccaccaaaaaaaaaaaaaaaaaaaaaaaaaaaaaaaaaaaaaaaaaaaaaaaaaaaaaaaaaaaaaaaaaaaaaaaaaaaaaaaaaaaaaaaaaaaaaaaaaaaaa

SEQ ID NO: 40242 - RNA, 1745 nt, Artificial Sequence
  mRNA product Design a-1 (hSL-A100) comprising derived and/or modified sequence from LASV(Lassa virus/H.sapiens-wt/NGA/2018/ISTH_0959;Clade II)__AVV65099__GPCmut12 (opt1)
aggagagucccgcagucggcguccagcggcucugcuuguucgugugugugucguugcaggccuuauucaagcuuaccaugggccagaucaucaccuucuuccaggaggugccccacgucaucgaggaggugaugaacaucgugcugaucgcccucagccugcuggccauccucaaggggaucuacaacgucgugaccugcggccuguucgggcugguguccuuccuccugcugugcggccgcagcugcuccacgaccuacaagggggucuacgagcuccagacccuggagcuggacauggcgagccucaacaugugcaugccgcuguccugcaccaagaacaacagccaccacuacaucauggugggcaacgagacgggccuggagcucacccugaccaacaccuccaucaucaaccacaaguucugcaaccugagcgacgcccacaagaagaaccucuacgaccacgcccugauguccaucaucagcacguuccaccuguccauccccaacuucaaccaguacgaggccaugagcugcgacuucaacgggggcaagaucuccgugcaguacaaccucagccacgccuacgcgaucgacgccgccaaccacugcgggaccaucgccaacggcguccugcagaccuucaugcggauggcguggggcggguccuacaucgcccuggacagcggcaagggguccugggacugcaucaugaccagcuaccaguaccucaucauccagaacacgaccugggaggaccacugccaguucucccgccccagccccaucggcuaccuggggcugcucagccagcggacccgcgacaucuacaucucccggcgccugcugggcaccuucacguggacccucagcgacuccgagggcaacgagacccccgggggcuacugccugacccgguggaugcugaucgaggccgagcucaagugcuucgggaacacggccguggccaagugcaacgagaagcacgacgaggaguucugcgacaugcugcgccuguucgacuucugcaagcaggcgauccggcgccucaagaccgaggcccagaugagcauccagcugaucaacaaggccgugaacgcccugaucaacgaccagcucaucaugaagaaccaccuccgggacaucaugggcauccccuacugcaacuacuccaaguacugcuaccugaaccacaccgucaccgggaagacgagccugccccgcugcugccugguguccaacggcagcuaccugaacgagacccacuucuccgacgacaucgagcagcaggccgacaacaugaucaccgagcuccugcagaaggaguacaucgaccggcagggcaagaccccgcuggggcugguggaccucuucgucuucagcacguccuucuaccugaucagcaucuuccugcaccucgugaagaucccgacccaccgccacgugaucggcaagcccugccccaagccccaccggcugaaccacauggggaucugcuccugcggccuguacaagcacccggggguccccgugaaguggaagcgcugaggacuagucccuguucccagagcccacuuuuuuuucuuuuuuugaaauaaaauagccugucuuucagaucucaaaggcucuuuucagagccaccaaaaaaaaaaaaaaaaaaaaaaaaaaaaaaaaaaaaaaaaaaaaaaaaaaaaaaaaaaaaaaaaaaaaaaaaaaaaaaaaaaaaaaaaaaaaaaaaaaaaa

SEQ ID NO: 40243 - RNA, 1745 nt, Artificial Sequence
  mRNA product Design a-1 (hSL-A100) comprising derived and/or modified sequence from LASV(LASV003-NIG-2008;Clade II)__AIT17580__GPCmut12 (opt1)
aggagagucccgcagucggcguccagcggcucugcuuguucgugugugugucguugcaggccuuauucaagcuuaccaugggccagaucaucaccuucuuccaggaggugccccacgucaucgaggaggugaugaacaucgugcugaucgcccucagccugcuggccauccucaaggggaucuacaacgucgcgaccugcggccuguucgggcugguguccuuccuccugcugugcggccgcagcugcuccacgaccuacaaggggguguacgagcuccagacccuggagcuggacauggccagccucaacaugugcaugccgcuguccugcaccaagaacaacagccaccacuacaucauggucggcaacgagacgggccuggagcucacccugaccaacaccuccaucaucaaccacaaguucugcaaccugagcgacgcccacaagaagaaccucuacgaccacgcccugauguccaucaucagcacguuccaccuguccauccccaacuucaaccaguacgaggccaugagcugcgacuucaacgggggcaagaucuccgugcaguacaaccucagccacaccuacgcgguggacgccgccaaccacugcgggaccaucgccaacggcguccugcagaccuucaugcggauggcguggggcggguccuacaucgcccuggacagcggcaagggguccugggacugcaucaugacgagcuaccaguaccucaucauccagaacaccaccugggaggaccacugccaguucucccgccccagccccaucggcuaccuggggcugcucagccagcggacccgcgacaucuacaucucccggcgccugcugggcacguucaccuggacccucagcgacuccgagagcaacgagaccccgggcggguacugccugacgcgguggaugcugaucgaggccgagcucaagugcuucggcaacaccgccguggccaagugcaacgagaagcacgacgaggaguucugcgacaugcugcgccuguucgacuucugcaagcaggcgauccggcgccucaaggccgaggcccagauguccauccagcugaucaacaaggccgugaacgcccugaucaacgaccagcucaucaugaagaaccaccuccgggacaucauggggauccccuacugcaacuacagcaaguacugcuaccugaaccacaccgucaccggccgcacgucccugccccggugcugccuggugagcaacggguccuaccugaacgagacccacuucagcgacgacaucgagcagcaggcggacaacaugaucaccgagcuccugcagaaggaguacauggaccgccagggcaagacgccccugggccugguggaccucuucgucuucuccaccagcuucuaccugaucuccaucuuccugcaccucgugaagaucccgacccaccggcacgugaucgggaagcccugccccaagccccaccgccugaaccacaugggcaucugcagcugcgggcuguacaagcacccgggcguccccgugaaguggaagcggugaggacuagucccuguucccagagcccacuuuuuuuucuuuuuuugaaauaaaauagccugucuuucagaucucaaaggcucuuuucagagccaccaaaaaaaaaaaaaaaaaaaaaaaaaaaaaaaaaaaaaaaaaaaaaaaaaaaaaaaaaaaaaaaaaaaaaaaaaaaaaaaaaaaaaaaaaaaaaaaaaaaaa

SEQ ID NO: 40244 - RNA, 1745 nt, Artificial Sequence
  mRNA product Design a-1 (hSL-A100) comprising derived and/or modified sequence from LASV(LASV035-NIG-2009;Clade II)__AIT17588__GPCmut12 (opt1)
aggagagucccgcagucggcguccagcggcucugcuuguucgugugugugucguugcaggccuuauucaagcuuaccaugggccagaucaucaccuucuuccaggaggugccccacgucaucgaggaggugaugaacaucgugcugaucgcccucagccugcuggccauccucaaggggaucuacaacgucgcgaccugcggccuguucgggcugguguccuuccuccugcugugcggccgcagcugcuccacgaccuacaaggggguguacgagcuccagacccuggagcuggacauggccagccucaacaugugcaugccgcuguccugcaccaagaacaacagccaccacuacaucauggucggcaacgagacgggccuggagcucacccugaccaacaccuccaucaucaaccacaaguucugcaaccugagcgacgcccacaagaagaaccucuacgaccacgcccugauguccaucaucagcacguuccaccuguccauccccaacuucaaccaguacgaggccaugagcugcgacuucaacgggggcaagaucuccgugcaguacaaccucagccacgcguacgccguggacgccgccaaccacugcgggaccaucgcgaacggcguccugcagaccuucaugcggauggccuggggcggguccuacaucgcccuggacagcggcaagggguccugggacugcaucaugaccagcuaccaguaccucaucauccagaacacgaccugggaggaccacugccaguucucccgccccagccccaucggcuaccuggggcugcucagccagcggacccgcgacaucuacaucucccggcgccugcugggcaccuucacguggacccucagcgacuccgagggcaacgagacccccgggggcuacugccugacccgguggaugcugaucgaggccgagcucaagugcuucgggaacacggccguggcgaagugcaacgagaagcacgacgaggaguucugcgacaugcugcgccuguucgacuucugcaagcaggccauccggcgccucaaggccgaggcccagaugagcauccagcugaucaacaaggccgugaacgcgcugaucaacgaccagcucaucaugaagaaccaccuccgggacaucaugggcauccccuacugcaacuacuccaaguacugcuaccugaaccacaccgucaccgggaagaccagccugccccgcugcugccugguguccaacggcagcuaccugaacgagacgcacuucuccgacgacaucgagcagcaggccgacaacaugaucaccgagcuccugcagaaggaguacaucgaccggcagggcaagaccccgcuggggcugguggaccucuucgucuucagcaccuccuucuaccugaucagcaucuuccugcaccucgugaagaucccgacgcaccgccacgugaucggcaagcccugccccaagccccaccggcugaaccacauggggaucugcuccugcggccuguacaagcacccggggguccccgugaaguggaagcgcugaggacuagucccuguucccagagcccacuuuuuuuucuuuuuuugaaauaaaauagccugucuuucagaucucaaaggcucuuuucagagccaccaaaaaaaaaaaaaaaaaaaaaaaaaaaaaaaaaaaaaaaaaaaaaaaaaaaaaaaaaaaaaaaaaaaaaaaaaaaaaaaaaaaaaaaaaaaaaaaaaaaaa

SEQ ID NO: 40245 - RNA, 1745 nt, Artificial Sequence
  mRNA product Design a-1 (hSL-A100) comprising derived and/or modified sequence from LASV(LASV1000-NIG-2009;Clade II)__AIT17782__GPCmut12 (opt1)
aggagagucccgcagucggcguccagcggcucugcuuguucgugugugugucguugcaggccuuauucaagcuuaccaugggccagaucaucaccuucuuccaggaggugccccacgucaucgaggaggugaugaacaucgugcugaucgcccucagccugcuggccauccucaaggggaucuacaacgucgcgaccugcggccuguucgggcugguguccuuccuccugcugugcggccgcagcugcuccacgaccuacaaggggguguacgagcuccagacccuggagcuggacauggccagccucaacaugugcaugccgcuguccugcaccaagaacaacagccaccacuacaucauggucggcaacgagacgggccuggagcucacccugaccaacaccuccaucaucaaccacaaguucugcaaccugagcgacgcccacaagaagaaccucuacgaccacgcccugauguccaucaucagcacguuccaccuguccauccccaacuucaaccaguacgaggccaugagcugcgacuucaacgggggcaagaucuccgugcaguacaaccucagccacaccuacgcgguggacgccgccaaccacugcgggaccaucgccaacggcguccugcagaccuucaugcggauggcguggggcggguccuacaucgcccuggacagcggcaagggguccugggacugcaucaugacgagcuaccaguaccucaucauccagaacaccaccugggaggaccacugccaguucucccgccccagccccaucggcuaccuggggcugcucagccagcggacccgcgacaucuacaucucccggcgccugcugggcacguucaccuggacccucagcgacuccgagggcaacgagacccccgggggcuacugccugacgcgguggaugcugaucgaggccgagcucaagugcuucgggaacaccgccguggccaagugcaacgagaagcacgacgaggaguucugcgacaugcugcgccuguucgacuucugcaagcaggcgaucaagcggcucaagaccgaggcccagaugagcauccagcugaucaacaaggccgugaacgcccugaucaacgaccagcucaucaugaagaaccaccuccgcgacaucaugggcaucccguacugcaacuacuccaaguacugcuaccugaaccacaccgucacggggaagaccagccugccccggugcugccugguguccaacggcagcuaccugaacgagacccacuucuccgacgacaucgagcagcaggccgacaacaugaucaccgagcuccugcagaaggaguacaucgaccgccagggcaagacgccccuggggcugguggaccucuucgucuucagcaccuccuucuaccugaucagcaucuuccugcaccucgugaagaucccgacccaccggcacguggucggcaagcccugccccaagccccaccgccugaaccacauggggaucugcuccugcggccuguacaagcacccgggggugcccgugaaguggaagcggugaggacuagucccuguucccagagcccacuuuuuuuucuuuuuuugaaauaaaauagccugucuuucagaucucaaaggcucuuuucagagccaccaaaaaaaaaaaaaaaaaaaaaaaaaaaaaaaaaaaaaaaaaaaaaaaaaaaaaaaaaaaaaaaaaaaaaaaaaaaaaaaaaaaaaaaaaaaaaaaaaaaaa

SEQ ID NO: 40246 - RNA, 1745 nt, Artificial Sequence
  mRNA product Design a-1 (hSL-A100) comprising derived and/or modified sequence from LASV(LASV221-NIG-2010;Clade II)__AIT17624__GPCmut12 (opt1)
aggagagucccgcagucggcguccagcggcucugcuuguucgugugugugucguugcaggccuuauucaagcuuaccaugggccagaucaucaccuucuuccaggaggugccccacgucaucgaggaggugaugaacaucgugcugaucgcccucagccugcuggccauccucaaggggaucuacaacgucgcgaccugcggccuguucgggcugguguccuuccuccugcugugcggccgcagcugcuccacgaccuacaaggggguguacgagcuccagacccuggagcuggacauggccagccucaacaugugcaugccgcuguccugcaccaagaacaacagccaccacuacaucauggucggcaacgagacgggccuggagcucacccugaccaacaccuccaucaucaaccacaaguucugcaaccugagcgacgcccacaagaagaaccucuacgaccacgcccugauguccaucaucagcacguuccaccuguccauccccaacuucaaccaguacgaggccaugagcugcgacuucaacgggggcaagaucuccgugcaguacaaccucagccacaccuacgcgaucgacgccgccaaccacugcgggaccaucgccaacggcgugcugcagaccuucaugcggauggcguggggcggguccuacaucgcccuggacagcggcaagggguccugggacugcaucaugacgagcuaccaguaccucaucauccagaacaccaccugggaggaccacugccaguucucccgccccagccccaucggcuaccuggggcugcucagccagcggacccgcgacaucuacaucucccggcgccugcugggcacguucaccuggacccucagcgacuccgagggcaacgagacccccgggggcuacugccugacgcgguggaugcugaucgaggccgagcucaagugcuucgggaacaccgccgucgccaagugcaacgagaagcacgacgaggaguucugcgacaugcugcgccuguucgacuucugcaagcaggcgauccggcgccucaagaccgaggcccagaugagcauccagcugaucaacaaggccgugaacgcccugaucaacgaccagcucaucaugaagaaccaccuccgggacaucaugggcaucccguacugcaacuacuccaaguacugcuaccugaaccacaccgugacggggaagaccagccugccccgcugcugccuggucuccaacggcagcuaccugaacgagacccacuucuccgacgacaucgagcagcaggccgacaacaugaucaccgagaugcuccagaaggaguacauggaccggcagggcaagacgccccuggggcugguggaccuguucguguucagcaccuccuucuaccucaucagcaucuuccugcaccuggucaagaucccgacccaccgccacgugaucggcaagcccugccccaagccccaccggcucaaccacauggggaucugcuccugcggccuguacaagcacccgggggugcccgucaaguggaagcgcugaggacuagucccuguucccagagcccacuuuuuuuucuuuuuuugaaauaaaauagccugucuuucagaucucaaaggcucuuuucagagccaccaaaaaaaaaaaaaaaaaaaaaaaaaaaaaaaaaaaaaaaaaaaaaaaaaaaaaaaaaaaaaaaaaaaaaaaaaaaaaaaaaaaaaaaaaaaaaaaaaaaaa

SEQ ID NO: 40247 - RNA, 1745 nt, Artificial Sequence
  mRNA product Design a-1 (hSL-A100) comprising derived and/or modified sequence from LASV(LASV237-NIG-2010;Clade II)__AIT17638__GPCmut12 (opt1)
aggagagucccgcagucggcguccagcggcucugcuuguucgugugugugucguugcaggccuuauucaagcuuaccaugggccagaucaucaccuucuuccaggaggugccccacgucaucgaggaggugaugaacaucgugcugaucgcccucagccugcuggccauccucaaggggaucuacaacgucgcgaccugcggccuguucgggcugguguccuuccuccugcugugcggccgcagcugcuccacgaccuacaaggggguguacgagcuccagacccuggagcuggacauggccagccucaacaugugcaugccgcuguccugcaccaagaacaacagccaccacuacaucauggucggcaacgagacgggccuggagcucacccugaccaacaccuccaucaucaaccacaaguucugcaaccugagcgacgcccacaagaaggaccucuacgaccacgcccugauguccaucaucagcacguuccaccuguccauccccaacuucaaccaguacgaggccaugagcugcgacuucaacgggggcaagaucuccgugcaguacaaccucagccacaccuacgcgguggacgccgccaaccacugcgggaccaucgccaacggcguccugcagaccuucaugcggauggcguggggcggguccuacaucgcccuggacagcggcaagggguccugggacugcaucaugacgagcuaccaguaccucaucauccagaacaccaccugggaggaccacugccaguucucccgccccagccccaucggcuaccuggggcugcucagccagcggacccgcgacaucuacaucucccggcgccugcugggcacguucaccuggacccucagcgacuccgagggcaacgagacccccgggggcuacugccugacgcgguggaugcugaucgaggccgagcucaagugcuucgggaacaccgccguggccaagugcaacgagaagcacgacgaggaguucugcgacaugcugcgccuguucgacuucugcaagcaggcgauccggcgccucaagaccgaggcccagaugagcauccagcugaucaacaaggccgugaacgcccugaucaacgaccagcucaucaugaagaaccaccuccgggacaucaugggcaucccguacugcaacuacuccaaguacugcuaccugaaccacaccgucacggggaagaccagccugccccgcugcugccugguguccaacggcagcuaccugaacgagacccacuucuccgacgacaucgagcagcaggccgacaacaugaucaccgagcuccugcagaaggaguacauggaccggcagggcaagacgccccuggggcugguggaccucuucgucuucagcaccuccuucuaccugaucagcaucuuccugcaccucaucaagaucccgacccaccgccacaucaccggcaagcccugccccaagccccaccggcugaaccacauggggaucugcuccugcggccuguacaagcacccgggggugcccgugaaguggaagcgcugaggacuagucccuguucccagagcccacuuuuuuuucuuuuuuugaaauaaaauagccugucuuucagaucucaaaggcucuuuucagagccaccaaaaaaaaaaaaaaaaaaaaaaaaaaaaaaaaaaaaaaaaaaaaaaaaaaaaaaaaaaaaaaaaaaaaaaaaaaaaaaaaaaaaaaaaaaaaaaaaaaaaa

SEQ ID NO: 40248 - RNA, 1745 nt, Artificial Sequence
  mRNA product Design a-1 (hSL-A100) comprising derived and/or modified sequence from LASV(LASV253-NIG-2011;Clade II)__AIT17670__GPCmut12 (opt1)
aggagagucccgcagucggcguccagcggcucugcuuguucgugugugugucguugcaggccuuauucaagcuuaccaugggccagaucaucaccuucuuccaggaggugccccacgucaucgaggaggugaugaacaucgugcugaucgcccucagccugcuggccauccucaaggggaucuacaacgucgcgaccugcggccuguucgggcugguguccuuccuccugcugugcggccgcagcugcuccacgaccuacaaggggguguacgagcuccagacccuggagcuggacauggccagccucaacaugugcaugccgcuguccugcaccaagaacaacagccaccacuacaucauggucggcaacgagacgggccuggagcucacccugaccaacaccuccaucaucaaccacaaguucugcaaccugagcgacgcccacaagaagaaccucuacgaccacgcccugauguccaucaucagcacguuccaccuguccauccccaacuucaaccaguacgaggccaugagcugcgacuucaacgggggcaagaucuccgugcaguacaaccucagccacaccuacgcgguggacgccgccaaccacugcgggaccaucgccaacggcguccugcagaccuucaugcggauggcguggggcggguccuacaucgcccuggacagcggcaagggguccugggacugcaucaugacgagcuaccaguaccucaucauccagaacaccaccugggaggaccacugccaguucucccgccccagccccaucggcuaccuggggcugcucagccagcggacccgcgacaucuacaucucccggcgccugcugggcacguucaccuggacccucagcgacuccgagggcaacgagacccccgggggcuacugccugacgcgguggaugcugaucgaggccgagcucaagugcuucgggaacaccgccguggccaagugcaacgagaagcacgacgaggaguucugcgacaugcugcgccuguucgacuucugcaagcaggcgauccggcgccucaaggccgaggcccagaugagcauccagcugaucaacaaggccgugaacgcccugaucaacgaccagcucaucaugaagaaccaccuccgggacaucaugggcauccccuacugcaacuacuccaaguacugcuaccugaaccacaccgucaccgggcgcacgagccugccccggugcugccugguguccaacggcagcuaccugaacgagacccacuucuccgacgacaucgagcagcaggcggacaacaugaucaccgagcuccugcagaaggaguacaucgaccgccagggcaagaccccgcuggggcugguggaccucuucgucuucagcacguccuucuaccugaucagcaucuuccugcaccucgugaagaucccgacccaccggcacaucaucggcaagcccugccccaagccccaccgccugaaccacauggggaucugcuccugcggccuguacaagcacccgggggugcccgucaaguggaagcggugaggacuagucccuguucccagagcccacuuuuuuuucuuuuuuugaaauaaaauagccugucuuucagaucucaaaggcucuuuucagagccaccaaaaaaaaaaaaaaaaaaaaaaaaaaaaaaaaaaaaaaaaaaaaaaaaaaaaaaaaaaaaaaaaaaaaaaaaaaaaaaaaaaaaaaaaaaaaaaaaaaaaa

SEQ ID NO: 40249 - RNA, 1745 nt, Artificial Sequence
  mRNA product Design a-1 (hSL-A100) comprising derived and/or modified sequence from LASV(LASV254-NIG-2011;Clade II)__AIT17674__GPCmut12 (opt1)
aggagagucccgcagucggcguccagcggcucugcuuguucgugugugugucguugcaggccuuauucaagcuuaccaugggccagaucaucaccuucuuccaggaggugccccacgucaucgaggaggugaugaacaucgugcugaucgcccucagccugcuggccauccucaaggggaucuacaacgucgcgaccugcggccuguucgggcugguguccuuccuccugcugugcggccgcagcugcuccacgaccuacaaggggguguacgagcuccagacccuggagcuggacaugaccaaccucaacaugugcaugccgcugagcugcacgaagaacaacucccaccacuacaucauggucggcaacgagaccggccuggagcucacccugaccaacacgagcaucaucaaccacaaguucugcaaccuguccgacgcccacaagaagaaccucuacaaccacgcccugaugagcaucaucuccaccuuccaccugagcauccccaacuucaaccaguacgaggccauguccugcgacuucaacgggggcaagaucagcgugcaguacaaccucucccacagcuacgccguggacgcggccaaccacugcgggaccaucgccaacggcguccugcagaccuucaugcggauggccuggggcggguccuacaucgcgcuggacagcggcaaggggaacugggacugcaucaugacguccuaccaguaccucaucauccagaacaccaccugggaggaccacugccaguucagccgccccucccccaucggcuaccuggggcugcucagccagcggacccgcgacaucuacaucagccggcgccugcugggcacguucaccuggacccucuccgacagcgagggcaacgagacccccgggggcuacugccugacgcgguggaugcugaucgaggccgagcucaagugcuucgggaacaccgccguggccaagugcaacgagaagcacgacgaggaguucugcgacaugcugcgccuguucgacuucugcaagcaggccauccggcgccucaagaccgaggcgcaggccaacauccagcugaucaacaaggccgugaacgcccugaucaacgaccagcucaucaugaagaaccaccuccgggacaucaugggcaucccguacugcaacuacuccaaguacugcuaccugaaccacaccgucacggggaagaccagccugccccgcugcugccugguguccaacggcagcuaccugaacgagacccacuucuccgacgacaucgagcagcaggccgacaacaugaucaccgagcuccugcagaaggaguacauggaccggcagggcaagacgccccuggggcugguggaccucuucgucuucagcaccuccuucuaccugaucagcaucuuccugcaccucgugaagaucccgacccaccgccacgugaucggcaagcccugccccaagccccaccggcugaaccacauggggaucugcuccugcggccuguacaagcacccggggguccccgugaaguggaagcgcugaggacuagucccuguucccagagcccacuuuuuuuucuuuuuuugaaauaaaauagccugucuuucagaucucaaaggcucuuuucagagccaccaaaaaaaaaaaaaaaaaaaaaaaaaaaaaaaaaaaaaaaaaaaaaaaaaaaaaaaaaaaaaaaaaaaaaaaaaaaaaaaaaaaaaaaaaaaaaaaaaaaaa

SEQ ID NO: 40250 - RNA, 1745 nt, Artificial Sequence
  mRNA product Design a-1 (hSL-A100) comprising derived and/or modified sequence from LASV(Nig08-A19;Clade III)__ADU56618__GPCmut12 (opt1)
aggagagucccgcagucggcguccagcggcucugcuuguucgugugugugucguugcaggccuuauucaagcuuaccaugggccagaucgugaccuucuuccaggaggucccccacgugaucgaggaggugaugaacaucguccugaucgcccucagcauccuggccauccugaaggggcucuacaacaucgcgaccugcggccugaucgggcuggugacguuccuccugcuguccggccgcagcugcuccaugaccuacaaggggguguacgagcuccagacccuggagcugaacaugaacacccucaacaugugcaugccgcugagcugcacgaagaacaacucccaccacuacaucauggucggcaacgagaccggccuggagcucacccugaccaacacgagccugcuccaccacaaguucugcaaccuguccgacgcccacaagaagaaccuguacgaccacacccucaugagcaucaucuccaccuuccaccugagcauccccaacuucaaccaguacgaggccauguccugcgacuucaacgggggcaagaucaccgugcaguacaaccugagccacuccuacgccaucgacgccgcgaaccacugcgggacgguggccaacggcguccuccagaccuucaugcggauggccuggggcgggagcuacaucgcccuggacuccggccgcgggaagugggacugcaucaugaccagcuaccaguaccugaucauccagaacaccacgugggaggaccacugccaguucucccggcccagccccaucggcuaccucgggcugcugucccagcgcacccgggacaucuacaucagccgccggcuccugggcaccuucaccuggacgcugagcgacuccgagggcaacgagacccccgggggcuacugccucacccgcuggaugcugaucgaggcggagcugaagugcuucgggaacaccgccguggccaagugcaacgagaagcacgacgaggaguucugcgacaugcuccggcuguucgacuucugcaagcaggccauccgccggcugaaggccgaggcgcagaugagcauccagcucaucaacaaggccgugaacgcccugaucaacgaccagcugaucaugaagaaccaccuccgcgacaucaugggcauccccuacugcaacuacuccaaguacugcuaccugaaccacacgagcaccgggcggaccucccugccccgcugcugccucgucagcaacggcuccuaccugaacgagacccacuucagcgacgacaucgagcagcaggccgacaacaugaucacggagaugcugcagaaggaguaccuggaccggcagggcaagaccccgcucgggcugguggaccuguucguguucuccaccagcuucuaccucaucuccaucuuccugcaccuggucaagaucccgacccaccgccacaucgugggcaagcccugccccaagccccaccggcucaaccacauggggaucugcagcugcggccuguacaagcagccgggggugcccguccgcuggaagcggugaggacuagucccuguucccagagcccacuuuuuuuucuuuuuuugaaauaaaauagccugucuuucagaucucaaaggcucuuuucagagccaccaaaaaaaaaaaaaaaaaaaaaaaaaaaaaaaaaaaaaaaaaaaaaaaaaaaaaaaaaaaaaaaaaaaaaaaaaaaaaaaaaaaaaaaaaaaaaaaaaaaaa

SEQ ID NO: 40251 - RNA, 1748 nt, Artificial Sequence
  mRNA product Design a-1 (hSL-A100) comprising derived and/or modified sequence from LASV(G1180-SLE-2010;Clade IV)__AIT17168__GPCmut12 (opt1)
aggagagucccgcagucggcguccagcggcucugcuuguucgugugugugucguugcaggccuuauucaagcuuaccaugggccagaucgugaccuucuuccaggaggucccccacgugaucgaggaggugaugaacaucguccugaucgcccucagcauccuggccgugcugaaggggcucuacaacuucgcgaccugcggccugguggggcugcucacguuccugcugcucugcggccgcuccugcaccgccagccgguacaagggggucuacgagcugcagacccuggagcucaacauggagacccugaacaugugcaugccgcuguccugcacgaagaacaacagccaccacuacaucauggugggcaacgagaccggccucgagcugacccugaccaacacguccaucaucaaccacaaguucugcaaccucagcgacgcccacaagaagaaccuguacgaccacgcccugauguccaucaucagcaccuuccaccucuccauccccaacuucaaccaguacgaggccaugagcugcgacuucaacgggggcaagaucuccgugcaguacaaccugagccacuccuacgcgggggacgccgccaaccacugcggcaccgucgccaacggggugcugcagaccuucaugcgcauggcguggggcggcagcuacaucgcccucgacuccgggcacggcagcugggacugcaucaugacguccuaccaguaccugaucauccagaacaccaccugggaggaccacugccaguucagccggcccucccccaucggguaccugggccuccugagccagcgcacccgggacaucuacaucagccgccggcugcucggcacguucaccuggacccuguccgacagcgaggggaaggacaccccgggcggguacugccugacgcgcuggaugcucaucgaggccgagcugaagugcuucggcaacaccgccguggccaagugcaacgagaagcacgacgaggaguucugcgacaugcugcggcuguucgacuucugcaagcaggcgauccagcgccugaaggccgaggcccagauguccauccagcugaucaacaaggccgucaacgcccucaucaacgaccagcugaucaugaagaaccaccuccgggacaucauggggauccccuacugcaacuacagcaaguacugcuaccucaaccacaccaccacgggcaagaccucccugcccaagugcugccuggugagcaacggcuccuaccucaacgagacccacuucagcgacgacaucgagcagcaggcggacaacaugaucaccgagaugcugcagaaggaguacauggagcgccaggggaagacgccccugggccugguggaccucuucgucuucuccaccagcuucuaccugaucuccaucuuccugcaccucgugaagaucccgacccaccggcacaucgugggcaagagcugccccaagccccaccgccugaaccacauggggaucugcuccugcgggcuguacaagcagcccggcgucccggugaaguggaagcggugaggacuagucccuguucccagagcccacuuuuuuuucuuuuuuugaaauaaaauagccugucuuucagaucucaaaggcucuuuucagagccaccaaaaaaaaaaaaaaaaaaaaaaaaaaaaaaaaaaaaaaaaaaaaaaaaaaaaaaaaaaaaaaaaaaaaaaaaaaaaaaaaaaaaaaaaaaaaaaaaaaaaa

SEQ ID NO: 40252 - RNA, 1748 nt, Artificial Sequence
  mRNA product Design a-1 (hSL-A100) comprising derived and/or modified sequence from LASV(G1442-SLE-2011;Clade IV)__AIT17180__GPCmut12 (opt1)
aggagagucccgcagucggcguccagcggcucugcuuguucgugugugugucguugcaggccuuauucaagcuuaccaugggccagaucgugaccuucuuccaggaggucccccacgugaucgaggaggugaugaacaucguccugaucgcccucagcauccuggccgugcugaaggggcucuacaacguggcgaccugcggccugaucgggcuggucaccuuccuccugcugugcggccgcuccugcaccaccacccucuacaaggggguguacgagcugcagacgcuggagcucaacauggagacccugaacaugugcaugccgcugagcugcaccaagaacaacucccaccacuacauccgggugggcaacgagaccggccucgagcugacgcugaccaacaccagcaucaucaaccacaaguucugcaaccucuccgacgcccacaagaagaaccuguacgaccacgcccugaugagcaucaucuccaccuuccaccucagcauccccaacuucaaccaguacgaggccauguccugcgacuucaacgggggcaagaucagcguccaguacaaccugucccacagcuacgccggggacgcggccaaccacugcggcacgguggccaacggggugcugcagaccuucaugcgcauggccuggggcggcuccuacaucgcgcucgacagcgggcggggcaacugggacugcaucaugaccuccuaccaguaccugaucauccagaacaccacgugggacgaccacugccaguucagccgccccucccccaucggguaccugggccuccugagccagcggacccgcgacgucuacaucucccggcgccugcucggcaccuucaccuggacgcugagcgacagcgaggggaaggacaccccgggcggguacugccugacccgguggaugcucaucgaggccgagcugaagugcuucggcaacaccgccguggccaagugcaacgagaagcacgacgaggaguucugcgacaugcugcgccucuucgacuucugcaagcaggccauccagcggcugaaggcggaggcccagauguccauccagcugaucaacaaggccgugaacgcccucaucaacgaccagcugaucaugaagaaccaccuccgcgacaucauggggauccccuacugcaacuacagcaaguacugcuaccugaacaacacggccaccggcaagaccucccugcccaagugcugccugaucagcaacggcuccuaccucaacgagacccacuucagcgacgacaucgagcaggaggcggacaacaugaucacggagaugcugcagaaggaguacauggagcggcaggggaagacgccccugggccuggucgaccucuucguguucuccaccagcuucuaccugaucuccaucuuccugcaccucgugaagaucccgacccaccgccacaucgucggcaagagcugccccaagccccaccggcugaaccacauggggaucugcuccugcgggcuguacaagcagcccggcgugccggugcgcuggaagcggugaggacuagucccuguucccagagcccacuuuuuuuucuuuuuuugaaauaaaauagccugucuuucagaucucaaaggcucuuuucagagccaccaaaaaaaaaaaaaaaaaaaaaaaaaaaaaaaaaaaaaaaaaaaaaaaaaaaaaaaaaaaaaaaaaaaaaaaaaaaaaaaaaaaaaaaaaaaaaaaaaaaaa

SEQ ID NO: 40253 - RNA, 1748 nt, Artificial Sequence
  mRNA product Design a-1 (hSL-A100) comprising derived and/or modified sequence from LASV(G3010-SLE-2013;Clade IV)__AIT17344__GPCmut12 (opt1)
aggagagucccgcagucggcguccagcggcucugcuuguucgugugugugucguugcaggccuuauucaagcuuaccaugggccagaucgugaccuucuuccaggaggucccccacgugaucgaggaggugaugaacaucguccugaucgcccucagcauccuggccgugcugaaggggcucuacaacuucgcgaccugcggccugguggggcuggucacguuccuccugcugugcggccgcuccugcaccaccagccucuacaaggggguguacgagcugcagacccuggagcucaacauggagacgcugaacaugugcaugccgcuguccugcaccaagaacaacagccaccacuacaucauggugggcaacgagaccggccucgagcugacccugacgaacaccuccaucaucaaccacaaguucugcaaccucagcgacgcccacaagaagaaccuguacaaccacgcccugauguccaucaucagcaccuuccaccucuccauccccaacuucaaccaguacgaggccaugagcugcgacuucaacgggggcaagaucuccguccaguacaaccugagccacuccuacgccggggacgcggccagccacugcggcaccguggccaacggggugcugcagacguucaugcggauggccuggggcggcuccuacaucgcgcucgacagcggguacggcaagugggacugcaucaugaccuccuaccaguaccugaucauccagaacaccaccugggaggaccacugccaguucagccgccccucccccaucggguaccugggccuccugagccagcggacgcgcgacaucuacaucagccggcgccugcucggcaccuucaccuggacccuguccgacagcgaggggaaggacacgccgggcggguacugccugacccgguggaugcucaucgaggccgagcugaagugcuucggcaacaccgccgucgccaagugcaacgagaagcacgacgaggaguucugcgacaugcugcgccucuucgacuucugcaagcaggccauccagcggcugaagaccgaggcgcagauguccauccagcugaucaacaaggccgugaacgcccucaucaacgaccagcugaucaugaagaaccaccuccgcgacaucauggggauccccuacugcaacuacagcaaguacugcuaccugaaccacacgaccaccggcaagaccucccugcccaagugcugccuggugagcaacggcuccuaccucaacgagacgcacuucagcgacgacaucgagcagcaggccgacaacaugaucaccgagaugcugcagaaggaguacauggagcggcaggggaagacgccccugggccuggucgaccucuucguguucuccaccagcuucuaccugaucuccaucuuccugcaccucgugaagaucccgacccaccgccacaucgucggcaagagcugccccaagccccaccggcugaaccacauggggaucugcuccugcgggcuguacaagcagcccggcgugccggugcgcuggaagcggugaggacuagucccuguucccagagcccacuuuuuuuucuuuuuuugaaauaaaauagccugucuuucagaucucaaaggcucuuuucagagccaccaaaaaaaaaaaaaaaaaaaaaaaaaaaaaaaaaaaaaaaaaaaaaaaaaaaaaaaaaaaaaaaaaaaaaaaaaaaaaaaaaaaaaaaaaaaaaaaaaaaaa

SEQ ID NO: 40254 - RNA, 1748 nt, Artificial Sequence
  mRNA product Design a-1 (hSL-A100) comprising derived and/or modified sequence from LASV(G502-SLE-2009;Clade IV)__AIT17126__GPCmut12 (opt1)
aggagagucccgcagucggcguccagcggcucugcuuguucgugugugugucguugcaggccuuauucaagcuuaccaugggccagaucgugaccuucuuccaggaggucccccacgugaucgaggaggugaugaacaucguccugaucgcccucagcauccuggccgugcugaaggggcucuacaacuucgcgaccugcggccugguggggcugcucacguuccugcugcucugcggccgcuccugcaccaccgggcuguacaagggcgucuacgagcugcagacccucgagcugaacauggagacgcugaacaugugcaugccgcucagcugcaccaagaacaacucccaccacuacaucauggugggcaacgagaccgggcuggagcugacccucacgaacaccagcaucaucaaccacaaguucugcaaccuguccgacgcccacaagaagaaccuguacgaccacgcccucaugagcaucaucuccaccuuccaccugagcauccccaacuucaaccaguacgaggccauguccugcgacuucaacggcgggaagaucagcgugcaguacaaccugucccacagcuacgccggcgacgcggccgaccacugcgggaccgucgccaacggcgugcuccagacguucaugcggauggccuggggcggguccuacaucgcgcuggacagcggccgcgggcggugggacugcaucaugaccuccuaccaguaccugaucauccagaacaccaccugggaggaccacugccaguucagccgccccucccccaucggcuaccucggccugcugagccagcggacgcgcgacaucuacaucucccggcgccuccuggggaccuucaccuggacccugagcgacagcgagggcaaggacacgcccgggggcuacugccucacccgguggaugcugaucgaggccgagcugaagugcuucgggaacaccgccguggccaagugcaacgagaagcacgacgaggaguucugcgacaugcuccgccuguucgacuucugcaagcaggccauccagcggcugaaggcggaggcccagauguccauccagcucaucaacaaggccgucaacgcccugaucaacgaccagcuggugaugaagaaccaccuccgcgacaucaugggcauccccuacugcaacuacagccgguacugcuaccugaaccacaccacgaccggccgcaccucccugcccaagugcugccucgugagcaacggguccuaccugaacgagacccacuucagcgacgacaucgagcagcaggccgacaacaugaucacggagaugcugcagaaggaguacauggagcggcagggcaagaccccgcuggggcucgucgaccuguucguguucuccaccagcuucuaccugaucuccaucuuccuccaccuggugaagaucccgacccaccgccacaucgucggcaagagcugccccaagccccaccggcugaaccacauggggaucugcuccugcggccucuacaagcagcccggcgugccggugaaguggaagcgcugaggacuagucccuguucccagagcccacuuuuuuuucuuuuuuugaaauaaaauagccugucuuucagaucucaaaggcucuuuucagagccaccaaaaaaaaaaaaaaaaaaaaaaaaaaaaaaaaaaaaaaaaaaaaaaaaaaaaaaaaaaaaaaaaaaaaaaaaaaaaaaaaaaaaaaaaaaaaaaaaaaaaa

SEQ ID NO: 40255 - RNA, 1748 nt, Artificial Sequence
  mRNA product Design a-1 (hSL-A100) comprising derived and/or modified sequence from LASV(G733-SLE-2010;Clade IV)__AIT17154__GPCmut12 (opt1)
aggagagucccgcagucggcguccagcggcucugcuuguucgugugugugucguugcaggccuuauucaagcuuaccaugggccagaucgugaccuucuuccaggaggucccccacgugaucgaggaggugaugaacaucguccugaucgcccucagcauccuggccgugcugaaggggcucuacaacuucgcgaccugcggcaucguggggcuggucuccuuccugcuccugugcggccgcagcugcacgaccucccuguacaaggggguguacgagcuccagacccuggagcugaacauggagacccucaacaugugcaugccgcugagcugcacgaagaacaacucccaccacuacaucauggugggcaacgagaccggccuggagcucacccugaccaacacgagcaucaucaaccacaaguucugcaaccuguccgacgcccacaagaagaaccucuacgaccacgcccugaugagcaucaucuccaccuuccaccugagcauccccaacuucaaccaguacgaggccauguccugcgacuucaacgggggcaagaucagcguccaguacaaccucucccacagcuacgccggggacgcggccaaccacugcggcaccaucgccaacggggugcugcagaccuucaugcggauggccuggggcggcuccuacaucgcgcuggacagcgggcgcgaccggugggacugcaucaugacguccuaccaguaccucaucauccagaacaccaccugggaggaccacugccaguucagccgccccucccccaucggcuaccuggggcugcucagccagcggacccgcgacaucuacaucagccggcgccugcugggcacguucaccuggacccucuccgacagcgagggcaaggacacccccgggggcuacugccugacgcgguggaugcugaucgaggccgagcucaagugcuucgggaacaccgccguggccaagugcaacgagaagcacgacgaggaguucugcgacaugcugcgccuguucgacuucugcaagcaggccauccagcggcucaaggcggaggcccagauguccauccagcugaucaacaaggccgucaacgcccugaucaacgaccagcucaucaugaagaaccaccuccgcgacaucaugggcaucccguacugcaacuacagcaaguacugcuaccugaaccacaccaccacggggaagaccucccugcccaagugcugccuggugagcaacggcuccuaccugaacgagacccacuucagcgacgacaucgagcagcaggccgacaacaugaucaccgagaugcuccagaaggaguacauggagcggcagggcaagacgccccuggggcugguggaccuguucgucuucuccaccagcuucuaccucaucuccaucuuccugcaccuggugaagaucccgacccaccgccacguggucggcaagagcugccccaagccccaccggcucaaccacauggggaucugcuccugcggccuguacgggcagcccggcgugccggugaaguggaagcgcugaggacuagucccuguucccagagcccacuuuuuuuucuuuuuuugaaauaaaauagccugucuuucagaucucaaaggcucuuuucagagccaccaaaaaaaaaaaaaaaaaaaaaaaaaaaaaaaaaaaaaaaaaaaaaaaaaaaaaaaaaaaaaaaaaaaaaaaaaaaaaaaaaaaaaaaaaaaaaaaaaaaaa

SEQ ID NO: 40256 - RNA, 1748 nt, Artificial Sequence
  mRNA product Design a-1 (hSL-A100) comprising derived and/or modified sequence from MOPV/LASV reassortant(IGS-1;Clade IV)__AFY05576__GPCmut12 (opt1)
aggagagucccgcagucggcguccagcggcucugcuuguucgugugugugucguugcaggccuuauucaagcuuaccaugggccagaucgugaccuucuuccaggaggucccccacgugaucgaggaggugaugaacaucguccugaucgcccucagcgugcuggccgugcugaaggggcucuacaacuucgcgaccugcggccuggucgggcuggugaccuuccuccugcugugcggccgcuccugcaccaccagccucuacaaggggguguacgagcugcagacccuggagcucaacauggagacgcugaacaugugcaugccgcuguccugcaccaagaacaacagccaccacuacaucauggucggcaacgagaccggccucgagcugacccugacgaacaccuccaucaucaaccacaaguucugcaaccucagcgacgcccacaagaagaaccuguacgaccacgcccugauguccaucaucagcaccuuccaccucuccauccccaacuucaaccaguacgaggccaugagcugcgacuucaacgggggcaagaucuccgugcaguacaaccugagccacuccuacgccggggacgcggccaaccacugcggcaccguggccaacgggguccugcagacguucaugcggauggccuggggcggcagcuacaucgcgcucgacuccgggcgcggcaacugggacugcaucaugaccagcuaccaguaccugaucauccagaacaccaccugggaggaccacugccaguucucccggcccagccccaucggguaccugggccuccugucccagcgcacgcgggacaucuacaucagccgccggcugcucggcaccuucaccuggacccugagcgacuccgagggggaggacacgccgggcggguacugccugacccgcuggaugcucaucgaggccgagcugaagugcuucggcaacaccgccguggccaagugcaacgagaagcacgacgaggaguucugcgacaugcugcggcuguucgacuucugcaagcaggccauccagcgccugaaggcggaggcccagaugagcauccagcugaucaacaaggccgugaacgcccucaucaacgaccagcugaucaugaagaaccaccuccgggacaucauggggauccccuacugcaacuacuccaaguacugcuaccucaaccacaccacgaccggccgcaccagccugcccaagugcugccuggucuccaacggcagcuaccucaacgagacccacuucuccgacgacaucgagcagcaggccgacaacaugaucacggagaugcugcagaaggaguacauggagcggcaggggaagacgccccugggccugguggaccucuucguguucagcaccuccuucuaccugaucagcaucuuccugcaccucgucaagaucccgacccaccgccacaucguggggaaguccugccccaagccccaccggcugaaccacaugggcaucugcagcugcgggcuguacaagcagcccggcgugccggucaaguggaagcgcugaggacuagucccuguucccagagcccacuuuuuuuucuuuuuuugaaauaaaauagccugucuuucagaucucaaaggcucuuuucagagccaccaaaaaaaaaaaaaaaaaaaaaaaaaaaaaaaaaaaaaaaaaaaaaaaaaaaaaaaaaaaaaaaaaaaaaaaaaaaaaaaaaaaaaaaaaaaaaaaaaaaaa

SEQ ID NO: 40257 - RNA, 1748 nt, Artificial Sequence
  mRNA product Design a-1 (hSL-A100) comprising derived and/or modified sequence from LASV(LM765-SLE-2012;Clade IV)__AIT17814__GPCmut12 (opt1)
aggagagucccgcagucggcguccagcggcucugcuuguucgugugugugucguugcaggccuuauucaagcuuaccaugggccagaucgugaccuucuuccaggaggucccccacgugaucgaggaggugaugaacaucguccugaucgcccucagcauccuggccgugcugaaggggcucuacaacuucgcgaccugcggccugguggggcuggucacguuccuccugcugugcggccgcuccugcaccaccagccucuacaaggggguguacgagcugcagacccuggagcucaacauggagacgcugaacaugugcaugccgcuguccugcaccaagaacaacagccaccacuacaucauggugggcaacgagaccggccucgagcugacccugacgaacaccuccaucaucgaccacaaguucugcaaccucagcgacgcccaccggaagaaccuguacgaccacgcccugauguccaucaucagcaccuuccaccucuccauccccaacuucaaccaguacgaggccaugagcugcgacuucaacgggggcaagaucuccguccaguacaaccugagccacuccuacgccaaggacgcggccgaccacugcgggaccguggccaacggcgugcugcagacguucaugcgcauggccuggggcgggagcuacaucgcgcucgacuccggccgggggcgcugggacugcaucaugaccagcuaccaguaccugaucauccagaacaccaccugggaggaccacugccaguucucccggcccagccccaucggcuaccuggggcuccugucccagcgcacgcgggacaucuacaucagccgccggcugcucggcaccuucaccuggacccugagcgacuccgagggcaaggacacgcccgggggcuacugccugacccgcuggaugcucaucgaggccgagcugaagugcuucgggaacaccgccgucgccaagugcaacgagaagcacgacgaggaguucugcgacaugcugcggcuguucgacuucugcaagcaggccauccagcgccugaaggcggaggcccagaugagcauccagcugaucaacaaggccgugaacgcccucaucaacgaccagcugaucaugaagaaccaccuccgggacaucaugggcauccccuacugcaacuacuccaaguacugcuaccucaaccacaccacgaccgggaagaccagccugcccaagugcugccugguguccaacggcagcuaccucaacgagacccacuucuccgacgacaucgagcagcaggccgacaacaugaucacggagaugcugcagaaggaguacauggagcgccagggcaagaccccgcuggggcuggucgaccucuucguguucagcaccuccuucuaccugaucagcaucuuccugcaccucgugaagaucccgacccaccggcacaucgucggcaagcccugccccaagccccaccgccugaaccacauggggaucugcuccugcggccuguacaagcagccgggggugcccgugaaguggaagcggugaggacuagucccuguucccagagcccacuuuuuuuucuuuuuuugaaauaaaauagccugucuuucagaucucaaaggcucuuuucagagccaccaaaaaaaaaaaaaaaaaaaaaaaaaaaaaaaaaaaaaaaaaaaaaaaaaaaaaaaaaaaaaaaaaaaaaaaaaaaaaaaaaaaaaaaaaaaaaaaaaaaaa

SEQ ID NO: 40258 - RNA, 1748 nt, Artificial Sequence
  mRNA product Design a-1 (hSL-A100) comprising derived and/or modified sequence from LASV(LM776-SLE-2012;Clade IV)__AIT17824__GPCmut12 (opt1)
aggagagucccgcagucggcguccagcggcucugcuuguucgugugugugucguugcaggccuuauucaagcuuaccaugggccagaucgugaccuucuuccaggaggucccccacgugaucgaggaggugaugaacaucguccugaucgcccucagcauccuggccgugcugaaggggcucuacaacuucgcgaccugcggccugguggggcuggucaccuuccuccugcugugcggccgcuccugcaccaccagcguguacaaggggguguacgagcuccagacccuggagcugaacauggagacgcucaacaugugcaugccgcuguccugcaccaagaacaacagccaccacuacaucauggucggcaacgagaccggccuggagcucacccugacgaacaccuccaucaucaaccacaaguucugcaaccugagcgacgcccacaagaagaaccucuacgaccacgcccugauguccaucaucagcaccuuccaccuguccauccccaacuucaaccaguacgaggccaugagcugcgacuucaacgggggcaagaucuccgugcaguacaaccucagccacuccuacgccggggacgcggccaaccacugcggcaccguggccaacgggguccugcagacguucaugcggauggccuggggcggcagcuacaucgcgcuggacuccgggcacggcaagugggacugcaucaugaccagcuaccaguaccucaucauccagaacaccaccugggaggaccacugccaguucucccgccccagccccaucggguaccugggccugcucucccagcggacgcgcgacaucuacaucagccggcgccugcugggcaccuucaccuggacccucagcgacuccgaggggaaggacacgccgggcggguacugccugacccgguggaugcugaucgaggccgagcucaagugcuucggcaacaccgccguggccaagugcaacgagaagcacgacgaggaguucugcgacaugcugcgccuguucgacuucugcaagcaggccauccagcggcucaaggcggaggcccagaugagcauccagcugaucaacaaggccgugaacgcccugaucaacgaccagcucaucaugaagaaccaccuccgcgacaucauggggauccccuacugcaacuacuccaaguacugcuaccugaaccacaccacgaccggcaagaccagccugcccaagugcugccuggucuccaacggcagcuaccugaacgagacccacuucuccgacgacaucgagcagcaggccgacaacaugaucacggagaugcuccagaaggaguacauggagcggcaggggaagacgccccugggccugguggaccuguucguguucagcaccuccuucuaccucaucagcaucuuccugcaccuggucaagaucccgacccaccgccacaucguggggaaguccugccccaagccccaccggcucaaccacaugggcaucugcagcugcgggcuguacaagcagcccggcgugccgguccgcuggaagcggugaggacuagucccuguucccagagcccacuuuuuuuucuuuuuuugaaauaaaauagccugucuuucagaucucaaaggcucuuuucagagccaccaaaaaaaaaaaaaaaaaaaaaaaaaaaaaaaaaaaaaaaaaaaaaaaaaaaaaaaaaaaaaaaaaaaaaaaaaaaaaaaaaaaaaaaaaaaaaaaaaaaaa

SEQ ID NO: 40259 - RNA, 1748 nt, Artificial Sequence
  mRNA product Design a-1 (hSL-A100) comprising derived and/or modified sequence from LASV(Mad39;Clade IV)__ANH09722__GPCmut12 (opt1)
aggagagucccgcagucggcguccagcggcucugcuuguucgugugugugucguugcaggccuuauucaagcuuaccaugggccagaucgugaccuucuuccaggaggucccccacgugaucgaggaggugaugaacaucguccugaucgcccucagcauccuggccgugcugaaggggcucuacaacguggcgaccugcggccugaucgggcuggucacguuccuccugcugugcggccgcuccugcaccaccacccucuacaaggggguguacgagcugcaggcccuggagcucaacauggagacgcugaacaugugcaugccgcugagcugcaccaagaacaacucccaccacuacauccgggugggcaacgagaccggccucgagcugacccugacgaacaccagccucaucaaccacaaguucugcaaccuguccgacgcccacaagaagaaccuguacgaccacgcccucaugagcaucaucuccaccuuccaccugagcauccccaacuucaaccaguacgaggccauguccugcgacuucaacgacgggaagaucagcguccaguacaaccugucccacaccuacgcgggcgacacggccaaccacugcgggaccguggccaacggcgugcuccagaccuucaugcgcauggccuggggcgggagcuacaucgcgcuggacuccggccgcgggggcugggacugcaucaugaccagcuaccaguaccugaucauccagaacacgaccugggaggaccacugccaguucucccggcccagccccaucggguaccucggccugcugucccagcggacccgcgacaucuacaucagccggcgccuccugggcaccuucacguggacccuguccgacagcgaggggaaggacaccccgggcggguacugccucacccgguggaugcugaucgaggccgagcugaagugcuucggcaacacggccgucgccaagugcaacgagaagcacgacgaggaguucugcgacaugcuccgccuguucgacuucugcaagcaggccauccagcggcugaaggcggaggcccagaugagcauccagcucaucaacaaggccgugaacgcccugaucaacgaccagcugaucaugaagaaccaccuccgcgacaucauggggauccccuacugcaacuacuccaaguacugcuaccugaaccacaccgugaccggcaagaccagccugcccaagugcugccucgucuccaacggcagcuaccugaacgagacgcacuucuccgacgacaucgagcagcaggccgacaacaugaucaccgagaugcugcagaaggaguacauggagcggcaggggaagacgccccugggccucguggaccuguucguguucagcaccuccuucuaccugaucagcaucuuccuccaccuggucaagaucccgacccaccgccacgugguggggaagcccugccccaagccccaccggcugaaccacaugggcaucugcuccugcggguucuacaagcagccgggcguccccgugcgcuggaagcggugaggacuagucccuguucccagagcccacuuuuuuuucuuuuuuugaaauaaaauagccugucuuucagaucucaaaggcucuuuucagagccaccaaaaaaaaaaaaaaaaaaaaaaaaaaaaaaaaaaaaaaaaaaaaaaaaaaaaaaaaaaaaaaaaaaaaaaaaaaaaaaaaaaaaaaaaaaaaaaaaaaaaa

SEQ ID NO: 40260 - RNA, 1748 nt, Artificial Sequence
  mRNA product Design a-1 (hSL-A100) comprising derived and/or modified sequence from LASV(Z0947-SLE-2011;Clade IV)__AIT17840__GPCmut12 (opt1)
aggagagucccgcagucggcguccagcggcucugcuuguucgugugugugucguugcaggccuuauucaagcuuaccaugggccagaucgugaccuucuuccaggaggucccccacgugaucgaggaggugaugaacaucguccugaucgcccucagcauccuggccgugcugaaggggcucuacaacuucgcgaccugcggccugguggggcuggucacguuccuccugcugugcggccgcuccugcaccaucagccucuacaaggggguguacgagcugcagacccuggagcucaacauggagacccugaacaugugcaugccgcuguccugcacgaagaacaacagccaccacuacaucauggugggcaacgagaccggccucgagcugacccugaccaacacguccaucaucaaccacaaguucugcaaccucagcgacgcccacaagaagaaccuguacgaccacgcccugauguccaucaucagcaccuuccaccucuccauccccaacuucaaccaguacgaggccaugagcugcgacuucaacgggggcaagaucuccguccaguacaaccugagccacuccuacgccggggacgcggccaaccacugcggcaccguggccaacggggugcugcagaccuucaugcggauggccuggggcggcagcuacaucgcgcucgacuccgggcgcgaccggugggacugcaucaugacgagcuaccaguaccugaucauccagaacaccaccugggaggaccacugccaguucucccgccccagccccaucggcuaccuggggcuccugucccagcggacccgcgacaucuacaucagccggcgccugcucggcacguucaccuggacccugagcgacuccgagggcaaggacacccccgggggcuacugccugacgcgguggaugcucaucgaggccgagcugaagugcuucgggaacaccgccgucgccaagugcaacgagaagcacgacgaggaguucugcgacaugcugcgccucuucgacuucugcaagcaggccauccagcggcugaaggcggaggcccagaugagcauccagcugaucaacaaggccgugaacgcccucaucaacgaccagcugaucaugaagaaccaccuccgcgacaucaugggcaucccguacugcaacuacuccaaguacugcuaccugaaccacaccaccacggggaagaccagccugcccaagugcugccugguguccaacggcagcuaccucaacgagacccacuucuccgacgacaucgagcagcaggccgacaacaugaucaccgagaugcugcagaaggaguacauggagcggcagggcaagacgccccuggggcuggucgaccucuucguguucagcaccuccuucuaccugaucagcaucuuccugcaccucgugaagaucccgacccaccgccacaucgucggcaagcccugccccaagccccaccggcugaaccacauggggaucugcuccugcggccuguacaagcagccgggggugcccgugaaguggaagcgcugaggacuagucccuguucccagagcccacuuuuuuuucuuuuuuugaaauaaaauagccugucuuucagaucucaaaggcucuuuucagagccaccaaaaaaaaaaaaaaaaaaaaaaaaaaaaaaaaaaaaaaaaaaaaaaaaaaaaaaaaaaaaaaaaaaaaaaaaaaaaaaaaaaaaaaaaaaaaaaaaaaaaa

SEQ ID NO: 40261 - RNA, 1748 nt, Artificial Sequence
  mRNA product Design a-1 (hSL-A100) comprising derived and/or modified sequence from LASV(Josiah;Clade IV)__NP_694870__GPCmut12 (opt4)
aggagagucccgcagucggcguccagcggcucugcuuguucgugugugugucguugcaggccuuauucaagcuuaccaugggccagaucgugaccuucuuccaggaggugccccacgugaucgaggaggugaugaacaucgugcugaucgcccugagcgugcuggccgugcugaagggccuguacaacuucgccaccugcggccuggugggccuggugaccuuccugcugcugugcggcagaagcugcaccaccagccuguacaagggcguguacgagcugcagacccuggagcugaacauggagacccugaacaugugcaugccccugagcugcaccaagaacaacagccaccacuacaucauggugggcaacgagaccggccuggagcugacccugaccaacaccagcaucaucaaccacaaguucugcaaccugagcgacgcccacaagaagaaccuguacgaccacgcccugaugagcaucaucagcaccuuccaccugagcauccccaacuucaaccaguacgaggccaugagcugcgacuucaacggcggcaagaucagcgugcaguacaaccugagccacagcuacgccggcgacgccgccaaccacugcggcaccguggccaacggcgugcugcagaccuucaugagaauggccuggggcggcagcuacaucgcccuggacagcggcagaggcaacugggacugcaucaugaccagcuaccaguaccugaucauccagaacaccaccugggaggaccacugccaguucagcagacccagccccaucggcuaccugggccugcugagccagagaaccagagacaucuacaucagcagaagacugcugggcaccuucaccuggacccugagcgacagcgagggcaaggacacccccggcggcuacugccugaccagauggaugcugaucgaggccgagcugaagugcuucggcaacaccgccguggccaagugcaacgagaagcacgacgaggaguucugcgacaugcugagacuguucgacuucugcaagcaggccauccagagacugaaggccgaggcccagaugagcauccagcugaucaacaaggccgugaacgcccugaucaacgaccagcugaucaugaagaaccaccugagagacaucaugggcauccccuacugcaacuacagcaaguacugcuaccugaaccacaccaccaccggcagaaccagccugcccaagugcugccuggugagcaacggcagcuaccugaacgagacccacuucagcgacgacaucgagcagcaggccgacaacaugaucaccgagaugcugcagaaggaguacauggagagacagggcaagaccccccugggccugguggaccuguucguguucagcaccagcuucuaccugaucagcaucuuccugcaccuggugaagauccccacccacagacacaucgugggcaagagcugccccaagccccacagacugaaccacaugggcaucugcagcugcggccuguacaagcagcccggcgugcccgugaaguggaagagaugaggacuagucccuguucccagagcccacuuuuuuuucuuuuuuugaaauaaaauagccugucuuucagaucucaaaggcucuuuucagagccaccaaaaaaaaaaaaaaaaaaaaaaaaaaaaaaaaaaaaaaaaaaaaaaaaaaaaaaaaaaaaaaaaaaaaaaaaaaaaaaaaaaaaaaaaaaaaaaaaaaaaa

SEQ ID NO: 40262 - RNA, 1745 nt, Artificial Sequence
  mRNA product Design a-1 (hSL-A100) comprising derived and/or modified sequence from LASV(LP;Clade I)__AAF86701__GPCmut12 (opt4)
aggagagucccgcagucggcguccagcggcucugcuuguucgugugugugucguugcaggccuuauucaagcuuaccaugggccagaucaucaccuucuuccaggaggugccccacgugaucgaggaggugaugaacaucgugcugaucgcccugagccugcuggccauccugaagggccuguacaacaucgccaccugcggcaucaucggccugguggccuuccuguuccugugcggcaagagcugcagccugacccugaagggcggcuacgagcugcagacccuggagcugaacauggagacccugaacaugugcaugccccugagcugcaccaagaacagcagccaccacuacaucagagugggcaacgagaccggccuggagcugacccugaccaacaccagcaucaucaaccacaaguucugcaaccugagcgacgcccacaagaagaaccuguacgaccacgcccugaugagcaucaucagcaccuuccaccugagcauccccaacuucaaccaguacgaggccaugagcugcgacuucaacggcggcaagaucagcgugcaguacaaccugagccacagcuacgccggcgacgccgccgagcacugcggcaccguggccaacggcgugcugcagaccuucaugagaauggccuggggcggcagauacaucgcccuggacagcggcaagggcaacugggacugcaucaugaccagcuaccaguaccugaucauccagaacaccaccugggaggaccacugccaguucagcagacccagccccaucggcuaccugggccugcugagccagagaaccagagacaucuacaucagcagaagacugcugggcaccuucaccuggacccugagcgacagcgagggcaacgagacccccggcggcuacugccugaccagauggaugcugaucgaggccgagcugaagugcuucggcaacaccgccguggccaagugcaacgagaagcacgacgaggaguucugcgacaugcugagacuguucgacuucugcaagcaggccaucagaagacugaaggccgaggcccagaugagcauccagcugaucaacaaggccgugaacgcccugaucaacgaccagcugaucaugaagaaccaccugagagacaucaugggcauccccuacugcaacuacagcaaguacugcuaccugaaccacaccagcagcggcagaaccagccugcccaagugcugccugaucagcaacggcagcuaccugaacgagacccaguucagcgacgacaucgagcagcaggccgacaacaugaucaccgagaugcugcagaaggaguacaucgagagacagggcaagaccccccugggccugguggacaucuucaucuucagcaccagcuucuaccugaucagcaucuuccugcaccugaucaagauccccacccacagacacaucgugggcaagcccugccccaagccccacagacugaaccacaugggcgugugcagcugcggccuguacaagcaccccggcgugcccaccaaguggaagagaugaggacuagucccuguucccagagcccacuuuuuuuucuuuuuuugaaauaaaauagccugucuuucagaucucaaaggcucuuuucagagccaccaaaaaaaaaaaaaaaaaaaaaaaaaaaaaaaaaaaaaaaaaaaaaaaaaaaaaaaaaaaaaaaaaaaaaaaaaaaaaaaaaaaaaaaaaaaaaaaaaaaaa

SEQ ID NO: 40263 - RNA, 1745 nt, Artificial Sequence
  mRNA product Design a-1 (hSL-A100) comprising derived and/or modified sequence from LASV(803213;Clade II)__AAF86703__GPCmut12 (opt4)
aggagagucccgcagucggcguccagcggcucugcuuguucgugugugugucguugcaggccuuauucaagcuuaccaugggccagaucaucaccuucuuccaggaggugccccacgugaucgaggaggugaugaacaucgugcugaucgcccugagccugcuggccauccugaagggcaucuacaacguggccaccugcggccuguucggccugaucagcuuccugcugcugugcggcagaagcugcagcgugaccuacaagggcguguacgagcugcagacccuggagcugaacauggccaaccugaacaugugcaugccccugagcugcaccaagaacaacagccaccacuacaucauggugggcaacgagaccggccuggagcugacccugaccaacaccagcaucaucaaccacaaguucugcaaccugagcgacgcccacaagaagaaccuguacgaccacgcccugaugagcaucaucagcaccuuccaccugagcauccccaacuucaaccaguacgaggccaugagcugcgacuucaacggcggcaagaucagcgugcaguacaaccugagccacagcuucgccguggacgccgccaaccacugcggcaccaucgccaacggcgugcugcagaccuucaugagaauggccuggggcggcagcuacaucgcccuggacagcggcaagggcaacugggacugcaucaugaccagcuaccaguaccugaucauccagaacaccaccugggaggaccacugccaguucagcagacccagccccaucggcuaccugggccugcugagccagagaaccagagacaucuacaucagcagaagacugcugggcaccuucaccuggacccugagcgacagcgagggcaacgaggcccccggcggcuacugccugaccagauggaugcugaucgaggccgagcugaagugcuucggcaacaccgccguggccaagugcaacgagaagcacgacgaggaguucugcgacaugcugagacuguucgacuucugcaagcaggccaucaagagacugaagaccgaggcccagaugagcauccagcugaucaacaaggccgugaacgcccugaucaacgaccagcugaucaugaagaaccaccugagagacaucaugggcauccccuacugcaacuacagcagauacugcuaccugaaccacaccgugaccggcaagaccagccugcccagaugcugccuggugagcaacggcagcuaccugaacgagacccacuucagcgacgacaucgagcagcaggccgacaacaugaucaccgagaugcugcagaaggaguacauggacagacagggcaagaccccccugggccugguggaccuguucguguucagcaccagcuucuaccugaucagcaucuuccugcaccuggugaagauccccacccacagacacaucgugggcaagcccugccccaagccccacagacugaaccacaugggcaucugcagcugcggccuguacaagcaccccggcgugcccgugaaguggaagagaugaggacuagucccuguucccagagcccacuuuuuuuucuuuuuuugaaauaaaauagccugucuuucagaucucaaaggcucuuuucagagccaccaaaaaaaaaaaaaaaaaaaaaaaaaaaaaaaaaaaaaaaaaaaaaaaaaaaaaaaaaaaaaaaaaaaaaaaaaaaaaaaaaaaaaaaaaaaaaaaaaaaaa

SEQ ID NO: 40264 - RNA, 1745 nt, Artificial Sequence
  mRNA product Design a-1 (hSL-A100) comprising derived and/or modified sequence from LASV(GA391;Clade III)__CAA36645__GPCmut12 (opt4)
aggagagucccgcagucggcguccagcggcucugcuuguucgugugugugucguugcaggccuuauucaagcuuaccaugggccagaucgugaccuucuuccaggaggugccccacgugaucgaggaggugaugaacaucgugcugaucgcccugagcauccuggccauccugaagggccuguacaacguggccaccugcggccugaucggccuggugaccuuccugcugcugagcggcagaagcugcagccugaucuacaagggcaccuacgagcugcagacccuggagcugaacauggagacccugaacaugugcaugccccugagcugcaccaagaacaacagccaccacuacaucagagugggcaacgagaccggccuggagcugacccugaccaacaccagcauccugaaccacaaguucugcaaccugagcgacgcccacaagagaaaccuguacgaccacagccugaugagcaucaucagcaccuuccaccugagcauccccaacuucaaccaguacgaggccaugagcugcgacuucaacggcggcaagaucaccgugcaguacaaccugagccacagcuucgccguggacgccgccggccacugcggcacccuggccaacggcgugcugcagaccuucaugagaauggccuggggcggcagcuacaucgcccuggacagcggcagaggcaacugggacugcaucaugaccagcuaccaguaccugaucauccagaacaccaccugggacgaccacugccaguucagcagacccagccccaucggcuaccugggccugcugagccagagaaccagagacaucuacaucagcagaagacugcugggcaccuucaccuggacccugagcgacagcgagggcaacgagacccccggcggcuacugccugaccagauggaugcugaucgaggccgagcugaagugcuucggcaacaccgccguggccaagugcaacgagaagcacgacgaggaguucugcgacaugcugagacuguucgacuucugcaagcaggccaucagaagacugaagaccgaggcccagaugagcauccagcugaucaacaaggccgugaacgcccugaucaacgaccagcugaucaugaagaaccaccugagagacaucaugggcauccccuacugcaacuacagcagauacugcuaccugaaccacaccagcaccggcaagaccagccugcccagaugcugccugaucagcaacggcagcuaccugaacgagaccaaguucagcgacgacaucgagcagcaggccgacaacaugaucaccgagaugcugcagaaggaguacaucgacagacagggcaagaccccccugggccugguggaccuguucguguucagcaccagcuucuaccugaucagcaucuuccugcaccuggugaagauccccacccacagacacaucgugggcaagcccugccccaagccccacagacugaaccacaugggcaucugcagcugcggccuguacaagcagcccggcgugcccgugagauggaagagaugaggacuagucccuguucccagagcccacuuuuuuuucuuuuuuugaaauaaaauagccugucuuucagaucucaaaggcucuuuucagagccaccaaaaaaaaaaaaaaaaaaaaaaaaaaaaaaaaaaaaaaaaaaaaaaaaaaaaaaaaaaaaaaaaaaaaaaaaaaaaaaaaaaaaaaaaaaaaaaaaaaaaa

SEQ ID NO: 40265 - RNA, 1748 nt, Artificial Sequence
  mRNA product Design a-1 (hSL-A100) comprising derived and/or modified sequence from LASV(AV;Clade V)__CCA30314__GPCmut12 (opt4)
aggagagucccgcagucggcguccagcggcucugcuuguucgugugugugucguugcaggccuuauucaagcuuaccaugggccagaucgugaccuucuuccaggaggugccccacgugaucgaggaggugaugaacaucgugcugaucgcccugagcauccuggccgugcugaagggccuguacaacaucgccaccugcggccugaucggccugaucaccuuccugcugcugugcggcagaagcugcagcagcaaccuguacaagggcguguacgagcugcagagccuggaccugaacauggagacccugaacaugugcaugccccugagcugcaccaagaacaacagccaccacuacaucagagugggcaacgacaccggccuggagcugacccugaccaacaccagcauccugaaccacaaguucugcaaccugagcgacgcccacaagaaggaccuguacgaccacgcccugaugagcaucaucagcaccuuccaccugagcauccccaacuucaaccaguacgaggccaugagcugcgacuucaacggcggcaagaucagcgugcaguacaaccugagccacagcuacgccaucgacgccgccaaccacugcggcaccguggccaacggcauccugcagaccuucaugagaauggccuggggcggcagcuacaucgcccuggacagcggcagaggcaacugggacugcaucaugaccagcuaccaguaccugaucauccagaacaccaccugggagaaccacugccaguucagcagacccagccccaucggcuaccugggccugcugagccagagaaccagagacaucuacaucagcagaagacugcugggcaccuucaccuggacccugagcgacagcgagggcaacgccacccccggcggcuacugccugaccagauggaugcugaucgaggccgagcugaagugcuucggcaacaccgccguggccaagugcaacgagaagcacgacgaggaguucugcgacaugcugagacuguucgacuucugcaagcaggccaucagcagacugaagagcgaggcccagaugagcauccagcugaucaacaaggccgugaacgcccugaucaacgaccagcugaucaugaagaaccaccugagagacaucaugggcauccccuacugcaacuacagcaaguacugcuaccugaaccacaccaucaccggcaagaccagccugcccaagugcugccuggugagcaacggcagcuaccugaacgagacccacuucagcgacgacaucgagcagcaggccgacaacaugaucaccgagaugcugcagaaggaguacauggagagacagggcaagaccccccugggccugguggaccuguucguguucagcaccagcuucuaccugaucagcaucuuccugagacuggugaagauccccacccacagacacaucgugggcaagcccugccccaagccccacagacugaaccacaugggcaucugcagcugcggccuguacaagcagcccggcgugcccgugagauggaagagaugaggacuagucccuguucccagagcccacuuuuuuuucuuuuuuugaaauaaaauagccugucuuucagaucucaaaggcucuuuucagagccaccaaaaaaaaaaaaaaaaaaaaaaaaaaaaaaaaaaaaaaaaaaaaaaaaaaaaaaaaaaaaaaaaaaaaaaaaaaaaaaaaaaaaaaaaaaaaaaaaaaaaa

SEQ ID NO: 40266 - RNA, 1745 nt, Artificial Sequence
  mRNA product Design a-1 (hSL-A100) comprising derived and/or modified sequence from LASV(Togo/2016/7082;Clade VI)__AMR44577__GPCmut12 (opt4)
aggagagucccgcagucggcguccagcggcucugcuuguucgugugugugucguugcaggccuuauucaagcuuaccaugggccagaucaucaccuucuuccaggaggugccccacgugaucgaggaggugaugaacaucgugcugaucgcccugagccugcuggccauccugaagggcguguacaacguggccaccugcggcaucaucggccuggugaccuuccuguuccugugcggcagaagcugcagccugaucuacaagggcagcuacgagcugcagacccuggagcugaacauggagacccugaacaugugcaugccccugagcugcaccaagaacagcagccaccacuacaucagagugggcaacgagaccggccuggagcugacccugaccaacaccagcaucaucaaccacaaguucugcaaccugagcgacgcccacaagagaaaccuguacgaccacgcccugaugagcauccugagcaccuuccaccugagcauccccaacuucaaccaguacgaggccaugagcugcgacuucaacggcggcaagaucagcgugcaguacaaccugagccacgccuacgccguggacgccgccgagcacugcggcaccguggccaacggcgugcugcagaccuucaugagaauggccuggggcggcagcuacaucgcccuggacagcggcagaggcaacugggacugcaucaugaccagcuaccaguaccugaucauccagaacaccaccugggaggaccacugccaguucagcagacccagccccaucggcuaccugggccugcugagccagagaaccagagacaucuacaucagcagaagacugcugggcaccuucaccuggacccugagcgacagcgagggcaacgagacccccggcggcuacugccugaccagauggaugcugaucgaggccgagcugaagugcuucggcaacaccgccguggccaagugcaacgagaagcacgacgaggaguucugcgacaugcugagacuguucgacuucugcaagcaggccauccagagacugaagagcgaggcccagaugagcauccagcugaucaacaaggccgugaacgcccugaucaacgaccagcugaucaugaagaaccaccugagagacaugaugggcauccccuacugcaacuacagcaaguacugcuaccugaaccacaccagcagcggcagaaccagccugcccaagugcugccuggugagcaacggcagcuaccugaacgagacccacuucagcgacgacaucgagcagcaggccgacaacaugaucaccgagaugcugcagaaggaguacaucgacagacagggcaagaccccccugggccugguggaccuguucguguucagcaccagcuucuaccugaucagcaucuuccugcaccugaucaagauccccacccacagacacaucgugggcaagcccugccccaagccccacagacugaaccacaugggcaucugcagcugcggccuguacaagcagcccggcgugcccaccagauggaagagaugaggacuagucccuguucccagagcccacuuuuuuuucuuuuuuugaaauaaaauagccugucuuucagaucucaaaggcucuuuucagagccaccaaaaaaaaaaaaaaaaaaaaaaaaaaaaaaaaaaaaaaaaaaaaaaaaaaaaaaaaaaaaaaaaaaaaaaaaaaaaaaaaaaaaaaaaaaaaaaaaaaaaa

SEQ ID NO: 40267 - RNA, 1745 nt, Artificial Sequence
  mRNA product Design a-1 (hSL-A100) comprising derived and/or modified sequence from LASV(KAK-428;Clade n.d. (VII))__ANH09740__GPCmut12 (opt4)
aggagagucccgcagucggcguccagcggcucugcuuguucgugugugugucguugcaggccuuauucaagcuuaccaugggccagaucgugaccuucuuccaggaggugccccacgugaucgaggaggugaugaacaucgugcugaucgcccugagccugcuggccauccugaagggccuguacaacuucgccaccugcggcgugaucggccugaucaccuuccugcugcugugcggcagaagcugcagcgccaccuacaagggccaguacgagcugcagacccuggagcugaacauggagagccugaacaugugcaugccccugagcugcaccaagaacaacagccaccacuacaucagagccggcaacaacaccggccuggagcugacccugaccaacaccagcaucaucagccacaaguucugcaaccugagcgacgcccacaagaagaaccuguacgaccacacccugaugagcaucaucaccaccuuccaccugagcauccccaacuucaaccaguacgaggccaugagcugcgacuucaacggcggcaagaucagcauccaguacaaccugagccacagcuacgccggcgacgccgcccagcacugcggcaccguggccaacggcgugcugcagaccuucaugagaauggccuggggcggcagcuaccuggcccuggacagcggcagaagaggcugggacugcaucaucagcagcuaccaguaccugaucauccagaacaccaccugggacgaccacugccaguucagcagacccagccccaucggcuaccugggcuucgugagccagaagaccagagacaucuacaucagcagaagacugcugggcaccuucaccuggacccugagcgacagcgagggccacgacaugcccggcggcuacugccugaccagauggaugcugaucgaggccgaccugaagugcuucggcaacaccgccguggccaagugcaacgagaagcacgacgaggaguucugcgacauguggagacuguucgacuucugcaagcaggccauccagagacugaaggccgaggcccagaugaacauccagcugaucaacaaggccgugaacgcccugaucaacgaccagcugaugaugaagaaccaccugagagacaucaugggcauccccuacugcaacuacagcaaguucugcuaccugaacaacaccaccaccggcagaaccagccugcccagaugcugccugaucagcaacggcagcuaccugaacgagacccacuucagcgacgacaucgagcagcaggccgacaacaugaucaccgagaugcugcagaaggaguacauggacagacagggcaagaccccccugggccugguggaccuguucguguucagcaccagcuucuaccugaucaccaucuuccugcaccuggugaagauccccacccacagacacaucgugggcaagcccugccccaagccccacagacugaaccacaugggcaucugcagcugcggccuguacaagcagcccggcgugcccgugagauggaagagaugaggacuagucccuguucccagagcccacuuuuuuuucuuuuuuugaaauaaaauagccugucuuucagaucucaaaggcucuuuucagagccaccaaaaaaaaaaaaaaaaaaaaaaaaaaaaaaaaaaaaaaaaaaaaaaaaaaaaaaaaaaaaaaaaaaaaaaaaaaaaaaaaaaaaaaaaaaaaaaaaaaaaa

SEQ ID NO: 40268 - RNA, 1745 nt, Artificial Sequence; identical to SEQ ID NO: 40262
  mRNA product Design a-1 (hSL-A100) comprising derived and/or modified sequence from LASV(Pinneo-NIG-1969;Clade I)__AIT17836__GPCmut12 (opt4)

SEQ ID NO: 40269 - RNA, 1745 nt, Artificial Sequence
  mRNA product Design a-1 (hSL-A100) comprising derived and/or modified sequence from LASV(ISTH0009-NIG-2011;Clade II)__AIT17404__GPCmut12 (opt4)
aggagagucccgcagucggcguccagcggcucugcuuguucgugugugugucguugcaggccuuauucaagcuuaccaugggccagaucaucaccuucuuccaggaggugccccacgugaucgaggaggugaugaacaucgugcugaucgcccugagccugcuggccauccugaagggcaucuacaacguggccaccugcggccuguucggccuggugagcuuccugcugcugugcggcagaagcugcagcaccaccuacaagggcguguacgagcugcagacccuggagcuggacauggccagccugaacaugugcaugccccugagcugcaccaagaacaacagccaccacuacaucauggugggcaacgagaccggccuggagcugacccugaccaacaccagcaucaucaaccacaaguucugcaaccugagcgacgcccacaagaagaaccuguacgaccacgcccugaugagcaucaucagcaccuuccaccugagcauccccaacuucaaccaguacgaggccaugagcugcgacuucaacggcggcaagaucagcgugcaguacaaccugagccacgccuacgccguggacgccgccaaccacugcggcaccaucgccaacggcgugcugcagaccuucaugagaauggccuggggcggcagcuacaucgcccuggacagcggcaagggcagcugggacugcaucaugaccagcuaccaguaccugaucauccagaacaccaccugggaggaccacugccaguucagcagacccagccccaucggcuaccugggccugcugagccagagaaccagagacaucuacaucagcagaagacugcugggcaccuucaccuggacccugagcgacagcgagggcaacgagacccccggcggcuacugccugaccagauggaugcugaucgaggccgagcugaagugcuucggcaacaccgccguggccaagugcaacgagaagcacgacgaggaguucugcgacaugcugagacuguucgacuucugcaagcaggccaucagaagacugaagaccgaggcccagaugagcauccagcugaucaacaaggccgugaacgcccugaucaacgaccagcugaucaugaagaaccaccugagagacaucaugggcauccccuacugcaacuacagcaaguacugcuaccugaaccacaccgugaccggcaagaccagccugcccagaugcugccuggugagcaacggcagcuaccugaacgagacccacuucagcgacgacaucgagcagcaggccgacaacaugaucaccgagcugcugcagaaggaguacauggacagacagggcaagaccccccugggccugguggaccuguucguguucagcaccagcuucuaccugaucagcaucuuccugcaccugaucaagauccccacccacagacacaucaccggcaagcccugccccaagccccacagacugaaccacaugggcaucugcagcugcggccuguacaagcaccccggcgugcccgugaaguggaagagaugaggacuagucccuguucccagagcccacuuuuuuuucuuuuuuugaaauaaaauagccugucuuucagaucucaaaggcucuuuucagagccaccaaaaaaaaaaaaaaaaaaaaaaaaaaaaaaaaaaaaaaaaaaaaaaaaaaaaaaaaaaaaaaaaaaaaaaaaaaaaaaaaaaaaaaaaaaaaaaaaaaaaa

SEQ ID NO: 40270 - RNA, 1745 nt, Artificial Sequence
  mRNA product Design a-1 (hSL-A100) comprising derived and/or modified sequence from LASV(ISTH2010-NIG-2012;Clade II)__AIT17482__GPCmut12 (opt4)
aggagagucccgcagucggcguccagcggcucugcuuguucgugugugugucguugcaggccuuauucaagcuuaccaugggccagaucaucaccuucuuccaggaggugccccacgugaucgaggaggugaugaacaucgugcugaucgcccugagccugcuggccauccugaagggcaucuacaacguggccaccugcggccuguucggccuggugagcuuccugcugcugugcggcagaagcugcagcaccaccuacaagggcguguacgagcugcagacccuggagcuggacauggccagccugaacaugugcaugccccugagcugcaccaagaacaacagccaccacuacaucauggugggcaacgagaccggccuggagcugacccugaccaacaccagcaucaucaaccacaaguucugcaaccugagcgacgcccacaagaagaaccuguacgaccacgcccugaugagcaucaucagcaccuuccaccugagcauccccaacuucaaccaguacgaggccaugagcugcgacuucaacggcggcaagaucagcgugcaguacaaccugagccacgccuacgccguggacgccgccaaccacugcggcaccaucgccaacggcgugcugcagaccuucaugagaauggccuggggcggcagcuacaucgcccuggacagcggcaagggcagcugggacugcaucaugaccagcuaccaguaccugaucauccagaacaucaccugggaggaccacugccaguucagcagacccagccccaucggcuaccugggccugcugagccagagaaccagagacaucuacaucagcagaagacugcugggcaccuucaccuggacccugagcgacagcgagggcaacgagacccccggcggcuacugccugaccagauggaugcugaucgaggccgagcugaagugcuucggcaacaccgccguggccaagugcaacgagaagcacgacgaggaguucugcgacaugcugagacuguucgacuucugcaagcaggccaucagaagacugaagaccgaggcccagaugagcauccagcugaucaacaaggccgugaacgcccugaucaacgaccagcugaucaugaagaaccaccugagagacaucaugggcauccccuacugcaacuacagcaaguacugcuaccugaaccacaccgugaccggcaagaccagccugcccagaugcugccuggugagcaacggcagcuaccugaacgagacccacuucagcgacgacaucgagcagcaggccgacaacaugaucaccgagcugcugcagaaggaguacaucgacagacagggcaagaccccccugggccugguggaccuguucguguucagcaccagcuucuaccugaucagcaucuuccugcaccuggugaagauccccacccacagacacguggugggcaagcccugccccaagccccacagacugaaccacaugggcaucugcagcugcggccuguacaagcaccccggcgugcccgugaaguggaagagaugaggacuagucccuguucccagagcccacuuuuuuuucuuuuuuugaaauaaaauagccugucuuucagaucucaaaggcucuuuucagagccaccaaaaaaaaaaaaaaaaaaaaaaaaaaaaaaaaaaaaaaaaaaaaaaaaaaaaaaaaaaaaaaaaaaaaaaaaaaaaaaaaaaaaaaaaaaaaaaaaaaaaa

SEQ ID NO: 40271 - RNA, 1745 nt, Artificial Sequence
  mRNA product Design a-1 (hSL-A100) comprising derived and/or modified sequence from LASV(Lassa virus/H.sapiens-wt/NGA/2015/ISTH_0543;Clade II)__AVO03639__GPCmut12 (opt4)
aggagagucccgcagucggcguccagcggcucugcuuguucgugugugugucguugcaggccuuauucaagcuuaccaugggccagaucaucaccuucuuccaggaggugccccacgugaucgaggaggugaugaacaucgugcugaucgcccugagccugcuggccauccugaagggcaucuacaacguggccaccugcggccuguucggccuggugagcuuccugcugcugugcggcagaagcugcagcaccaccuacaagggcguguacgagcugcagacccuggagcuggacauggccaaccugaacaugugcaugccccugagcugcaccaagaacaacagccaccacuacaucauggugggcaacgagaccggccuggagcugacccugaccaacaccagcaucaucaaccacaaguucugcaaccugagcgacgcccacaagaagaaccuguacgaccacgcccugaugagcaucaucagcaccuuccaccugagcauccccaacuucaaccaguacgaggccaugagcugcgacuucaacggcggcaagaucagcgugcaguacaaccugagccacaccuacgccguggacgccgccaaccacugcggcaccaucgccaacggcgugcugcagaccuucaugagaauggccuggggcggcagcuacaucgcccuggacagcggcaagggcagcugggacugcaucaugaccagcuaccaguaccuggugauccagaacaccaccugggaggaccacugccaguucagcagacccagccccaucggcuaccugggccugcugagccagagaaccagagacaucuacaucagcagaagacugcugggcaccuucaccuggacccugagcgacagcgagggcaacgagacccccggcggcuacugccugaccagauggaugcugaucgaggccgagcugaagugcuucggcaacaccgccguggccaagugcaacgagaagcacgacgaggaguucugcgacaugcugagacuguucgacuucugcaagcaggccaucagaagacugaagaccgaggcccagaugagcauccagcugaucaacaaggccgugaacgcccugaucaacgaccagcugaucaugaagaaccaccugagagacaucaugggcauccccuacugcaacuacagcaaguacugcuaccugaaccacaccgugaccggcaagaccagccugcccagaugcugccuggugagcaacggcagcuaccugaacgagacccacuucagcgacgacaucgagcagcaggccgacaacaugaucaccgagcugcugcagaaggaguacaucgacagacagggcaagaccccccugggccugguggaccuguucguguucagcaccagcuucuaccugaucagcaucuuccugcaccuggugaagauccccacccacagacacaucaccggcaagcccugccccaagccccacagacugaaccacaugggcaucugcagcugcggccuguacaagcaccccggcgugcccgugaaguggaagagaugaggacuagucccuguucccagagcccacuuuuuuuucuuuuuuugaaauaaaauagccugucuuucagaucucaaaggcucuuuucagagccaccaaaaaaaaaaaaaaaaaaaaaaaaaaaaaaaaaaaaaaaaaaaaaaaaaaaaaaaaaaaaaaaaaaaaaaaaaaaaaaaaaaaaaaaaaaaaaaaaaaaaa

SEQ ID NO: 40272 - RNA, 1745 nt, Artificial Sequence
  mRNA product Design a-1 (hSL-A100) comprising derived and/or modified sequence from LASV(Lassa virus/H.sapiens-wt/NGA/2016/ISTH_0009;Clade II)__AVO03571__GPCmut12 (opt4)
aggagagucccgcagucggcguccagcggcucugcuuguucgugugugugucguugcaggccuuauucaagcuuaccaugggccagaucaucaccuucuuccaggaggugccccacgugaucgaggaggugaugaacaucgugcugaucgcccugagccugcuggccauccugaagggcaucuacaacguggccaccugcggccugcugggccuggugagcuuccugcugcugugcggcagaagcugcagcaccaccuacaagggcguguacgagcugcagacccuggagcuggacauggccagccugaacaugugcaugccccugagcugcaccaagaacaacagccaccacuacaucauggugggcaacgagaccggccuggagcugacccugaccaacaccagcaucaucaaccacaaguucugcaaccugagcgacgcccacaagaagaaccuguacgaccacgcccugaugagcaucaucagcaccuuccaccugagcauccccaacuucaaccaguacgaggccaugagcugcgacuucaacggcggcagaaucagcgugcaguacaaccugagccacagcuacgccguggacgccgccaaccacugcggcaccaucgccaacggcgugcugcagaccuucaugagaauggccuggggcggcagcuacaucgcccuggacagcggcaagggcagcugggacugcaucaugaccagcuaccaguaccugaucauccagaacaccaccugggaggaccacugccaguucagcagacccagccccaucggcuaccugggccugcugagccagagaaccagagacaucuacaucagcagaagacugcugggcaccuucaccuggacccugagcgacagcgagggcaacgagacccccggcggcuacugccugaccagauggaugcugaucgaggccgagcugaagugcuucggcaacaccgccguggccaagugcaacgagaagcacgacgaggaguucugcgacaugcugagacuguucgacuucugcaagcaggccaucagaagacugaagaccgaggcccagaugagcauccagcugaucaacaaggccgugaacgcccugaucaacgaccagcugaucaugaagaaccaccugagagacaucaugggcauccccuacugcaacuacagcaaguacugcuaccugaaccacaccgugaccggcaagaccagccugcccagaugcugccuggugagcaacggcagcuaccugaacgagacccacuucagcgacgacaucgagcagcaggccgacaacaugaucaccgagcugcugcagaaggaguacaucgacagacagggcaagaccccccugggccugguggaccuguucguguucagcaccagcuucuaccugaucagcaucuuccugcaccuggugaagauccccacccacagacacaucaccggcaagcccugccccaagccccacagacugaaccacaugggcaucugcagcugcggccuguacaaccaccccggcgugcccgugaaguggaagagaugaggacuagucccuguucccagagcccacuuuuuuuucuuuuuuugaaauaaaauagccugucuuucagaucucaaaggcucuuuucagagccaccaaaaaaaaaaaaaaaaaaaaaaaaaaaaaaaaaaaaaaaaaaaaaaaaaaaaaaaaaaaaaaaaaaaaaaaaaaaaaaaaaaaaaaaaaaaaaaaaaaaaa

SEQ ID NO: 40273 - RNA, 1745 nt, Artificial Sequence
  mRNA product Design a-1 (hSL-A100) comprising derived and/or modified sequence from LASV(Lassa virus/H.sapiens-wt/NGA/2016/ISTH_0017;Clade II)__AVO03567__GPCmut12 (opt4)
aggagagucccgcagucggcguccagcggcucugcuuguucgugugugugucguugcaggccuuauucaagcuuaccaugggccagaucaucaccuucuuccaggaggugccccacgugaucgaggaggugaugaacaucgugcugaucgcccugagccugcuggccauccugaagggcaucuacaacguggccaccugcggccuguucggccuggugagcuuccugcugcugugcggcagaagcugcagcaccaccuacaagggcguguacgagcugcagacccuggagcuggacauggccagccugaacaugugcaugccccugagcugcaccaagaacaacagccaccacuacaucauggugggcaacgagaccggccuggagcugacccugaccaacaccagcaucaucaaccacaaguucugcaaccugagcgacgcccacaagaagaaccuguacgaccacgcccugaugagcaucaucagcaccuuccaccugagcauccccaacuucaaccaguacgaggccaugagcugcgacuucaacggcggcaagaucagcgugcaguacaaccugagccacaccuacgccaucgacgccgccaaccacugcggcaccaucgccaacggcgugcugcagaccuucaugagaauggccuggggcggcagcuacaucgcccuggacagcggcaagggcagcugggacugcaucaugaccagcuaccaguaccugaucauccagaacaccaccugggaggaccacugccaguucagcagacccagccccaucggcuaccugggccugcugagccagagaaccagagacaucuacaucagcagaagacugcugggcaccuucaccuggacccugagcgacagcgagggcaacgagacccccggcggcuacugccugaccagauggaugcugaucgaggccgagcugaagugcuucggcaacaccgccguggccaagugcaacgagaagcacgacgaggaguucugcgacaugcugagacuguucgacuucugcaagcaggccaucagaagacugaagaccgaggcccagaugagcauccagcugaucaacaaggccgugaacgcccugaucaacgaccagcugaucaugaagaaccaccugagagacaucaugggcauccccuacugcaacuacagcaaguacugcuaccugaaccacaccgugaccggcaagaccagccugcccagaugcugccuggugagcaacggcagcuaccugaacgagacccacuucagcgacgacaucgagcagcaggccgacaacaugaucaccgagcugcugcagaaggaguacauggacagacagggcaagaccccccugggccugguggaccuguucguguucagcaccagcuucuaccugaucagcaucuuccugcaccuggugagaauccccacccacagacacgugaucggcaagcccugccccaagccccacagacugaaccacaugggcaucugcagcugcggccuguacaagcaccccggcgugcccgugaaguggaagagaugaggacuagucccuguucccagagcccacuuuuuuuucuuuuuuugaaauaaaauagccugucuuucagaucucaaaggcucuuuucagagccaccaaaaaaaaaaaaaaaaaaaaaaaaaaaaaaaaaaaaaaaaaaaaaaaaaaaaaaaaaaaaaaaaaaaaaaaaaaaaaaaaaaaaaaaaaaaaaaaaaaaaa

SEQ ID NO: 40274 - RNA, 1745 nt, Artificial Sequence
  mRNA product Design a-1 (hSL-A100) comprising derived and/or modified sequence from LASV(Lassa virus/H.sapiens-wt/NGA/2018/ISTH_0959;Clade II)__AVV65099__GPCmut12 (opt4)
aggagagucccgcagucggcguccagcggcucugcuuguucgugugugugucguugcaggccuuauucaagcuuaccaugggccagaucaucaccuucuuccaggaggugccccacgugaucgaggaggugaugaacaucgugcugaucgcccugagccugcuggccauccugaagggcaucuacaacguggugaccugcggccuguucggccuggugagcuuccugcugcugugcggcagaagcugcagcaccaccuacaagggcguguacgagcugcagacccuggagcuggacauggccagccugaacaugugcaugccccugagcugcaccaagaacaacagccaccacuacaucauggugggcaacgagaccggccuggagcugacccugaccaacaccagcaucaucaaccacaaguucugcaaccugagcgacgcccacaagaagaaccuguacgaccacgcccugaugagcaucaucagcaccuuccaccugagcauccccaacuucaaccaguacgaggccaugagcugcgacuucaacggcggcaagaucagcgugcaguacaaccugagccacgccuacgccaucgacgccgccaaccacugcggcaccaucgccaacggcgugcugcagaccuucaugagaauggccuggggcggcagcuacaucgcccuggacagcggcaagggcagcugggacugcaucaugaccagcuaccaguaccugaucauccagaacaccaccugggaggaccacugccaguucagcagacccagccccaucggcuaccugggccugcugagccagagaaccagagacaucuacaucagcagaagacugcugggcaccuucaccuggacccugagcgacagcgagggcaacgagacccccggcggcuacugccugaccagauggaugcugaucgaggccgagcugaagugcuucggcaacaccgccguggccaagugcaacgagaagcacgacgaggaguucugcgacaugcugagacuguucgacuucugcaagcaggccaucagaagacugaagaccgaggcccagaugagcauccagcugaucaacaaggccgugaacgcccugaucaacgaccagcugaucaugaagaaccaccugagagacaucaugggcauccccuacugcaacuacagcaaguacugcuaccugaaccacaccgugaccggcaagaccagccugcccagaugcugccuggugagcaacggcagcuaccugaacgagacccacuucagcgacgacaucgagcagcaggccgacaacaugaucaccgagcugcugcagaaggaguacaucgacagacagggcaagaccccccugggccugguggaccuguucguguucagcaccagcuucuaccugaucagcaucuuccugcaccuggugaagauccccacccacagacacgugaucggcaagcccugccccaagccccacagacugaaccacaugggcaucugcagcugcggccuguacaagcaccccggcgugcccgugaaguggaagagaugaggacuagucccuguucccagagcccacuuuuuuuucuuuuuuugaaauaaaauagccugucuuucagaucucaaaggcucuuuucagagccaccaaaaaaaaaaaaaaaaaaaaaaaaaaaaaaaaaaaaaaaaaaaaaaaaaaaaaaaaaaaaaaaaaaaaaaaaaaaaaaaaaaaaaaaaaaaaaaaaaaaaa

SEQ ID NO: 40275 - RNA, 1745 nt, Artificial Sequence
  mRNA product Design a-1 (hSL-A100) comprising derived and/or modified sequence from LASV(LASV003-NIG-2008;Clade II)__AIT17580__GPCmut12 (opt4)
aggagagucccgcagucggcguccagcggcucugcuuguucgugugugugucguugcaggccuuauucaagcuuaccaugggccagaucaucaccuucuuccaggaggugccccacgugaucgaggaggugaugaacaucgugcugaucgcccugagccugcuggccauccugaagggcaucuacaacguggccaccugcggccuguucggccuggugagcuuccugcugcugugcggcagaagcugcagcaccaccuacaagggcguguacgagcugcagacccuggagcuggacauggccagccugaacaugugcaugccccugagcugcaccaagaacaacagccaccacuacaucauggugggcaacgagaccggccuggagcugacccugaccaacaccagcaucaucaaccacaaguucugcaaccugagcgacgcccacaagaagaaccuguacgaccacgcccugaugagcaucaucagcaccuuccaccugagcauccccaacuucaaccaguacgaggccaugagcugcgacuucaacggcggcaagaucagcgugcaguacaaccugagccacaccuacgccguggacgccgccaaccacugcggcaccaucgccaacggcgugcugcagaccuucaugagaauggccuggggcggcagcuacaucgcccuggacagcggcaagggcagcugggacugcaucaugaccagcuaccaguaccugaucauccagaacaccaccugggaggaccacugccaguucagcagacccagccccaucggcuaccugggccugcugagccagagaaccagagacaucuacaucagcagaagacugcugggcaccuucaccuggacccugagcgacagcgagagcaacgagacccccggcggcuacugccugaccagauggaugcugaucgaggccgagcugaagugcuucggcaacaccgccguggccaagugcaacgagaagcacgacgaggaguucugcgacaugcugagacuguucgacuucugcaagcaggccaucagaagacugaaggccgaggcccagaugagcauccagcugaucaacaaggccgugaacgcccugaucaacgaccagcugaucaugaagaaccaccugagagacaucaugggcauccccuacugcaacuacagcaaguacugcuaccugaaccacaccgugaccggcagaaccagccugcccagaugcugccuggugagcaacggcagcuaccugaacgagacccacuucagcgacgacaucgagcagcaggccgacaacaugaucaccgagcugcugcagaaggaguacauggacagacagggcaagaccccccugggccugguggaccuguucguguucagcaccagcuucuaccugaucagcaucuuccugcaccuggugaagauccccacccacagacacgugaucggcaagcccugccccaagccccacagacugaaccacaugggcaucugcagcugcggccuguacaagcaccccggcgugcccgugaaguggaagagaugaggacuagucccuguucccagagcccacuuuuuuuucuuuuuuugaaauaaaauagccugucuuucagaucucaaaggcucuuuucagagccaccaaaaaaaaaaaaaaaaaaaaaaaaaaaaaaaaaaaaaaaaaaaaaaaaaaaaaaaaaaaaaaaaaaaaaaaaaaaaaaaaaaaaaaaaaaaaaaaaaaaaa

SEQ ID NO: 40276 - RNA, 1745 nt, Artificial Sequence
  mRNA product Design a-1 (hSL-A100) comprising derived and/or modified sequence from LASV(LASV035-NIG-2009;Clade II)__AIT17588__GPCmut12 (opt4)
aggagagucccgcagucggcguccagcggcucugcuuguucgugugugugucguugcaggccuuauucaagcuuaccaugggccagaucaucaccuucuuccaggaggugccccacgugaucgaggaggugaugaacaucgugcugaucgcccugagccugcuggccauccugaagggcaucuacaacguggccaccugcggccuguucggccuggugagcuuccugcugcugugcggcagaagcugcagcaccaccuacaagggcguguacgagcugcagacccuggagcuggacauggccagccugaacaugugcaugccccugagcugcaccaagaacaacagccaccacuacaucauggugggcaacgagaccggccuggagcugacccugaccaacaccagcaucaucaaccacaaguucugcaaccugagcgacgcccacaagaagaaccuguacgaccacgcccugaugagcaucaucagcaccuuccaccugagcauccccaacuucaaccaguacgaggccaugagcugcgacuucaacggcggcaagaucagcgugcaguacaaccugagccacgccuacgccguggacgccgccaaccacugcggcaccaucgccaacggcgugcugcagaccuucaugagaauggccuggggcggcagcuacaucgcccuggacagcggcaagggcagcugggacugcaucaugaccagcuaccaguaccugaucauccagaacaccaccugggaggaccacugccaguucagcagacccagccccaucggcuaccugggccugcugagccagagaaccagagacaucuacaucagcagaagacugcugggcaccuucaccuggacccugagcgacagcgagggcaacgagacccccggcggcuacugccugaccagauggaugcugaucgaggccgagcugaagugcuucggcaacaccgccguggccaagugcaacgagaagcacgacgaggaguucugcgacaugcugagacuguucgacuucugcaagcaggccaucagaagacugaaggccgaggcccagaugagcauccagcugaucaacaaggccgugaacgcccugaucaacgaccagcugaucaugaagaaccaccugagagacaucaugggcauccccuacugcaacuacagcaaguacugcuaccugaaccacaccgugaccggcaagaccagccugcccagaugcugccuggugagcaacggcagcuaccugaacgagacccacuucagcgacgacaucgagcagcaggccgacaacaugaucaccgagcugcugcagaaggaguacaucgacagacagggcaagaccccccugggccugguggaccuguucguguucagcaccagcuucuaccugaucagcaucuuccugcaccuggugaagauccccacccacagacacgugaucggcaagcccugccccaagccccacagacugaaccacaugggcaucugcagcugcggccuguacaagcaccccggcgugcccgugaaguggaagagaugaggacuagucccuguucccagagcccacuuuuuuuucuuuuuuugaaauaaaauagccugucuuucagaucucaaaggcucuuuucagagccaccaaaaaaaaaaaaaaaaaaaaaaaaaaaaaaaaaaaaaaaaaaaaaaaaaaaaaaaaaaaaaaaaaaaaaaaaaaaaaaaaaaaaaaaaaaaaaaaaaaaaa

SEQ ID NO: 40277 - RNA, 1745 nt, Artificial Sequence
  mRNA product Design a-1 (hSL-A100) comprising derived and/or modified sequence from LASV(LASV1000-NIG-2009;Clade II)__AIT17782__GPCmut12 (opt4)
aggagagucccgcagucggcguccagcggcucugcuuguucgugugugugucguugcaggccuuauucaagcuuaccaugggccagaucaucaccuucuuccaggaggugccccacgugaucgaggaggugaugaacaucgugcugaucgcccugagccugcuggccauccugaagggcaucuacaacguggccaccugcggccuguucggccuggugagcuuccugcugcugugcggcagaagcugcagcaccaccuacaagggcguguacgagcugcagacccuggagcuggacauggccagccugaacaugugcaugccccugagcugcaccaagaacaacagccaccacuacaucauggugggcaacgagaccggccuggagcugacccugaccaacaccagcaucaucaaccacaaguucugcaaccugagcgacgcccacaagaagaaccuguacgaccacgcccugaugagcaucaucagcaccuuccaccugagcauccccaacuucaaccaguacgaggccaugagcugcgacuucaacggcggcaagaucagcgugcaguacaaccugagccacaccuacgccguggacgccgccaaccacugcggcaccaucgccaacggcgugcugcagaccuucaugagaauggccuggggcggcagcuacaucgcccuggacagcggcaagggcagcugggacugcaucaugaccagcuaccaguaccugaucauccagaacaccaccugggaggaccacugccaguucagcagacccagccccaucggcuaccugggccugcugagccagagaaccagagacaucuacaucagcagaagacugcugggcaccuucaccuggacccugagcgacagcgagggcaacgagacccccggcggcuacugccugaccagauggaugcugaucgaggccgagcugaagugcuucggcaacaccgccguggccaagugcaacgagaagcacgacgaggaguucugcgacaugcugagacuguucgacuucugcaagcaggccaucaagagacugaagaccgaggcccagaugagcauccagcugaucaacaaggccgugaacgcccugaucaacgaccagcugaucaugaagaaccaccugagagacaucaugggcauccccuacugcaacuacagcaaguacugcuaccugaaccacaccgugaccggcaagaccagccugcccagaugcugccuggugagcaacggcagcuaccugaacgagacccacuucagcgacgacaucgagcagcaggccgacaacaugaucaccgagcugcugcagaaggaguacaucgacagacagggcaagaccccccugggccugguggaccuguucguguucagcaccagcuucuaccugaucagcaucuuccugcaccuggugaagauccccacccacagacacguggugggcaagcccugccccaagccccacagacugaaccacaugggcaucugcagcugcggccuguacaagcaccccggcgugcccgugaaguggaagagaugaggacuagucccuguucccagagcccacuuuuuuuucuuuuuuugaaauaaaauagccugucuuucagaucucaaaggcucuuuucagagccaccaaaaaaaaaaaaaaaaaaaaaaaaaaaaaaaaaaaaaaaaaaaaaaaaaaaaaaaaaaaaaaaaaaaaaaaaaaaaaaaaaaaaaaaaaaaaaaaaaaaaa

SEQ ID NO: 40278 - RNA, 1745 nt, Artificial Sequence
  mRNA product Design a-1 (hSL-A100) comprising derived and/or modified sequence from LASV(LASV221-NIG-2010;Clade II)__AIT17624__GPCmut12 (opt4)
aggagagucccgcagucggcguccagcggcucugcuuguucgugugugugucguugcaggccuuauucaagcuuaccaugggccagaucaucaccuucuuccaggaggugccccacgugaucgaggaggugaugaacaucgugcugaucgcccugagccugcuggccauccugaagggcaucuacaacguggccaccugcggccuguucggccuggugagcuuccugcugcugugcggcagaagcugcagcaccaccuacaagggcguguacgagcugcagacccuggagcuggacauggccagccugaacaugugcaugccccugagcugcaccaagaacaacagccaccacuacaucauggugggcaacgagaccggccuggagcugacccugaccaacaccagcaucaucaaccacaaguucugcaaccugagcgacgcccacaagaagaaccuguacgaccacgcccugaugagcaucaucagcaccuuccaccugagcauccccaacuucaaccaguacgaggccaugagcugcgacuucaacggcggcaagaucagcgugcaguacaaccugagccacaccuacgccaucgacgccgccaaccacugcggcaccaucgccaacggcgugcugcagaccuucaugagaauggccuggggcggcagcuacaucgcccuggacagcggcaagggcagcugggacugcaucaugaccagcuaccaguaccugaucauccagaacaccaccugggaggaccacugccaguucagcagacccagccccaucggcuaccugggccugcugagccagagaaccagagacaucuacaucagcagaagacugcugggcaccuucaccuggacccugagcgacagcgagggcaacgagacccccggcggcuacugccugaccagauggaugcugaucgaggccgagcugaagugcuucggcaacaccgccguggccaagugcaacgagaagcacgacgaggaguucugcgacaugcugagacuguucgacuucugcaagcaggccaucagaagacugaagaccgaggcccagaugagcauccagcugaucaacaaggccgugaacgcccugaucaacgaccagcugaucaugaagaaccaccugagagacaucaugggcauccccuacugcaacuacagcaaguacugcuaccugaaccacaccgugaccggcaagaccagccugcccagaugcugccuggugagcaacggcagcuaccugaacgagacccacuucagcgacgacaucgagcagcaggccgacaacaugaucaccgagaugcugcagaaggaguacauggacagacagggcaagaccccccugggccugguggaccuguucguguucagcaccagcuucuaccugaucagcaucuuccugcaccuggugaagauccccacccacagacacgugaucggcaagcccugccccaagccccacagacugaaccacaugggcaucugcagcugcggccuguacaagcaccccggcgugcccgugaaguggaagagaugaggacuagucccuguucccagagcccacuuuuuuuucuuuuuuugaaauaaaauagccugucuuucagaucucaaaggcucuuuucagagccaccaaaaaaaaaaaaaaaaaaaaaaaaaaaaaaaaaaaaaaaaaaaaaaaaaaaaaaaaaaaaaaaaaaaaaaaaaaaaaaaaaaaaaaaaaaaaaaaaaaaaa

SEQ ID NO: 40279 - RNA, 1745 nt, Artificial Sequence
  mRNA product Design a-1 (hSL-A100) comprising derived and/or modified sequence from LASV(LASV237-NIG-2010;Clade II)__AIT17638__GPCmut12 (opt4)
aggagagucccgcagucggcguccagcggcucugcuuguucgugugugugucguugcaggccuuauucaagcuuaccaugggccagaucaucaccuucuuccaggaggugccccacgugaucgaggaggugaugaacaucgugcugaucgcccugagccugcuggccauccugaagggcaucuacaacguggccaccugcggccuguucggccuggugagcuuccugcugcugugcggcagaagcugcagcaccaccuacaagggcguguacgagcugcagacccuggagcuggacauggccagccugaacaugugcaugccccugagcugcaccaagaacaacagccaccacuacaucauggugggcaacgagaccggccuggagcugacccugaccaacaccagcaucaucaaccacaaguucugcaaccugagcgacgcccacaagaaggaccuguacgaccacgcccugaugagcaucaucagcaccuuccaccugagcauccccaacuucaaccaguacgaggccaugagcugcgacuucaacggcggcaagaucagcgugcaguacaaccugagccacaccuacgccguggacgccgccaaccacugcggcaccaucgccaacggcgugcugcagaccuucaugagaauggccuggggcggcagcuacaucgcccuggacagcggcaagggcagcugggacugcaucaugaccagcuaccaguaccugaucauccagaacaccaccugggaggaccacugccaguucagcagacccagccccaucggcuaccugggccugcugagccagagaaccagagacaucuacaucagcagaagacugcugggcaccuucaccuggacccugagcgacagcgagggcaacgagacccccggcggcuacugccugaccagauggaugcugaucgaggccgagcugaagugcuucggcaacaccgccguggccaagugcaacgagaagcacgacgaggaguucugcgacaugcugagacuguucgacuucugcaagcaggccaucagaagacugaagaccgaggcccagaugagcauccagcugaucaacaaggccgugaacgcccugaucaacgaccagcugaucaugaagaaccaccugagagacaucaugggcauccccuacugcaacuacagcaaguacugcuaccugaaccacaccgugaccggcaagaccagccugcccagaugcugccuggugagcaacggcagcuaccugaacgagacccacuucagcgacgacaucgagcagcaggccgacaacaugaucaccgagcugcugcagaaggaguacauggacagacagggcaagaccccccugggccugguggaccuguucguguucagcaccagcuucuaccugaucagcaucuuccugcaccugaucaagauccccacccacagacacaucaccggcaagcccugccccaagccccacagacugaaccacaugggcaucugcagcugcggccuguacaagcaccccggcgugcccgugaaguggaagagaugaggacuagucccuguucccagagcccacuuuuuuuucuuuuuuugaaauaaaauagccugucuuucagaucucaaaggcucuuuucagagccaccaaaaaaaaaaaaaaaaaaaaaaaaaaaaaaaaaaaaaaaaaaaaaaaaaaaaaaaaaaaaaaaaaaaaaaaaaaaaaaaaaaaaaaaaaaaaaaaaaaaaa

SEQ ID NO: 40280 - RNA, 1745 nt, Artificial Sequence
  mRNA product Design a-1 (hSL-A100) comprising derived and/or modified sequence from LASV(LASV253-NIG-2011;Clade II)__AIT17670__GPCmut12 (opt4)
aggagagucccgcagucggcguccagcggcucugcuuguucgugugugugucguugcaggccuuauucaagcuuaccaugggccagaucaucaccuucuuccaggaggugccccacgugaucgaggaggugaugaacaucgugcugaucgcccugagccugcuggccauccugaagggcaucuacaacguggccaccugcggccuguucggccuggugagcuuccugcugcugugcggcagaagcugcagcaccaccuacaagggcguguacgagcugcagacccuggagcuggacauggccagccugaacaugugcaugccccugagcugcaccaagaacaacagccaccacuacaucauggugggcaacgagaccggccuggagcugacccugaccaacaccagcaucaucaaccacaaguucugcaaccugagcgacgcccacaagaagaaccuguacgaccacgcccugaugagcaucaucagcaccuuccaccugagcauccccaacuucaaccaguacgaggccaugagcugcgacuucaacggcggcaagaucagcgugcaguacaaccugagccacaccuacgccguggacgccgccaaccacugcggcaccaucgccaacggcgugcugcagaccuucaugagaauggccuggggcggcagcuacaucgcccuggacagcggcaagggcagcugggacugcaucaugaccagcuaccaguaccugaucauccagaacaccaccugggaggaccacugccaguucagcagacccagccccaucggcuaccugggccugcugagccagagaaccagagacaucuacaucagcagaagacugcugggcaccuucaccuggacccugagcgacagcgagggcaacgagacccccggcggcuacugccugaccagauggaugcugaucgaggccgagcugaagugcuucggcaacaccgccguggccaagugcaacgagaagcacgacgaggaguucugcgacaugcugagacuguucgacuucugcaagcaggccaucagaagacugaaggccgaggcccagaugagcauccagcugaucaacaaggccgugaacgcccugaucaacgaccagcugaucaugaagaaccaccugagagacaucaugggcauccccuacugcaacuacagcaaguacugcuaccugaaccacaccgugaccggcagaaccagccugcccagaugcugccuggugagcaacggcagcuaccugaacgagacccacuucagcgacgacaucgagcagcaggccgacaacaugaucaccgagcugcugcagaaggaguacaucgacagacagggcaagaccccccugggccugguggaccuguucguguucagcaccagcuucuaccugaucagcaucuuccugcaccuggugaagauccccacccacagacacaucaucggcaagcccugccccaagccccacagacugaaccacaugggcaucugcagcugcggccuguacaagcaccccggcgugcccgugaaguggaagagaugaggacuagucccuguucccagagcccacuuuuuuuucuuuuuuugaaauaaaauagccugucuuucagaucucaaaggcucuuuucagagccaccaaaaaaaaaaaaaaaaaaaaaaaaaaaaaaaaaaaaaaaaaaaaaaaaaaaaaaaaaaaaaaaaaaaaaaaaaaaaaaaaaaaaaaaaaaaaaaaaaaaaa

SEQ ID NO: 40281 - RNA, 1745 nt, Artificial Sequence
  mRNA product Design a-1 (hSL-A100) comprising derived and/or modified sequence from LASV(LASV254-NIG-2011;Clade II)__AIT17674__GPCmut12 (opt4)
aggagagucccgcagucggcguccagcggcucugcuuguucgugugugugucguugcaggccuuauucaagcuuaccaugggccagaucaucaccuucuuccaggaggugccccacgugaucgaggaggugaugaacaucgugcugaucgcccugagccugcuggccauccugaagggcaucuacaacguggccaccugcggccuguucggccuggugagcuuccugcugcugugcggcagaagcugcagcaccaccuacaagggcguguacgagcugcagacccuggagcuggacaugaccaaccugaacaugugcaugccccugagcugcaccaagaacaacagccaccacuacaucauggugggcaacgagaccggccuggagcugacccugaccaacaccagcaucaucaaccacaaguucugcaaccugagcgacgcccacaagaagaaccuguacaaccacgcccugaugagcaucaucagcaccuuccaccugagcauccccaacuucaaccaguacgaggccaugagcugcgacuucaacggcggcaagaucagcgugcaguacaaccugagccacagcuacgccguggacgccgccaaccacugcggcaccaucgccaacggcgugcugcagaccuucaugagaauggccuggggcggcagcuacaucgcccuggacagcggcaagggcaacugggacugcaucaugaccagcuaccaguaccugaucauccagaacaccaccugggaggaccacugccaguucagcagacccagccccaucggcuaccugggccugcugagccagagaaccagagacaucuacaucagcagaagacugcugggcaccuucaccuggacccugagcgacagcgagggcaacgagacccccggcggcuacugccugaccagauggaugcugaucgaggccgagcugaagugcuucggcaacaccgccguggccaagugcaacgagaagcacgacgaggaguucugcgacaugcugagacuguucgacuucugcaagcaggccaucagaagacugaagaccgaggcccaggccaacauccagcugaucaacaaggccgugaacgcccugaucaacgaccagcugaucaugaagaaccaccugagagacaucaugggcauccccuacugcaacuacagcaaguacugcuaccugaaccacaccgugaccggcaagaccagccugcccagaugcugccuggugagcaacggcagcuaccugaacgagacccacuucagcgacgacaucgagcagcaggccgacaacaugaucaccgagcugcugcagaaggaguacauggacagacagggcaagaccccccugggccugguggaccuguucguguucagcaccagcuucuaccugaucagcaucuuccugcaccuggugaagauccccacccacagacacgugaucggcaagcccugccccaagccccacagacugaaccacaugggcaucugcagcugcggccuguacaagcaccccggcgugcccgugaaguggaagagaugaggacuagucccuguucccagagcccacuuuuuuuucuuuuuuugaaauaaaauagccugucuuucagaucucaaaggcucuuuucagagccaccaaaaaaaaaaaaaaaaaaaaaaaaaaaaaaaaaaaaaaaaaaaaaaaaaaaaaaaaaaaaaaaaaaaaaaaaaaaaaaaaaaaaaaaaaaaaaaaaaaaaa

SEQ ID NO: 40282 - RNA, 1745 nt, Artificial Sequence
  mRNA product Design a-1 (hSL-A100) comprising derived and/or modified sequence from LASV(Nig08-A19;Clade III)__ADU56618__GPCmut12 (opt4)
aggagagucccgcagucggcguccagcggcucugcuuguucgugugugugucguugcaggccuuauucaagcuuaccaugggccagaucgugaccuucuuccaggaggugccccacgugaucgaggaggugaugaacaucgugcugaucgcccugagcauccuggccauccugaagggccuguacaacaucgccaccugcggccugaucggccuggugaccuuccugcugcugagcggcagaagcugcagcaugaccuacaagggcguguacgagcugcagacccuggagcugaacaugaacacccugaacaugugcaugccccugagcugcaccaagaacaacagccaccacuacaucauggugggcaacgagaccggccuggagcugacccugaccaacaccagccugcugcaccacaaguucugcaaccugagcgacgcccacaagaagaaccuguacgaccacacccugaugagcaucaucagcaccuuccaccugagcauccccaacuucaaccaguacgaggccaugagcugcgacuucaacggcggcaagaucaccgugcaguacaaccugagccacagcuacgccaucgacgccgccaaccacugcggcaccguggccaacggcgugcugcagaccuucaugagaauggccuggggcggcagcuacaucgcccuggacagcggcagaggcaagugggacugcaucaugaccagcuaccaguaccugaucauccagaacaccaccugggaggaccacugccaguucagcagacccagccccaucggcuaccugggccugcugagccagagaaccagagacaucuacaucagcagaagacugcugggcaccuucaccuggacccugagcgacagcgagggcaacgagacccccggcggcuacugccugaccagauggaugcugaucgaggccgagcugaagugcuucggcaacaccgccguggccaagugcaacgagaagcacgacgaggaguucugcgacaugcugagacuguucgacuucugcaagcaggccaucagaagacugaaggccgaggcccagaugagcauccagcugaucaacaaggccgugaacgcccugaucaacgaccagcugaucaugaagaaccaccugagagacaucaugggcauccccuacugcaacuacagcaaguacugcuaccugaaccacaccagcaccggcagaaccagccugcccagaugcugccuggugagcaacggcagcuaccugaacgagacccacuucagcgacgacaucgagcagcaggccgacaacaugaucaccgagaugcugcagaaggaguaccuggacagacagggcaagaccccccugggccugguggaccuguucguguucagcaccagcuucuaccugaucagcaucuuccugcaccuggugaagauccccacccacagacacaucgugggcaagcccugccccaagccccacagacugaaccacaugggcaucugcagcugcggccuguacaagcagcccggcgugcccgugagauggaagagaugaggacuagucccuguucccagagcccacuuuuuuuucuuuuuuugaaauaaaauagccugucuuucagaucucaaaggcucuuuucagagccaccaaaaaaaaaaaaaaaaaaaaaaaaaaaaaaaaaaaaaaaaaaaaaaaaaaaaaaaaaaaaaaaaaaaaaaaaaaaaaaaaaaaaaaaaaaaaaaaaaaaaa

SEQ ID NO: 40283 - RNA, 1748 nt, Artificial Sequence
  mRNA product Design a-1 (hSL-A100) comprising derived and/or modified sequence from LASV(G1180-SLE-2010;Clade IV)__AIT17168__GPCmut12 (opt4)
aggagagucccgcagucggcguccagcggcucugcuuguucgugugugugucguugcaggccuuauucaagcuuaccaugggccagaucgugaccuucuuccaggaggugccccacgugaucgaggaggugaugaacaucgugcugaucgcccugagcauccuggccgugcugaagggccuguacaacuucgccaccugcggccuggugggccugcugaccuuccugcugcugugcggcagaagcugcaccgccagcagauacaagggcguguacgagcugcagacccuggagcugaacauggagacccugaacaugugcaugccccugagcugcaccaagaacaacagccaccacuacaucauggugggcaacgagaccggccuggagcugacccugaccaacaccagcaucaucaaccacaaguucugcaaccugagcgacgcccacaagaagaaccuguacgaccacgcccugaugagcaucaucagcaccuuccaccugagcauccccaacuucaaccaguacgaggccaugagcugcgacuucaacggcggcaagaucagcgugcaguacaaccugagccacagcuacgccggcgacgccgccaaccacugcggcaccguggccaacggcgugcugcagaccuucaugagaauggccuggggcggcagcuacaucgcccuggacagcggccacggcagcugggacugcaucaugaccagcuaccaguaccugaucauccagaacaccaccugggaggaccacugccaguucagcagacccagccccaucggcuaccugggccugcugagccagagaaccagagacaucuacaucagcagaagacugcugggcaccuucaccuggacccugagcgacagcgagggcaaggacacccccggcggcuacugccugaccagauggaugcugaucgaggccgagcugaagugcuucggcaacaccgccguggccaagugcaacgagaagcacgacgaggaguucugcgacaugcugagacuguucgacuucugcaagcaggccauccagagacugaaggccgaggcccagaugagcauccagcugaucaacaaggccgugaacgcccugaucaacgaccagcugaucaugaagaaccaccugagagacaucaugggcauccccuacugcaacuacagcaaguacugcuaccugaaccacaccaccaccggcaagaccagccugcccaagugcugccuggugagcaacggcagcuaccugaacgagacccacuucagcgacgacaucgagcagcaggccgacaacaugaucaccgagaugcugcagaaggaguacauggagagacagggcaagaccccccugggccugguggaccuguucguguucagcaccagcuucuaccugaucagcaucuuccugcaccuggugaagauccccacccacagacacaucgugggcaagagcugccccaagccccacagacugaaccacaugggcaucugcagcugcggccuguacaagcagcccggcgugcccgugaaguggaagagaugaggacuagucccuguucccagagcccacuuuuuuuucuuuuuuugaaauaaaauagccugucuuucagaucucaaaggcucuuuucagagccaccaaaaaaaaaaaaaaaaaaaaaaaaaaaaaaaaaaaaaaaaaaaaaaaaaaaaaaaaaaaaaaaaaaaaaaaaaaaaaaaaaaaaaaaaaaaaaaaaaaaaa

SEQ ID NO: 40284 - RNA, 1748 nt, Artificial Sequence
  mRNA product Design a-1 (hSL-A100) comprising derived and/or modified sequence from LASV(G1442-SLE-2011;Clade IV)__AIT17180__GPCmut12 (opt4)
aggagagucccgcagucggcguccagcggcucugcuuguucgugugugugucguugcaggccuuauucaagcuuaccaugggccagaucgugaccuucuuccaggaggugccccacgugaucgaggaggugaugaacaucgugcugaucgcccugagcauccuggccgugcugaagggccuguacaacguggccaccugcggccugaucggccuggugaccuuccugcugcugugcggcagaagcugcaccaccacccuguacaagggcguguacgagcugcagacccuggagcugaacauggagacccugaacaugugcaugccccugagcugcaccaagaacaacagccaccacuacaucagagugggcaacgagaccggccuggagcugacccugaccaacaccagcaucaucaaccacaaguucugcaaccugagcgacgcccacaagaagaaccuguacgaccacgcccugaugagcaucaucagcaccuuccaccugagcauccccaacuucaaccaguacgaggccaugagcugcgacuucaacggcggcaagaucagcgugcaguacaaccugagccacagcuacgccggcgacgccgccaaccacugcggcaccguggccaacggcgugcugcagaccuucaugagaauggccuggggcggcagcuacaucgcccuggacagcggcagaggcaacugggacugcaucaugaccagcuaccaguaccugaucauccagaacaccaccugggacgaccacugccaguucagcagacccagccccaucggcuaccugggccugcugagccagagaaccagagacguguacaucagcagaagacugcugggcaccuucaccuggacccugagcgacagcgagggcaaggacacccccggcggcuacugccugaccagauggaugcugaucgaggccgagcugaagugcuucggcaacaccgccguggccaagugcaacgagaagcacgacgaggaguucugcgacaugcugagacuguucgacuucugcaagcaggccauccagagacugaaggccgaggcccagaugagcauccagcugaucaacaaggccgugaacgcccugaucaacgaccagcugaucaugaagaaccaccugagagacaucaugggcauccccuacugcaacuacagcaaguacugcuaccugaacaacaccgccaccggcaagaccagccugcccaagugcugccugaucagcaacggcagcuaccugaacgagacccacuucagcgacgacaucgagcaggaggccgacaacaugaucaccgagaugcugcagaaggaguacauggagagacagggcaagaccccccugggccugguggaccuguucguguucagcaccagcuucuaccugaucagcaucuuccugcaccuggugaagauccccacccacagacacaucgugggcaagagcugccccaagccccacagacugaaccacaugggcaucugcagcugcggccuguacaagcagcccggcgugcccgugagauggaagagaugaggacuagucccuguucccagagcccacuuuuuuuucuuuuuuugaaauaaaauagccugucuuucagaucucaaaggcucuuuucagagccaccaaaaaaaaaaaaaaaaaaaaaaaaaaaaaaaaaaaaaaaaaaaaaaaaaaaaaaaaaaaaaaaaaaaaaaaaaaaaaaaaaaaaaaaaaaaaaaaaaaaaa

SEQ ID NO: 40285 - RNA, 1748 nt, Artificial Sequence
  mRNA product Design a-1 (hSL-A100) comprising derived and/or modified sequence from LASV(G3010-SLE-2013;Clade IV)__AIT17344__GPCmut12 (opt4)
aggagagucccgcagucggcguccagcggcucugcuuguucgugugugugucguugcaggccuuauucaagcuuaccaugggccagaucgugaccuucuuccaggaggugccccacgugaucgaggaggugaugaacaucgugcugaucgcccugagcauccuggccgugcugaagggccuguacaacuucgccaccugcggccuggugggccuggugaccuuccugcugcugugcggcagaagcugcaccaccagccuguacaagggcguguacgagcugcagacccuggagcugaacauggagacccugaacaugugcaugccccugagcugcaccaagaacaacagccaccacuacaucauggugggcaacgagaccggccuggagcugacccugaccaacaccagcaucaucaaccacaaguucugcaaccugagcgacgcccacaagaagaaccuguacaaccacgcccugaugagcaucaucagcaccuuccaccugagcauccccaacuucaaccaguacgaggccaugagcugcgacuucaacggcggcaagaucagcgugcaguacaaccugagccacagcuacgccggcgacgccgccagccacugcggcaccguggccaacggcgugcugcagaccuucaugagaauggccuggggcggcagcuacaucgcccuggacagcggcuacggcaagugggacugcaucaugaccagcuaccaguaccugaucauccagaacaccaccugggaggaccacugccaguucagcagacccagccccaucggcuaccugggccugcugagccagagaaccagagacaucuacaucagcagaagacugcugggcaccuucaccuggacccugagcgacagcgagggcaaggacacccccggcggcuacugccugaccagauggaugcugaucgaggccgagcugaagugcuucggcaacaccgccguggccaagugcaacgagaagcacgacgaggaguucugcgacaugcugagacuguucgacuucugcaagcaggccauccagagacugaagaccgaggcccagaugagcauccagcugaucaacaaggccgugaacgcccugaucaacgaccagcugaucaugaagaaccaccugagagacaucaugggcauccccuacugcaacuacagcaaguacugcuaccugaaccacaccaccaccggcaagaccagccugcccaagugcugccuggugagcaacggcagcuaccugaacgagacccacuucagcgacgacaucgagcagcaggccgacaacaugaucaccgagaugcugcagaaggaguacauggagagacagggcaagaccccccugggccugguggaccuguucguguucagcaccagcuucuaccugaucagcaucuuccugcaccuggugaagauccccacccacagacacaucgugggcaagagcugccccaagccccacagacugaaccacaugggcaucugcagcugcggccuguacaagcagcccggcgugcccgugagauggaagagaugaggacuagucccuguucccagagcccacuuuuuuuucuuuuuuugaaauaaaauagccugucuuucagaucucaaaggcucuuuucagagccaccaaaaaaaaaaaaaaaaaaaaaaaaaaaaaaaaaaaaaaaaaaaaaaaaaaaaaaaaaaaaaaaaaaaaaaaaaaaaaaaaaaaaaaaaaaaaaaaaaaaaa

SEQ ID NO: 40286 - RNA, 1748 nt, Artificial Sequence
  mRNA product Design a-1 (hSL-A100) comprising derived and/or modified sequence from LASV(G502-SLE-2009;Clade IV)__AIT17126__GPCmut12 (opt4)
aggagagucccgcagucggcguccagcggcucugcuuguucgugugugugucguugcaggccuuauucaagcuuaccaugggccagaucgugaccuucuuccaggaggugccccacgugaucgaggaggugaugaacaucgugcugaucgcccugagcauccuggccgugcugaagggccuguacaacuucgccaccugcggccuggugggccugcugaccuuccugcugcugugcggcagaagcugcaccaccggccuguacaagggcguguacgagcugcagacccuggagcugaacauggagacccugaacaugugcaugccccugagcugcaccaagaacaacagccaccacuacaucauggugggcaacgagaccggccuggagcugacccugaccaacaccagcaucaucaaccacaaguucugcaaccugagcgacgcccacaagaagaaccuguacgaccacgcccugaugagcaucaucagcaccuuccaccugagcauccccaacuucaaccaguacgaggccaugagcugcgacuucaacggcggcaagaucagcgugcaguacaaccugagccacagcuacgccggcgacgccgccgaccacugcggcaccguggccaacggcgugcugcagaccuucaugagaauggccuggggcggcagcuacaucgcccuggacagcggcagaggcagaugggacugcaucaugaccagcuaccaguaccugaucauccagaacaccaccugggaggaccacugccaguucagcagacccagccccaucggcuaccugggccugcugagccagagaaccagagacaucuacaucagcagaagacugcugggcaccuucaccuggacccugagcgacagcgagggcaaggacacccccggcggcuacugccugaccagauggaugcugaucgaggccgagcugaagugcuucggcaacaccgccguggccaagugcaacgagaagcacgacgaggaguucugcgacaugcugagacuguucgacuucugcaagcaggccauccagagacugaaggccgaggcccagaugagcauccagcugaucaacaaggccgugaacgcccugaucaacgaccagcuggugaugaagaaccaccugagagacaucaugggcauccccuacugcaacuacagcagauacugcuaccugaaccacaccaccaccggcagaaccagccugcccaagugcugccuggugagcaacggcagcuaccugaacgagacccacuucagcgacgacaucgagcagcaggccgacaacaugaucaccgagaugcugcagaaggaguacauggagagacagggcaagaccccccugggccugguggaccuguucguguucagcaccagcuucuaccugaucagcaucuuccugcaccuggugaagauccccacccacagacacaucgugggcaagagcugccccaagccccacagacugaaccacaugggcaucugcagcugcggccuguacaagcagcccggcgugcccgugaaguggaagagaugaggacuagucccuguucccagagcccacuuuuuuuucuuuuuuugaaauaaaauagccugucuuucagaucucaaaggcucuuuucagagccaccaaaaaaaaaaaaaaaaaaaaaaaaaaaaaaaaaaaaaaaaaaaaaaaaaaaaaaaaaaaaaaaaaaaaaaaaaaaaaaaaaaaaaaaaaaaaaaaaaaaaa

SEQ ID NO: 40287 - RNA, 1748 nt, Artificial Sequence
  mRNA product Design a-1 (hSL-A100) comprising derived and/or modified sequence from LASV(G733-SLE-2010;Clade IV)__AIT17154__GPCmut12 (opt4)
aggagagucccgcagucggcguccagcggcucugcuuguucgugugugugucguugcaggccuuauucaagcuuaccaugggccagaucgugaccuucuuccaggaggugccccacgugaucgaggaggugaugaacaucgugcugaucgcccugagcauccuggccgugcugaagggccuguacaacuucgccaccugcggcaucgugggccuggugagcuuccugcugcugugcggcagaagcugcaccaccagccuguacaagggcguguacgagcugcagacccuggagcugaacauggagacccugaacaugugcaugccccugagcugcaccaagaacaacagccaccacuacaucauggugggcaacgagaccggccuggagcugacccugaccaacaccagcaucaucaaccacaaguucugcaaccugagcgacgcccacaagaagaaccuguacgaccacgcccugaugagcaucaucagcaccuuccaccugagcauccccaacuucaaccaguacgaggccaugagcugcgacuucaacggcggcaagaucagcgugcaguacaaccugagccacagcuacgccggcgacgccgccaaccacugcggcaccaucgccaacggcgugcugcagaccuucaugagaauggccuggggcggcagcuacaucgcccuggacagcggcagagacagaugggacugcaucaugaccagcuaccaguaccugaucauccagaacaccaccugggaggaccacugccaguucagcagacccagccccaucggcuaccugggccugcugagccagagaaccagagacaucuacaucagcagaagacugcugggcaccuucaccuggacccugagcgacagcgagggcaaggacacccccggcggcuacugccugaccagauggaugcugaucgaggccgagcugaagugcuucggcaacaccgccguggccaagugcaacgagaagcacgacgaggaguucugcgacaugcugagacuguucgacuucugcaagcaggccauccagagacugaaggccgaggcccagaugagcauccagcugaucaacaaggccgugaacgcccugaucaacgaccagcugaucaugaagaaccaccugagagacaucaugggcauccccuacugcaacuacagcaaguacugcuaccugaaccacaccaccaccggcaagaccagccugcccaagugcugccuggugagcaacggcagcuaccugaacgagacccacuucagcgacgacaucgagcagcaggccgacaacaugaucaccgagaugcugcagaaggaguacauggagagacagggcaagaccccccugggccugguggaccuguucguguucagcaccagcuucuaccugaucagcaucuuccugcaccuggugaagauccccacccacagacacguggugggcaagagcugccccaagccccacagacugaaccacaugggcaucugcagcugcggccuguacggccagcccggcgugcccgugaaguggaagagaugaggacuagucccuguucccagagcccacuuuuuuuucuuuuuuugaaauaaaauagccugucuuucagaucucaaaggcucuuuucagagccaccaaaaaaaaaaaaaaaaaaaaaaaaaaaaaaaaaaaaaaaaaaaaaaaaaaaaaaaaaaaaaaaaaaaaaaaaaaaaaaaaaaaaaaaaaaaaaaaaaaaaa

SEQ ID NO: 40288 - RNA, 1748 nt, Artificial Sequence
  mRNA product Design a-1 (hSL-A100) comprising derived and/or modified sequence from MOPV/LASV reassortant(IGS-1;Clade IV)__AFY05576__GPCmut12 (opt4)
aggagagucccgcagucggcguccagcggcucugcuuguucgugugugugucguugcaggccuuauucaagcuuaccaugggccagaucgugaccuucuuccaggaggugccccacgugaucgaggaggugaugaacaucgugcugaucgcccugagcgugcuggccgugcugaagggccuguacaacuucgccaccugcggccuggugggccuggugaccuuccugcugcugugcggcagaagcugcaccaccagccuguacaagggcguguacgagcugcagacccuggagcugaacauggagacccugaacaugugcaugccccugagcugcaccaagaacaacagccaccacuacaucauggugggcaacgagaccggccuggagcugacccugaccaacaccagcaucaucaaccacaaguucugcaaccugagcgacgcccacaagaagaaccuguacgaccacgcccugaugagcaucaucagcaccuuccaccugagcauccccaacuucaaccaguacgaggccaugagcugcgacuucaacggcggcaagaucagcgugcaguacaaccugagccacagcuacgccggcgacgccgccaaccacugcggcaccguggccaacggcgugcugcagaccuucaugagaauggccuggggcggcagcuacaucgcccuggacagcggcagaggcaacugggacugcaucaugaccagcuaccaguaccugaucauccagaacaccaccugggaggaccacugccaguucagcagacccagccccaucggcuaccugggccugcugagccagagaaccagagacaucuacaucagcagaagacugcugggcaccuucaccuggacccugagcgacagcgagggcgaggacacccccggcggcuacugccugaccagauggaugcugaucgaggccgagcugaagugcuucggcaacaccgccguggccaagugcaacgagaagcacgacgaggaguucugcgacaugcugagacuguucgacuucugcaagcaggccauccagagacugaaggccgaggcccagaugagcauccagcugaucaacaaggccgugaacgcccugaucaacgaccagcugaucaugaagaaccaccugagagacaucaugggcauccccuacugcaacuacagcaaguacugcuaccugaaccacaccaccaccggcagaaccagccugcccaagugcugccuggugagcaacggcagcuaccugaacgagacccacuucagcgacgacaucgagcagcaggccgacaacaugaucaccgagaugcugcagaaggaguacauggagagacagggcaagaccccccugggccugguggaccuguucguguucagcaccagcuucuaccugaucagcaucuuccugcaccuggugaagauccccacccacagacacaucgugggcaagagcugccccaagccccacagacugaaccacaugggcaucugcagcugcggccuguacaagcagcccggcgugcccgugaaguggaagagaugaggacuagucccuguucccagagcccacuuuuuuuucuuuuuuugaaauaaaauagccugucuuucagaucucaaaggcucuuuucagagccaccaaaaaaaaaaaaaaaaaaaaaaaaaaaaaaaaaaaaaaaaaaaaaaaaaaaaaaaaaaaaaaaaaaaaaaaaaaaaaaaaaaaaaaaaaaaaaaaaaaaaa

SEQ ID NO: 40289 - RNA, 1748 nt, Artificial Sequence
  mRNA product Design a-1 (hSL-A100) comprising derived and/or modified sequence from LASV(LM765-SLE-2012;Clade IV)__AIT17814__GPCmut12 (opt4)
aggagagucccgcagucggcguccagcggcucugcuuguucgugugugugucguugcaggccuuauucaagcuuaccaugggccagaucgugaccuucuuccaggaggugccccacgugaucgaggaggugaugaacaucgugcugaucgcccugagcauccuggccgugcugaagggccuguacaacuucgccaccugcggccuggugggccuggugaccuuccugcugcugugcggcagaagcugcaccaccagccuguacaagggcguguacgagcugcagacccuggagcugaacauggagacccugaacaugugcaugccccugagcugcaccaagaacaacagccaccacuacaucauggugggcaacgagaccggccuggagcugacccugaccaacaccagcaucaucgaccacaaguucugcaaccugagcgacgcccacagaaagaaccuguacgaccacgcccugaugagcaucaucagcaccuuccaccugagcauccccaacuucaaccaguacgaggccaugagcugcgacuucaacggcggcaagaucagcgugcaguacaaccugagccacagcuacgccaaggacgccgccgaccacugcggcaccguggccaacggcgugcugcagaccuucaugagaauggccuggggcggcagcuacaucgcccuggacagcggcagaggcagaugggacugcaucaugaccagcuaccaguaccugaucauccagaacaccaccugggaggaccacugccaguucagcagacccagccccaucggcuaccugggccugcugagccagagaaccagagacaucuacaucagcagaagacugcugggcaccuucaccuggacccugagcgacagcgagggcaaggacacccccggcggcuacugccugaccagauggaugcugaucgaggccgagcugaagugcuucggcaacaccgccguggccaagugcaacgagaagcacgacgaggaguucugcgacaugcugagacuguucgacuucugcaagcaggccauccagagacugaaggccgaggcccagaugagcauccagcugaucaacaaggccgugaacgcccugaucaacgaccagcugaucaugaagaaccaccugagagacaucaugggcauccccuacugcaacuacagcaaguacugcuaccugaaccacaccaccaccggcaagaccagccugcccaagugcugccuggugagcaacggcagcuaccugaacgagacccacuucagcgacgacaucgagcagcaggccgacaacaugaucaccgagaugcugcagaaggaguacauggagagacagggcaagaccccccugggccugguggaccuguucguguucagcaccagcuucuaccugaucagcaucuuccugcaccuggugaagauccccacccacagacacaucgugggcaagcccugccccaagccccacagacugaaccacaugggcaucugcagcugcggccuguacaagcagcccggcgugcccgugaaguggaagagaugaggacuagucccuguucccagagcccacuuuuuuuucuuuuuuugaaauaaaauagccugucuuucagaucucaaaggcucuuuucagagccaccaaaaaaaaaaaaaaaaaaaaaaaaaaaaaaaaaaaaaaaaaaaaaaaaaaaaaaaaaaaaaaaaaaaaaaaaaaaaaaaaaaaaaaaaaaaaaaaaaaaaa

SEQ ID NO: 40290 - RNA, 1748 nt, Artificial Sequence
  mRNA product Design a-1 (hSL-A100) comprising derived and/or modified sequence from LASV(LM776-SLE-2012;Clade IV)__AIT17824__GPCmut12 (opt4)
aggagagucccgcagucggcguccagcggcucugcuuguucgugugugugucguugcaggccuuauucaagcuuaccaugggccagaucgugaccuucuuccaggaggugccccacgugaucgaggaggugaugaacaucgugcugaucgcccugagcauccuggccgugcugaagggccuguacaacuucgccaccugcggccuggugggccuggugaccuuccugcugcugugcggcagaagcugcaccaccagcguguacaagggcguguacgagcugcagacccuggagcugaacauggagacccugaacaugugcaugccccugagcugcaccaagaacaacagccaccacuacaucauggugggcaacgagaccggccuggagcugacccugaccaacaccagcaucaucaaccacaaguucugcaaccugagcgacgcccacaagaagaaccuguacgaccacgcccugaugagcaucaucagcaccuuccaccugagcauccccaacuucaaccaguacgaggccaugagcugcgacuucaacggcggcaagaucagcgugcaguacaaccugagccacagcuacgccggcgacgccgccaaccacugcggcaccguggccaacggcgugcugcagaccuucaugagaauggccuggggcggcagcuacaucgcccuggacagcggccacggcaagugggacugcaucaugaccagcuaccaguaccugaucauccagaacaccaccugggaggaccacugccaguucagcagacccagccccaucggcuaccugggccugcugagccagagaaccagagacaucuacaucagcagaagacugcugggcaccuucaccuggacccugagcgacagcgagggcaaggacacccccggcggcuacugccugaccagauggaugcugaucgaggccgagcugaagugcuucggcaacaccgccguggccaagugcaacgagaagcacgacgaggaguucugcgacaugcugagacuguucgacuucugcaagcaggccauccagagacugaaggccgaggcccagaugagcauccagcugaucaacaaggccgugaacgcccugaucaacgaccagcugaucaugaagaaccaccugagagacaucaugggcauccccuacugcaacuacagcaaguacugcuaccugaaccacaccaccaccggcaagaccagccugcccaagugcugccuggugagcaacggcagcuaccugaacgagacccacuucagcgacgacaucgagcagcaggccgacaacaugaucaccgagaugcugcagaaggaguacauggagagacagggcaagaccccccugggccugguggaccuguucguguucagcaccagcuucuaccugaucagcaucuuccugcaccuggugaagauccccacccacagacacaucgugggcaagagcugccccaagccccacagacugaaccacaugggcaucugcagcugcggccuguacaagcagcccggcgugcccgugagauggaagagaugaggacuagucccuguucccagagcccacuuuuuuuucuuuuuuugaaauaaaauagccugucuuucagaucucaaaggcucuuuucagagccaccaaaaaaaaaaaaaaaaaaaaaaaaaaaaaaaaaaaaaaaaaaaaaaaaaaaaaaaaaaaaaaaaaaaaaaaaaaaaaaaaaaaaaaaaaaaaaaaaaaaaa

SEQ ID NO: 40291 - RNA, 1748 nt, Artificial Sequence
  mRNA product Design a-1 (hSL-A100) comprising derived and/or modified sequence from LASV(Mad39;Clade IV)__ANH09722__GPCmut12 (opt4)
aggagagucccgcagucggcguccagcggcucugcuuguucgugugugugucguugcaggccuuauucaagcuuaccaugggccagaucgugaccuucuuccaggaggugccccacgugaucgaggaggugaugaacaucgugcugaucgcccugagcauccuggccgugcugaagggccuguacaacguggccaccugcggccugaucggccuggugaccuuccugcugcugugcggcagaagcugcaccaccacccuguacaagggcguguacgagcugcaggcccuggagcugaacauggagacccugaacaugugcaugccccugagcugcaccaagaacaacagccaccacuacaucagagugggcaacgagaccggccuggagcugacccugaccaacaccagccugaucaaccacaaguucugcaaccugagcgacgcccacaagaagaaccuguacgaccacgcccugaugagcaucaucagcaccuuccaccugagcauccccaacuucaaccaguacgaggccaugagcugcgacuucaacgacggcaagaucagcgugcaguacaaccugagccacaccuacgccggcgacaccgccaaccacugcggcaccguggccaacggcgugcugcagaccuucaugagaauggccuggggcggcagcuacaucgcccuggacagcggcagaggcggcugggacugcaucaugaccagcuaccaguaccugaucauccagaacaccaccugggaggaccacugccaguucagcagacccagccccaucggcuaccugggccugcugagccagagaaccagagacaucuacaucagcagaagacugcugggcaccuucaccuggacccugagcgacagcgagggcaaggacacccccggcggcuacugccugaccagauggaugcugaucgaggccgagcugaagugcuucggcaacaccgccguggccaagugcaacgagaagcacgacgaggaguucugcgacaugcugagacuguucgacuucugcaagcaggccauccagagacugaaggccgaggcccagaugagcauccagcugaucaacaaggccgugaacgcccugaucaacgaccagcugaucaugaagaaccaccugagagacaucaugggcauccccuacugcaacuacagcaaguacugcuaccugaaccacaccgugaccggcaagaccagccugcccaagugcugccuggugagcaacggcagcuaccugaacgagacccacuucagcgacgacaucgagcagcaggccgacaacaugaucaccgagaugcugcagaaggaguacauggagagacagggcaagaccccccugggccugguggaccuguucguguucagcaccagcuucuaccugaucagcaucuuccugcaccuggugaagauccccacccacagacacguggugggcaagcccugccccaagccccacagacugaaccacaugggcaucugcagcugcggcuucuacaagcagcccggcgugcccgugagauggaagagaugaggacuagucccuguucccagagcccacuuuuuuuucuuuuuuugaaauaaaauagccugucuuucagaucucaaaggcucuuuucagagccaccaaaaaaaaaaaaaaaaaaaaaaaaaaaaaaaaaaaaaaaaaaaaaaaaaaaaaaaaaaaaaaaaaaaaaaaaaaaaaaaaaaaaaaaaaaaaaaaaaaaaa

SEQ ID NO: 40292 - RNA, 1748 nt, Artificial Sequence
  mRNA product Design a-1 (hSL-A100) comprising derived and/or modified sequence from LASV(Z0947-SLE-2011;Clade IV)__AIT17840__GPCmut12 (opt4)
aggagagucccgcagucggcguccagcggcucugcuuguucgugugugugucguugcaggccuuauucaagcuuaccaugggccagaucgugaccuucuuccaggaggugccccacgugaucgaggaggugaugaacaucgugcugaucgcccugagcauccuggccgugcugaagggccuguacaacuucgccaccugcggccuggugggccuggugaccuuccugcugcugugcggcagaagcugcaccaucagccuguacaagggcguguacgagcugcagacccuggagcugaacauggagacccugaacaugugcaugccccugagcugcaccaagaacaacagccaccacuacaucauggugggcaacgagaccggccuggagcugacccugaccaacaccagcaucaucaaccacaaguucugcaaccugagcgacgcccacaagaagaaccuguacgaccacgcccugaugagcaucaucagcaccuuccaccugagcauccccaacuucaaccaguacgaggccaugagcugcgacuucaacggcggcaagaucagcgugcaguacaaccugagccacagcuacgccggcgacgccgccaaccacugcggcaccguggccaacggcgugcugcagaccuucaugagaauggccuggggcggcagcuacaucgcccuggacagcggcagagacagaugggacugcaucaugaccagcuaccaguaccugaucauccagaacaccaccugggaggaccacugccaguucagcagacccagccccaucggcuaccugggccugcugagccagagaaccagagacaucuacaucagcagaagacugcugggcaccuucaccuggacccugagcgacagcgagggcaaggacacccccggcggcuacugccugaccagauggaugcugaucgaggccgagcugaagugcuucggcaacaccgccguggccaagugcaacgagaagcacgacgaggaguucugcgacaugcugagacuguucgacuucugcaagcaggccauccagagacugaaggccgaggcccagaugagcauccagcugaucaacaaggccgugaacgcccugaucaacgaccagcugaucaugaagaaccaccugagagacaucaugggcauccccuacugcaacuacagcaaguacugcuaccugaaccacaccaccaccggcaagaccagccugcccaagugcugccuggugagcaacggcagcuaccugaacgagacccacuucagcgacgacaucgagcagcaggccgacaacaugaucaccgagaugcugcagaaggaguacauggagagacagggcaagaccccccugggccugguggaccuguucguguucagcaccagcuucuaccugaucagcaucuuccugcaccuggugaagauccccacccacagacacaucgugggcaagcccugccccaagccccacagacugaaccacaugggcaucugcagcugcggccuguacaagcagcccggcgugcccgugaaguggaagagaugaggacuagucccuguucccagagcccacuuuuuuuucuuuuuuugaaauaaaauagccugucuuucagaucucaaaggcucuuuucagagccaccaaaaaaaaaaaaaaaaaaaaaaaaaaaaaaaaaaaaaaaaaaaaaaaaaaaaaaaaaaaaaaaaaaaaaaaaaaaaaaaaaaaaaaaaaaaaaaaaaaaaa

SEQ ID NO: 40293 - RNA, 1748 nt, Artificial Sequence
  mRNA product Design a-1 (hSL-A100) comprising derived and/or modified sequence from LASV(Josiah;Clade IV)__NP_694870__GPCmut12 (opt5)
aggagagucccgcagucggcguccagcggcucugcuuguucgugugugugucguugcaggccuuauucaagcuuaccaugggccagaucgugaccuucuuucaagaggucccccacguuauugaagaggugaugaacaucgugcugauugcccucagcguccuggcugugcuuaaggggcuguacaauuucgccacaugcggacucguuggccuggugacguuucuucugcucugugggagauccugcaccacaucucuguauaaaggagucuacgaacugcagacccucgagcugaacauggaaacacuuaauauguguaugccucugagcugcaccaagaacaauucccaucacuauaucauggugggcaacgagacagggcucgagcugacccuuacgaauaccucuauuaucaaccauaaauucuguaaucugagcgacgcgcacaagaaaaaccucuacgaucaugcucugauguccaucauuucuacauuucaccugagcaucccgaauuucaaccaguaugaagccauguccugcgacuuuaauggaggcaagauuagcguucaguacaaccucucucacuccuaugccggcgaugcugccaaucauugugggaccguggcuaacggaguccugcaaacauucaugcggauggccuggggcgggagcuacaucgcgcuugacucuggacgcggcaacugggauugcauuaugaccuccuaccaguaucugaucauucagaauacgacaugggaggaccacugucaguuuagcagacccucuccuaucggguaccucggacugcuuucccaacggacccgcgauaucuauauuagcagacggcugcucggcacauucaccuggacccuguccgacucugaaggcaaggauacacccgggggauacugccugacgcgcuggaugcucaucgaggccgagcugaaauguuuuggcaacaccgcuguggccaagugcaaugaaaaacaugacgaggaguucugcgauaugcuuagacuguuugacuucuguaagcaggcuauucagcggcucaaagccgaagcgcagaugagcauccaacugauuaacaaggccgugaaugcucuuaucaacgaucagcugaucaugaagaaucaccuccgcgacauuauggggaucccuuauugcaacuacuccaaauauuguuaccugaaucacacaaccacaggaagaaccagccugcccaagugcugucucgucucuaacggcuccuaccugaaugaaacgcauuucagcgacgauauugagcagcaagccgacaacaugaucacagagaugcuucagaaagaauauauggagcggcaggggaagaccccucugggacucguugaucuguuuguguucucuaccagcuuuuaccugauuuccaucuuccuucaccucgugaaaaucccgacacaucgccacauugucggcaagucuugccccaaaccucauagacugaaucacaugggcaucuguagcugcgggcuguauaagcagcccggagugccuguuaaguggaaacggugaggacuagucccuguucccagagcccacuuuuuuuucuuuuuuugaaauaaaauagccugucuuucagaucucaaaggcucuuuucagagccaccaaaaaaaaaaaaaaaaaaaaaaaaaaaaaaaaaaaaaaaaaaaaaaaaaaaaaaaaaaaaaaaaaaaaaaaaaaaaaaaaaaaaaaaaaaaaaaaaaaaaa

SEQ ID NO: 40294 - RNA, 1745 nt, Artificial Sequence
  mRNA product Design a-1 (hSL-A100) comprising derived and/or modified sequence from LASV(LP;Clade I)__AAF86701__GPCmut12 (opt5)
aggagagucccgcagucggcguccagcggcucugcuuguucgugugugugucguugcaggccuuauucaagcuuaccaugggccagaucauuaccuucuuucaagaggugccccacgucaucgaagagguuaugaacauugugcugaucgcccucagccugcuugcuauucugaaggggcucuacaauaucgccacaugcggaaucauuggccugguggcguuccuuuuucugugugggaaauccugcucucucacgcugaagggaggcuaugaacugcagacccucgagcugaacauggaaacacuuaauauguguaugccucugagcugcaccaaaaacuccucucaucacuacaucagagucgggaaugagacaggacucgagcugacccuuacaaacaccagcauuaucaaucauaaguucuguaaccuguccgacgcucacaaaaagaaucucuaugaucaugcccugaugucuauuaucagcacguuucaccuguccauuccgaacuucaaucaguacgaagccaugagcugcgacuuuaacggcggcaagaucucugugcaguauaaucucucccacagcuacgcuggggaugccgcugagcauuguggaaccguugccaacggcgugcugcaaacauucaugcggauggcguggggagggcgcuauaucgcccuugacucuggcaaagggaauugggauugcauuaugaccuccuaccaguaccugaucauucagaacacaaccugggaagaccacugucaguuuagcagacccucuccuaucggauaucucggccugcuuucccaacggacgcgcgauauuuacaucagcagacggcugcucggcacauucaccuggacacuguccgacucugaggggaacgagacccccggaggcuauugccugacccgcuggaugcucaucgaagcugagcugaaguguuuugggaauacagccgucgcuaaaugcaacgaaaagcaugaugaggaguucugcgacaugcuuagacuguuugauuucuguaaacaggccauucggcgccucaaggcggaagcccagaugagcauccagcugauuaauaaggcugugaacgcccuuaucaaugaccaacugauuaugaaaaaccaccucagagauaucaugggaaucccuuacugcaauuauuccaaguacuguuaucugaaccacacgagcucuggccggaccucccugcccaaaugcugucucauuagcaaugggucuuaccugaacgagacacaguucagcgacgacaucgaacagcaagcugauaauaugauuaccgagaugcuucagaaggaauacaucgagcgccagggaaaaacaccucugggccucguugacauuuuuaucuucuccaccucuuuuuaucugauuagcaucuuccugcaucuuaucaagauuccgacgcacagacauaucgugggcaaacccugcccuaagccccaccggcucaaccauaugggggucuguuccugcggacuguacaagcacccuggcgugcccacaaaauggaagcgcugaggacuagucccuguucccagagcccacuuuuuuuucuuuuuuugaaauaaaauagccugucuuucagaucucaaaggcucuuuucagagccaccaaaaaaaaaaaaaaaaaaaaaaaaaaaaaaaaaaaaaaaaaaaaaaaaaaaaaaaaaaaaaaaaaaaaaaaaaaaaaaaaaaaaaaaaaaaaaaaaaaaaa

SEQ ID NO: 40295 - RNA, 1745 nt, Artificial Sequence
  mRNA product Design a-1 (hSL-A100) comprising derived and/or modified sequence from LASV(803213;Clade II)__AAF86703__GPCmut12 (opt5)
aggagagucccgcagucggcguccagcggcucugcuuguucgugugugugucguugcaggccuuauucaagcuuaccaugggccagaucauuaccuucuuucaagaggugccccacgucaucgaagagguuaugaacauugugcugaucgcccucagccugcuugcuauucugaaggggaucuacaauguggccacaugcggacucuucggccugaucuccuuucuucugcucugugggagaucuugcagcgucacguauaaaggaguguacgaacugcagacccuggagcucaacauggcgaaucugaacauguguaugccucuuuccugcacaaagaauaacucucaucacuauauuaugguuggcaaugaaaccgggcuggagcucacacugaccaacacaagcaucauuaaucauaaauucuguaaccuuuccgacgcucacaagaaaaaucuguacgaucaugcccucaugucuaucauuagcaccuuucaccuguccaucccgaacuucaaucaguaugaggccaugagcugcgacuuuaacggaggcaagauuucugugcaguacaaucugucccacagcuucgcugucgaugccgcuaaccauuguggcacgaucgccaacggggugcuccaaaccuuuaugcggauggcguggggaggcucuuauaucgcccuggacuccgggaagggaaauugggauugcauuaugacaagcuaccaguaccuuaucauucagaacaccacaugggaagaccacugucaguucucucgccccuccccuaucggcuaucuggggcuccugagccaaagaacccgggauauuuacaucucccgcagacuucugggaacguuuacauggacccucucugacagcgagggcaaugaagcucccggcggguauugccugacacgguggaugcugaucgaggccgagcucaaauguuucggaaacaccgcuguugccaagugcaaugaaaaacaugaugaggaauuuugcgacaugcugcgccuuuucgauuucuguaagcaggcgauuaaaagacugaagaccgaggcccagauguccauccagcucauuaacaaggcugugaaugcccugaucaacgaccaacuuauuaugaaaaaucaucugcgggauaucaugggcaucccuuacugcaacuauagccgcuacuguuaucucaaucacacagucacggggaagaccucucugcccagaugcugucugguguccaacggaagcuaccucaaugaaacacacuuuucugacgacauugagcagcaggcugauaacaugaucaccgagaugcugcaaaaagaauacauggaccggcagggcaagacaccucuugggcugguggaucucuucgucuuuagcaccuccuucuaucugauuucuaucuuucugcaccuuguuaaaauuccgacgcaucgccacaucgugggaaagcccugcccuaaaccccauagacucaaucacaugggcauuuguagcugcggccuguacaagcacccuggggugcccgucaaguggaaacggugaggacuagucccuguucccagagcccacuuuuuuuucuuuuuuugaaauaaaauagccugucuuucagaucucaaaggcucuuuucagagccaccaaaaaaaaaaaaaaaaaaaaaaaaaaaaaaaaaaaaaaaaaaaaaaaaaaaaaaaaaaaaaaaaaaaaaaaaaaaaaaaaaaaaaaaaaaaaaaaaaaaaa

SEQ ID NO: 40296 - RNA, 1745 nt, Artificial Sequence
  mRNA product Design a-1 (hSL-A100) comprising derived and/or modified sequence from LASV(GA391;Clade III)__CAA36645__GPCmut12 (opt5)
aggagagucccgcagucggcguccagcggcucugcuuguucgugugugugucguugcaggccuuauucaagcuuaccaugggccagaucgugaccuucuuucaagaggucccccacguuauugaagaggugaugaacaucgugcugauugcccucagcauccuggcuauucuuaaggggcuguacaaugucgccacaugcggacucaucggccuggugacguuccuucugcucuccgggagaucuuguagccugaucuauaaaggaaccuacgaacugcagacacucgagcugaacauggaaacccuuaauaugugcaugccucuguccuguacaaagaacaauucucaucacuauauucggguuggcaacgagaccgggcucgagcugacacuuaccaauacgagcauccugaaccauaaauuuugcaaucucuccgacgcgcacaagcgcaaccuguacgaucauucucugaugagcauuaucuccaccuuccaccucagcauuccgaauuuuaaccaguaugaagcuaugucuugugacuucaauggaggcaaaaucacagugcaguacaaccugucccacagcuuugccgucgaugccgcuggccauugcgggacccuugccaauggagugcugcaaacauucaugagaauggcuuggggcgggucuuauauugcccucgacuccggacggggcaacugggauuguaucaugaccagcuaccaguaccugaucauucagaacacgacaugggacgaucacugccaguuuucucgccccuccccuaucggguaucuuggacugcucagccaaagaacccgggacauuuacaucucccgcagacugcugggcacauucaccuggacccucucugauagcgagggcaaugaaacacccgggggauauugucugacgcgguggaugcuuauugaggcggagcugaagugcuuuggcaacaccgccguugcuaaguguaaugaaaaacaugacgaggaguucugcgauaugcuccgccuguuugacuucugcaagcaggccaucagacggcuuaaaacagaagcucagauguccauccagcugauuaacaaggccgugaaugcgcucaucaacgaucaacugauuaugaaaaaucaucugcgcgacaucauggggauuccuuacuguaacuauagcagauacugcuaucucaaucacaccucuacaggaaagaccucccugccccgguguugccuuaucagcaacggcucuuaccugaaugaaacgaaguucagcgacgauaucgagcagcaggccgacaacaugauuacagagaugcuccaaaaagaauacaucgaucgccaggggaagaccccucugggacuggucgaccuuuuuguguucuccaccucuuuuuaucucauuagcaucuuccugcaccuggugaaaauuccgacacacagacauaucgucggcaagcccuguccuaaaccccaccggcucaaucauaugggcauuugcuccugugggcuguacaagcagccuggaguucccgugagauggaaacgcugaggacuagucccuguucccagagcccacuuuuuuuucuuuuuuugaaauaaaauagccugucuuucagaucucaaaggcucuuuucagagccaccaaaaaaaaaaaaaaaaaaaaaaaaaaaaaaaaaaaaaaaaaaaaaaaaaaaaaaaaaaaaaaaaaaaaaaaaaaaaaaaaaaaaaaaaaaaaaaaaaaaaa

SEQ ID NO: 40297 - RNA, 1748 nt, Artificial Sequence
  mRNA product Design a-1 (hSL-A100) comprising derived and/or modified sequence from LASV(AV;Clade V)__CCA30314__GPCmut12 (opt5)
aggagagucccgcagucggcguccagcggcucugcuuguucgugugugugucguugcaggccuuauucaagcuuaccaugggccagaucgugaccuucuuucaagaggucccccacguuauugaagaggugaugaacaucgugcugauugcccucagcauccuggcuguccuuaaggggcuguacaauauugccacaugcggacucaucggccugaucacguuccuucugcucugugggagauccugcucuagcaaccuguauaaaggaguguacgaacugcagucccucgaccugaauauggagacccuuaacauguguaugccucugucuugcacaaagaauaacagccaucacuauauucggguuggcaaugauaccgggcucgaacugacacuuaccaacacauccauccugaaucauaaauuuuguaaccucucugacgcgcacaagaaagaucuguacgaccaugcucugaugagcauuaucuccaccuuccaccucagcauuccgaauuuuaaccaguaugaggccaugucuugcgauuucaauggaggcaagaucuccgugcaguacaaccugagccacucuuaugccauugacgcugccaaucauuguggcacggucgcuaacgggauccuucaaaccuuuaugcgcauggccuggggaggcuccuacaucgcgcuggauagcgggagaggaaacugggacugcauuaugacaucuuaccaguaucucaucauucagaauaccacaugggagaaccacugucaguucucccggcccagcccuaucggcuaccuggggcuucugucccaacgcaccagagauauuuauaucucucggcgccuccugggaacguuuacauggacccugagcgacuccgaaggcaaugccacacccggcggguacugccucaccagauggaugcugaucgaggcugaacuuaaguguuucggaaacaccgccguggcuaaaugcaaugagaagcaugaugaggaauuuugcgacaugcugcgccucuucgauuuuuguaaacaggccauuagccggcugaagucugaggcgcagauguccauccagcuuauuaacaaagccguuaaugcucugaucaacgaccaacucauuaugaagaaucaccugagagacaucaugggcaucccuuauugcaacuacagcaaguauuguuaccugaaucacacaauuacggggaaaaccucucuccccaagugcugucuggugagcaacggauccuaccuuaaugaaacacauuucucugaugacaucgagcagcaggccgauaacaugauuaccgaaaugcugcaaaaagaguauauggagcggcagggcaagacaccucucgggcuggucgaccuguucguguuuagcaccuccuucuaccuuaucagcauuuuucuccgccuggugaaaaucccgacgcacagacauauugucggaaagcccugcccuaaaccccaccggcugaaucauaugggcaucuguucuugcggccucuauaagcagccugggguucccgugcgcuggaagagaugaggacuagucccuguucccagagcccacuuuuuuuucuuuuuuugaaauaaaauagccugucuuucagaucucaaaggcucuuuucagagccaccaaaaaaaaaaaaaaaaaaaaaaaaaaaaaaaaaaaaaaaaaaaaaaaaaaaaaaaaaaaaaaaaaaaaaaaaaaaaaaaaaaaaaaaaaaaaaaaaaaaaa

SEQ ID NO: 40298 - RNA, 1745 nt, Artificial Sequence
  mRNA product Design a-1 (hSL-A100) comprising derived and/or modified sequence from LASV(Togo/2016/7082;Clade VI)__AMR44577__GPCmut12 (opt5)
aggagagucccgcagucggcguccagcggcucugcuuguucgugugugugucguugcaggccuuauucaagcuuaccaugggccagaucauuaccuucuuucaagaggugccccacgucaucgaagagguuaugaacauugugcugaucgcccucagccugcuugcuauucugaaggggguguacaaugucgccacaugcggaaucaucggccucgugacguuccuguuucuuugugggagauccugcucucugauuuauaaaggaagcuacgaacuccagacccuggagcugaacauggaaacacucaauauguguaugccucuguccugcaccaagaacucuagccaucacuauauccggguuggcaaugagacagggcuugagcugacccucacaaacaccuccauuaucaaucauaaauucuguaaccugucugacgcgcacaagcgcaaucuuuacgaucaugcucugaugagcauucucuccacguuucaccugagcaucccgaacuucaaucaguaugaagccaugucuugcgacuuuaacggaggcaaaauuuccgugcaguacaaucugagccacgccuaugcugucgaugccgcugagcauuguggcaccguggccaacgggguucuccaaacauucaugagaauggcguggggaggcucuuacaucgcccuggacuccgggcggggaaauugggauugcaucaugaccagcuaccaguaucuuauuauccagaacacaaccugggaagaccacugucaguuuucucgccccuccccuauuggcuaccuggggcuccugagccaaagaacgcgggauaucuauauuucccgcagacuucugggaacauucaccuggacacucucugacagcgagggcaacgagacccccggcggguacugccugacccgguggaugcugaucgaagcugagcucaaguguuuuggaaauacagccguggcuaagugcaacgaaaaacaugaugaggaguucugcgacaugcugcgccuuuuugauuucuguaagcaggccauccagagacugaaauccgaagcgcagaugagcauucaacucaucaauaaggccgucaacgcucugauuaaugaccagcuuaucaugaaaaaccaucugcgggauaugaugggcauuccuuauugcaauuacucuaaguauuguuaccucaaccacacguccagcgggcgcaccucucugcccaagugcugucuggugagcaauggauccuaccucaacgagacacacuucucugacgacaucgaacagcaagccgauaauaugaucaccgagaugcugcagaaagaauauauugacagacagggcaagacaccucuugggcugguggaucucuuugucuucagcaccuccuuuuaccugaucagcauuuuccugcaccuuaucaaaauuccgacgcaucggcacaucguuggaaagcccugcccuaaaccccaucgccucaaccacaugggcauuuguucuugcggccuguauaagcagccuggggugcccacaagauggaaacggugaggacuagucccuguucccagagcccacuuuuuuuucuuuuuuugaaauaaaauagccugucuuucagaucucaaaggcucuuuucagagccaccaaaaaaaaaaaaaaaaaaaaaaaaaaaaaaaaaaaaaaaaaaaaaaaaaaaaaaaaaaaaaaaaaaaaaaaaaaaaaaaaaaaaaaaaaaaaaaaaaaaaa

SEQ ID NO: 40299 - RNA, 1745 nt, Artificial Sequence
  mRNA product Design a-1 (hSL-A100) comprising derived and/or modified sequence from LASV(KAK-428;Clade n.d. (VII))__ANH09740__GPCmut12 (opt5)
aggagagucccgcagucggcguccagcggcucugcuuguucgugugugugucguugcaggccuuauucaagcuuaccaugggccagaucgugaccuucuuucaagaggucccccacguuauugaagaggugaugaacaucgugcugauugcccucagccugcuugcuauccugaaggggcucuacaauuucgccacaugcggagucauuggccugaucacguuucuucugcucugugggagauccugcucugcgaccuauaaaggacaguacgaacugcagacacuggagcucaacauggaaagccugaauauguguaugccucuuuccugcaccaagaacaauucucaucacuauauccgggcuggcaacaauacagggcuggagcucacccugacaaacaccagcauuaucucccauaaauucuguaaucuuucugacgcccacaagaaaaaccuguacgaucauacgcucaugagcauuaucaccacauuucaccuguccauuccgaauuucaaccaguaugaggccaugagcugcgacuuuaauggaggcaagaucucuauucaauacaaccugucccacagcuaugcuggcgaugccgcucagcauugugggaccguggccaauggaguucuccagacauucaugcgcauggcguggggcgggucuuaccuggcccuugacuccggaagacggggcugggauugcaucaucagcucuuaccaguaucugauuauccaaaacaccacgugggacgaucacugucaguuuucccgccccagcccuauuggguaccucggauucgugucccagaagacaagagacaucuauauuucucggcgccugcuuggcaccuuuacauggacccugagcgauuccgaaggccaugacaugcccgggggauacugccucaccagauggaugcugaucgaggcugaucugaaauguuucggcaacacagccgucgcuaagugcaaugaaaaacacgacgaggaguuuugcgauauguggcgccucuucgacuucuguaagcaggccauccaacggcugaaagcggaagcccagaugaacauucagcuuaucaauaaggcugugaacgcccugauuaaugaccaacucaugaugaagaaccaccugagagauaucauggggauuccuuauugcaauuacagcaaauuuuguuaucuuaacaauacgaccacaggacggaccucucugccccgcugcugucucaucuccaacggcagcuaccugaaugagacacauuucucugacgauaucgaacagcaggcugacaacaugauuaccgagaugcugcagaaggaauacauggauagacaagggaaaacgccucucggacugguugaccuuuuuguguucagcacauccuuuuaucugaucaccauuuuccuccaccuggucaagaucccgacccaucggcacauugugggcaaacccugcccuaagccccaucgccugaaucacaugggcaucuguucuugcgggcuuuacaaacagccuggagugcccgucagauggaagcggugaggacuagucccuguucccagagcccacuuuuuuuucuuuuuuugaaauaaaauagccugucuuucagaucucaaaggcucuuuucagagccaccaaaaaaaaaaaaaaaaaaaaaaaaaaaaaaaaaaaaaaaaaaaaaaaaaaaaaaaaaaaaaaaaaaaaaaaaaaaaaaaaaaaaaaaaaaaaaaaaaaaaa

SEQ ID NO: 40300 - RNA, 1745 nt, Artificial Sequence; identical to SEQ ID NO: 40294
  mRNA product Design a-1 (hSL-A100) comprising derived and/or modified sequence from LASV(Pinneo-NIG-1969;Clade I)__AIT17836__GPCmut12 (opt5)

SEQ ID NO: 40301 - RNA, 1745 nt, Artificial Sequence
  mRNA product Design a-1 (hSL-A100) comprising derived and/or modified sequence from LASV(ISTH0009-NIG-2011;Clade II)__AIT17404__GPCmut12 (opt5)
aggagagucccgcagucggcguccagcggcucugcuuguucgugugugugucguugcaggccuuauucaagcuuaccaugggccagaucauuaccuucuuucaagaggugccccacgucaucgaagagguuaugaacauugugcugaucgcccucagccugcuugcuauucugaaggggaucuacaauguggccacaugcggacucuucggccuggucuccuuucuucugcucugugggagaucuugcagcacgaccuauaaaggaguguacgaacugcagacacuggagcucgacauggcgucccugaacauguguaugccucuuucuugcaccaagaauaacagccaucacuauaucaugguuggcaaugaaacagggcuggagcucacccugacaaacaccuccauuaucaaucauaaauucuguaaccuuucugaugcucacaagaaaaaucuguacgaccaugcccucaugagcauuaucuccacguuucaccugagcauuccgaacuucaaucaguaugaggccaugucuugcgauuuuaacggaggcaagaucuccgugcaguacaaucugagccacgcuuaugccgucgacgcugccaaccauuguggcaccauugcgaauggggugcuccaaacauucaugcggauggccuggggaggcucuuacaucgcucuggauuccgggaagggaagcugggacugcaucaugaccucuuaccaguaucuuauuauccagaacacaaccugggaagaucacugucaguuuucccgccccagcccuauuggcuaccuggggcuccugucccaaagaacgcgggacaucuauauuucucgcagacuucugggaacauucaccuggacacucagcgauuccgagggcaacgaaacccccggcggguacugccugacccgguggaugcugaucgaggccgagcucaaauguuuuggaaauacagcuguugccaagugcaacgaaaaacaugacgaggaguucugcgauaugcugcgccuuuuugacuucuguaagcaggcgaucagacggcugaaaacggaagcccagaugagcauucagcucaucaauaaggcugugaacgcccugauuaaugaucaacuuaucaugaagaaccaucugcgcgacauuaugggcaucccuuauugcaauuacucuaaauauuguuaccucaaccacaccgucacagggaagaccucccugcccagaugcugucuggugagcaauggaucuuaccucaacgaaacacacuucagcgacgauaucgagcagcaggcugacaauaugauuaccgagcugcuucaaaaagaauauauggaucggcagggcaagacgccucuggggcucguggaccuguuugucuucuccacaucuuuuuaccugaucagcauuuuccuucaccucaucaaaauuccgacccaucgccacaucaccggaaagcccugcccuaaaccccauagacugaaccacaugggcauuuguuccugcggccuguauaagcacccugggguucccgugaaguggaaacggugaggacuagucccuguucccagagcccacuuuuuuuucuuuuuuugaaauaaaauagccugucuuucagaucucaaaggcucuuuucagagccaccaaaaaaaaaaaaaaaaaaaaaaaaaaaaaaaaaaaaaaaaaaaaaaaaaaaaaaaaaaaaaaaaaaaaaaaaaaaaaaaaaaaaaaaaaaaaaaaaaaaaa

SEQ ID NO: 40302 - RNA, 1745 nt, Artificial Sequence
  mRNA product Design a-1 (hSL-A100) comprising derived and/or modified sequence from LASV(ISTH2010-NIG-2012;Clade II)__AIT17482__GPCmut12 (opt5)
aggagagucccgcagucggcguccagcggcucugcuuguucgugugugugucguugcaggccuuauucaagcuuaccaugggccagaucauuaccuucuuucaagaggugccccacgucaucgaagagguuaugaacauugugcugaucgcccucagccugcuugcuauucugaaggggaucuacaauguggccacaugcggacucuucggccuggucuccuuucuucugcucugugggagaucuugcagcacgaccuauaaaggaguguacgaacugcagacacuggagcucgacauggcgucccugaacauguguaugccucuuucuugcaccaagaauaacagccaucacuauaucaugguuggcaaugaaacagggcuggagcucacccugacaaacaccuccauuaucaaucauaaauucuguaaccuuucugaugcucacaagaaaaaucuguacgaccaugcccucaugagcauuaucuccacguuucaccugagcauuccgaacuucaaucaguaugaggccaugucuugcgauuuuaacggaggcaagaucuccgugcaguacaaucugagccacgcuuaugccgucgacgcugccaaccauuguggcaccauugcgaauggggugcuccaaacauucaugcggauggccuggggaggcucuuacaucgcucuggauuccgggaagggaagcugggacugcaucaugaccucuuaccaguaucuuauuauccagaacauuacaugggaagaucacugucaguuuucccgccccagcccuaucggcuaccuggggcuccugucccaaagaacccgggacauuuauaucucucgcagacuucugggaacguucacauggacccucagcgauuccgagggcaacgaaacacccggcggguacugccugacccgguggaugcugaucgaggccgagcucaaauguuuuggaaauaccgcuguugccaagugcaacgaaaaacaugacgaggaguucugcgauaugcugcgccuuuuugacuucuguaagcaggcgauuagacggcugaaaacagaagcccagaugagcauccagcucauuaauaaggcugugaacgcccugaucaaugaucaacuuauuaugaagaaccaucugcgcgacaucaugggcaucccuuauugcaauuacucuaaauauuguuaccucaaccacacggucaccgggaagacaucccugcccagaugcugucuggugagcaauggaucuuaccucaacgaaacccacuucagcgacgauauugagcagcaggcugacaauaugaucacagagcugcuucaaaaagaauauauugaucggcagggcaagaccccucuggggcucguggaccuguuugucuucuccacgucuuuuuaccugaucagcauuuuccuucaccucguuaaaaucccgacacaucgccacguggugggaaagcccugcccuaaaccccauagacugaaccacaugggcauuuguuccugcggccuguauaagcacccugggguccccgugaaguggaaacggugaggacuagucccuguucccagagcccacuuuuuuuucuuuuuuugaaauaaaauagccugucuuucagaucucaaaggcucuuuucagagccaccaaaaaaaaaaaaaaaaaaaaaaaaaaaaaaaaaaaaaaaaaaaaaaaaaaaaaaaaaaaaaaaaaaaaaaaaaaaaaaaaaaaaaaaaaaaaaaaaaaaaa

SEQ ID NO: 40303 - RNA, 1745 nt, Artificial Sequence
  mRNA product Design a-1 (hSL-A100) comprising derived and/or modified sequence from LASV(Lassa virus/H.sapiens-wt/NGA/2015/ISTH_0543;Clade II)__AVO03639__GPCmut12 (opt5)
aggagagucccgcagucggcguccagcggcucugcuuguucgugugugugucguugcaggccuuauucaagcuuaccaugggccagaucauuaccuucuuucaagaggugccccacgucaucgaagagguuaugaacauugugcugaucgcccucagccugcuugcuauucugaaggggaucuacaauguggccacaugcggacucuucggccuggucuccuuucuucugcucugugggagaucuugcagcacgaccuauaaaggaguguacgaacugcagacacuggagcucgacauggcgaaccugaauauguguaugccucuuuccugcaccaagaacaauucucaucacuauaucaugguuggcaacgaaacagggcuggagcucacccugacaaauaccagcauuaucaaccauaaauucuguaaucuuuccgaugcucacaagaaaaaccuguacgaccaugcccucaugucuauuaucagcacguuucaccuguccauuccgaauuucaaccaguaugaggccaugagcugcgauuuuaauggaggcaagaucucugugcaguacaaccugucccacaccuaugcugucgacgccgcuaaucauuguggcacaauugccaacggggugcuccaaaccuucaugcggauggcguggggaggcagcuacaucgcccuggauucugggaagggauccugggacugcaucaugacaagcuaccaguaucuuguuauucagaacaccacgugggaagaucacugucaguuuucucgccccuccccuaucggcuaccuggggcuccugagccaaagaacacgggacauuuauaucucccgcagacuucugggaaccuucacauggacccucucugauagcgagggcaaugaaacccccggcggguacugccugacacgguggaugcugauugaggcugagcucaaauguuuuggaaacacggccguggcuaagugcaaugaaaaacaugacgaggaguucugcgauaugcugcgccuuuuugacuucuguaagcaggccaucagacggcugaaaaccgaagcgcagauguccauccagcucauuaacaaggccgucaaugcucugaucaacgaucaacuuauuaugaagaaucaucugcgcgacaucaugggcauuccuuauugcaacuacagcaaauauuguuaccucaaucacacagugaccgggaagacaucucugcccagaugcugucugguguccaacggaagcuaccucaaugaaacccacuucucugacgauaucgagcagcaggccgacaacaugaucacggagcugcuucaaaaagaauauauugaucggcagggcaagacaccucuggggcucgucgaccuguuuguuuucagcaccuccuuuuaccugaucucuauuuuccuucaccucgugaaaaucccgacccaucgccacauuacaggaaagcccugcccuaaaccccauagacugaaucacaugggcaucuguagcugcggccuguauaagcacccuggggugcccgucaaguggaaacggugaggacuagucccuguucccagagcccacuuuuuuuucuuuuuuugaaauaaaauagccugucuuucagaucucaaaggcucuuuucagagccaccaaaaaaaaaaaaaaaaaaaaaaaaaaaaaaaaaaaaaaaaaaaaaaaaaaaaaaaaaaaaaaaaaaaaaaaaaaaaaaaaaaaaaaaaaaaaaaaaaaaaa

SEQ ID NO: 40304 - RNA, 1745 nt, Artificial Sequence
  mRNA product Design a-1 (hSL-A100) comprising derived and/or modified sequence from LASV(Lassa virus/H.sapiens-wt/NGA/2016/ISTH_0009;Clade II)__AVO03571__GPCmut12 (opt5)
aggagagucccgcagucggcguccagcggcucugcuuguucgugugugugucguugcaggccuuauucaagcuuaccaugggccagaucauuaccuucuuucaagaggugccccacgucaucgaagagguuaugaacauugugcugaucgcccucagccugcuugcuauucugaaggggaucuacaauguggccacaugcggacuccugggccuugucuccuuccugcuccugugugggagaucuugcagcacgaccuauaaaggaguguacgaacugcagacacucgagcuggacauggcgucccuuaacauguguaugccucugucuugcaccaagaauaacagccaucacuauaucaugguuggcaaugaaacagggcucgagcugacccuuacaaacaccuccauuaucaaucauaaauuuuguaaccugucugaugcucacaagaaaaaucucuacgaccaugcccugaugagcauuaucuccacguuccaccugagcauuccgaacuuuaaucaguaugaggccaugucuugcgauuucaacggaggccggaucuccgugcaguacaaucucagccacucuuaugcugucgacgccgcuaaccauuguggcaccauugccaauggggugcugcaaacauuuaugcgcauggcguggggaggcuccuacaucgcccuugauagcgggaagggaucuugggacugcaucaugaccuccuaccaguaucugauuauccagaacacaaccugggaagaucacugucaguucagcagacccuccccuauuggcuaccucgggcugcuuucucaacggacgcgcgacaucuauauuagcagacggcugcucggaacauuuaccuggacacuguccgauagcgagggcaacgaaacccccggcggguacugccugacccgcuggaugcucaucgaggcugagcugaaguguuucggaaauacagccguugcuaaaugcaacgaaaagcaugacgaggaauuuugcgauaugcuuagacuguucgacuuuuguaaacaggccauccggcgccucaagacggaggcgcagaugucuauucagcugaucaauaaagccgugaacgcucuuauuaaugaucaacugaucaugaagaaccaccucagagacauuaugggcaucccuuauugcaauuacuccaaguauuguuaccugaaccacaccgucacagggaaaaccagccugccccggugcugucucgugucuaauggaagcuaccugaacgaaacacauuucuccgacgauaucgagcagcaggccgacaauaugauuaccgagcuucugcaaaaggaauauaucgaucgccagggcaaaacgccucucgggcugguggaccuguucgucuuuucuaccagcuucuaccuuauuuccaucuuucuccaccugguuaagauuccgacacauagacacaucaccggaaaacccugcccuaagccccaucggcugaaccacaugggcauuuguagcugcggccucuauaaucacccuggggugcccgugaaauggaagcgcugaggacuagucccuguucccagagcccacuuuuuuuucuuuuuuugaaauaaaauagccugucuuucagaucucaaaggcucuuuucagagccaccaaaaaaaaaaaaaaaaaaaaaaaaaaaaaaaaaaaaaaaaaaaaaaaaaaaaaaaaaaaaaaaaaaaaaaaaaaaaaaaaaaaaaaaaaaaaaaaaaaaaa

SEQ ID NO: 40305 - RNA, 1745 nt, Artificial Sequence
  mRNA product Design a-1 (hSL-A100) comprising derived and/or modified sequence from LASV(Lassa virus/H.sapiens-wt/NGA/2016/ISTH_0017;Clade II)__AVO03567__GPCmut12 (opt5)
aggagagucccgcagucggcguccagcggcucugcuuguucgugugugugucguugcaggccuuauucaagcuuaccaugggccagaucauuaccuucuuucaagaggugccccacgucaucgaagagguuaugaacauugugcugaucgcccucagccugcuugcuauucugaaggggaucuacaauguggccacaugcggacucuucggccuggucuccuuucuucugcucugugggagaucuugcagcacgaccuauaaaggaguguacgaacugcagacacuggagcucgacauggcgucccugaacauguguaugccucuuucuugcaccaagaauaacagccaucacuauaucaugguuggcaaugaaacagggcuggagcucacccugacaaacaccuccauuaucaaucauaaauucuguaaccuuucugaugcucacaagaaaaaucuguacgaccaugcccucaugagcauuaucuccacguuucaccugagcauuccgaacuucaaucaguaugaggccaugucuugcgauuuuaacggaggcaagaucuccgugcaguacaaucugagccacaccuaugcuauugacgccgcuaaccauuguggcacaaucgccaaugggguccuccaaaccuucaugcggauggcguggggaggcucuuacaucgcccuggauuccgggaagggaagcugggacugcauuaugacaucuuaccaguaucuuaucauucagaacaccacgugggaagaucacugucaguuuucccgccccagcccuaucggcuaccuggggcuccugucccaaagaacacgggacauuuauaucucucgcagacuucugggaaccuucacauggacccucagcgauuccgagggcaacgaaacccccggcggguacugccugacacgguggaugcugaucgaggcugagcucaaauguuuuggaaauacggccguggcuaagugcaacgaaaaacaugacgaggaguucugcgauaugcugcgccuuuuugacuucuguaagcaggccauuagacggcugaaaaccgaagcgcagaugagcauccagcucauuaauaaggccguuaacgcucugaucaaugaucaacuuauuaugaagaaccaucugcgcgacaucaugggcaucccuuauugcaauuacucuaaauauuguuaccucaaccacacagugaccgggaagacaucccugcccagaugcugucuggucagcaauggaucuuaccucaacgaaacccacuucagcgacgauauugagcagcaggccgacaauaugaucacggagcugcuucaaaaagaauauauggaucggcagggcaagacaccucuggggcucguggaccuguuuguguucuccaccucuuuuuaccugauuagcaucuuccuucaccucguccgcauuccgacccauagacacguuaucggaaaacccugcccuaagccccaucggcugaaccacaugggcauuuguuccugcggccuguauaaacacccuggggugcccgugaaguggaagcgcugaggacuagucccuguucccagagcccacuuuuuuuucuuuuuuugaaauaaaauagccugucuuucagaucucaaaggcucuuuucagagccaccaaaaaaaaaaaaaaaaaaaaaaaaaaaaaaaaaaaaaaaaaaaaaaaaaaaaaaaaaaaaaaaaaaaaaaaaaaaaaaaaaaaaaaaaaaaaaaaaaaaaa

SEQ ID NO: 40306 - RNA, 1745 nt, Artificial Sequence
  mRNA product Design a-1 (hSL-A100) comprising derived and/or modified sequence from LASV(Lassa virus/H.sapiens-wt/NGA/2018/ISTH_0959;Clade II)__AVV65099__GPCmut12 (opt5)
aggagagucccgcagucggcguccagcggcucugcuuguucgugugugugucguugcaggccuuauucaagcuuaccaugggccagaucauuaccuucuuucaagaggugccccacgucaucgaagagguuaugaacauugugcugaucgcccucagccugcuugcuauucugaaggggaucuacaauguggucacaugcggacucuucggccugguguccuuucuucugcucugugggagaucuugcagcacgaccuauaaaggaguuuacgaacugcagacacuggagcucgacauggccucccugaacauguguaugccucuuucuugcaccaagaauaacagccaucacuauaucauggugggcaaugaaacagggcuggagcucacccugacaaacaccuccauuaucaaucauaaauucuguaaccuuucugaugcgcacaagaaaaaucuguacgaccaugcucucaugagcauuaucuccacguuucaccugagcauuccgaacuucaaucaguaugaggccaugucuugcgauuuuaacggaggcaagaucuccguccaguacaaucugagccacgccuaugcuauugacgccgcuaaccauuguggcaccaucgccaauggggugcuccaaacauucaugcggauggcguggggaggcucuuacaucgcccuggauuccgggaagggaagcugggacugcauuaugaccucuuaccaguaucuuaucauucagaacacaaccugggaagaucacugucaguuuucccgccccagcccuaucggcuaccuggggcuccugucccaaagaacgcgggacauuuauaucucucgcagacuucugggaacauucaccuggacacucagcgauuccgagggcaacgaaacccccggcggguacugccugacccgguggaugcugaucgaggcugagcucaaauguuuuggaaauacagccguugcuaagugcaacgaaaaacaugacgaggaguucugcgauaugcugcgccuuuuugacuucuguaagcaggccauuagacggcugaaaacggaagcgcagaugagcauccagcucauuaauaaggccgugaacgcucugaucaaugaucaacuuauuaugaagaaccaucugcgcgacaucaugggcaucccuuauugcaauuacucuaaauauuguuaccucaaccacaccgucacagggaagaccucccugcccagaugcugucuggugagcaauggaucuuaccucaacgaaacacacuucagcgacgauauugagcagcaggccgacaauaugaucaccgagcugcuucaaaaagaauauauugaucggcagggcaagacgccucuggggcucguggaccuguuugucuucuccacaucuuuuuaccugaucagcauuuuccuucaccucguuaaaaucccgacccaucgccacgugauuggaaagcccugcccuaaaccccauagacugaaccacaugggcaucuguuccugcggccuguauaagcacccuggggugcccgucaaguggaaacggugaggacuagucccuguucccagagcccacuuuuuuuucuuuuuuugaaauaaaauagccugucuuucagaucucaaaggcucuuuucagagccaccaaaaaaaaaaaaaaaaaaaaaaaaaaaaaaaaaaaaaaaaaaaaaaaaaaaaaaaaaaaaaaaaaaaaaaaaaaaaaaaaaaaaaaaaaaaaaaaaaaaaa

SEQ ID NO: 40307 - RNA, 1745 nt, Artificial Sequence
  mRNA product Design a-1 (hSL-A100) comprising derived and/or modified sequence from LASV(LASV003-NIG-2008;Clade II)__AIT17580__GPCmut12 (opt5)
aggagagucccgcagucggcguccagcggcucugcuuguucgugugugugucguugcaggccuuauucaagcuuaccaugggccagaucauuaccuucuuucaagaggugccccacgucaucgaagagguuaugaacauugugcugaucgcccucagccugcuugcuauucugaaggggaucuacaauguggccacaugcggacucuucggccuggucuccuuucuucugcucugugggagaucuugcagcacgaccuauaaaggaguguacgaacugcagacacuggagcucgacauggcgucccugaacauguguaugccucuuucuugcaccaagaauaacagccaucacuauaucaugguuggcaaugaaacagggcuggagcucacccugacaaacaccuccauuaucaaucauaaauucuguaaccuuucugaugcucacaagaaaaaucuguacgaccaugcccucaugagcauuaucuccacguuucaccugagcauuccgaacuucaaucaguaugaggccaugucuugcgauuuuaacggaggcaagaucuccgugcaguacaaucugagccacaccuaugcugucgacgccgcuaaccauuguggcacaauugccaauggggugcuccaaaccuucaugcggauggcguggggaggcucuuacaucgcccuggauuccgggaagggaagcugggacugcaucaugacaucuuaccaguaucuuauuauccagaacaccacgugggaagaucacugucaguuuucccgccccagcccuauuggcuaccuggggcuccugucccaaagaacacgggacaucuauauuucucgcagacuucugggaaccuucacauggacccucagcgauuccgagagcaacgaaacccccggcggcuacugccugacacgguggaugcugaucgaggcugagcucaaauguuuugggaauacggccguugcuaagugcaacgaaaaacaugacgaggaguucugcgauaugcugcgccuuuuugacuucuguaagcaggccaucagacggcugaaagcggaagcccagaugucuauucagcucaucaauaaggcugugaacgcccugauuaaugaucaacuuaucaugaagaaccaucugcgcgacauuaugggaaucccuuauugcaauuacuccaaauauuguuaccucaaccacaccgucacaggcagaaccagccugccccggugcugucuggugucuaaugggagcuaccucaacgaaacacacuucuccgacgauaucgagcagcaggcugacaauaugauuaccgagcugcuucaaaaggaauauauggaucgccagggaaaaacgccucugggccucguggaccuguuugucuucucuaccagcuuuuaccugaucuccauuuuccuucaccucguuaagaucccgacacauagacacgugauugggaaacccugcccuaagccccaucggcugaaccacaugggaaucuguagcugcggccuguauaaacacccuggcgugcccgucaaguggaagcgcugaggacuagucccuguucccagagcccacuuuuuuuucuuuuuuugaaauaaaauagccugucuuucagaucucaaaggcucuuuucagagccaccaaaaaaaaaaaaaaaaaaaaaaaaaaaaaaaaaaaaaaaaaaaaaaaaaaaaaaaaaaaaaaaaaaaaaaaaaaaaaaaaaaaaaaaaaaaaaaaaaaaaa

SEQ ID NO: 40308 - RNA, 1745 nt, Artificial Sequence
  mRNA product Design a-1 (hSL-A100) comprising derived and/or modified sequence from LASV(LASV035-NIG-2009;Clade II)__AIT17588__GPCmut12 (opt5)
aggagagucccgcagucggcguccagcggcucugcuuguucgugugugugucguugcaggccuuauucaagcuuaccaugggccagaucauuaccuucuuucaagaggugccccacgucaucgaagagguuaugaacauugugcugaucgcccucagccugcuugcuauucugaaggggaucuacaauguggccacaugcggacucuucggccuggucuccuuucuucugcucugugggagaucuugcagcacgaccuauaaaggaguguacgaacugcagacacuggagcucgacauggcgucccugaacauguguaugccucuuucuugcaccaagaauaacagccaucacuauaucaugguuggcaaugaaacagggcuggagcucacccugacaaacaccuccauuaucaaucauaaauucuguaaccuuucugaugcucacaagaaaaaucuguacgaccaugcccucaugagcauuaucuccacguuucaccugagcauuccgaacuucaaucaguaugaggccaugucuugcgauuuuaacggaggcaagaucuccgugcaguacaaucugagccacgcuuaugccgucgacgcugccaaccauuguggcaccauugcgaauggggugcuccaaacauucaugcggauggccuggggaggcucuuacaucgcucuggauuccgggaagggaagcugggacugcaucaugaccucuuaccaguaucuuauuauccagaacacaaccugggaagaucacugucaguuuucccgccccagcccuauuggcuaccuggggcuccugucccaaagaacgcgggacaucuauauuucucgcagacuucugggaacauucaccuggacacucagcgauuccgagggcaacgaaacccccggcggguacugccugacccgguggaugcugaucgaggccgagcucaaauguuuuggaaauacagcuguugccaagugcaacgaaaaacaugacgaggaguucugcgauaugcugcgccuuuuugacuucuguaagcaggcgaucagacggcugaaagccgaagcucagaugagcauucagcucaucaauaaggccgugaacgcucugauuaaugaucaacuuaucaugaagaaccaucugcgcgacauuaugggcaucccuuauugcaauuacucuaaauauuguuaccucaaccacacggucaccgggaagacaucccugcccagaugcugucuggugagcaauggaucuuaccucaacgaaacccacuucagcgacgauaucgagcagcaggccgacaauaugauuacagagcugcuucaaaaagaauauaucgaucggcagggcaagaccccucuggggcucguggaccuguuugucuucuccacgucuuuuuaccugauuagcaucuuccuucaccucguuaaaauuccgacacaucgccacgugaucggaaagcccugcccuaaaccccauagacugaaccacaugggcauuuguuccugcggccuguauaagcacccuggggugcccgucaaguggaaacggugaggacuagucccuguucccagagcccacuuuuuuuucuuuuuuugaaauaaaauagccugucuuucagaucucaaaggcucuuuucagagccaccaaaaaaaaaaaaaaaaaaaaaaaaaaaaaaaaaaaaaaaaaaaaaaaaaaaaaaaaaaaaaaaaaaaaaaaaaaaaaaaaaaaaaaaaaaaaaaaaaaaaa

SEQ ID NO: 40309 - RNA, 1745 nt, Artificial Sequence
  mRNA product Design a-1 (hSL-A100) comprising derived and/or modified sequence from LASV(LASV1000-NIG-2009;Clade II)__AIT17782__GPCmut12 (opt5)
aggagagucccgcagucggcguccagcggcucugcuuguucgugugugugucguugcaggccuuauucaagcuuaccaugggccagaucauuaccuucuuucaagaggugccccacgucaucgaagagguuaugaacauugugcugaucgcccucagccugcuugcuauucugaaggggaucuacaauguggccacaugcggacucuucggccuggucuccuuucuucugcucugugggagaucuugcagcacgaccuauaaaggaguguacgaacugcagacacuggagcucgacauggcgucccugaacauguguaugccucuuucuugcaccaagaauaacagccaucacuauaucaugguuggcaaugaaacagggcuggagcucacccugacaaacaccuccauuaucaaucauaaauucuguaaccuuucugaugcucacaagaaaaaucuguacgaccaugcccucaugagcauuaucuccacguuucaccugagcauuccgaacuucaaucaguaugaggccaugucuugcgauuuuaacggaggcaagaucuccgugcaguacaaucugagccacaccuaugcugucgacgccgcuaaccauuguggcacaauugccaauggggugcuccaaaccuucaugcggauggcguggggaggcucuuacaucgcccuggauuccgggaagggaagcugggacugcaucaugacaucuuaccaguaucuuauuauccagaacaccacgugggaagaucacugucaguuuucccgccccagcccuauuggcuaccuggggcuccugucccaaagaacacgggacaucuauauuucucgcagacuucugggaaccuucacauggacccucagcgauuccgagggcaacgaaacccccggcggguacugccugacacgguggaugcugaucgaggcugagcucaaauguuuuggaaauacggccguugcuaagugcaacgaaaaacaugacgaggaguucugcgauaugcugcgccuuuuugacuucuguaagcaggccaucaaaagacugaagaccgaagcgcagaugagcauucagcucaucaauaaggccgugaacgcucugauuaaugaucaacuuaucaugaaaaaccaucugcgggacauuaugggcaucccuuauugcaauuacucuaaguauuguuaccucaaccacacagucaccgggaaaacaucccugccccgcugcugucuggugagcaauggaucuuaccucaacgaaacccacuucagcgacgauaucgagcagcaggccgacaauaugauuacggagcugcuucaaaaggaauauaucgauagacagggcaaaacaccucuggggcucguggaccuguuugucuucuccaccucuuuuuaccugauuagcaucuuccuucaccucguuaagauuccgacccaucggcacguggugggaaaacccugcccuaagccccaucgccugaaccacaugggcaucuguuccugcggccuguauaagcacccugggguccccgugaaauggaagagaugaggacuagucccuguucccagagcccacuuuuuuuucuuuuuuugaaauaaaauagccugucuuucagaucucaaaggcucuuuucagagccaccaaaaaaaaaaaaaaaaaaaaaaaaaaaaaaaaaaaaaaaaaaaaaaaaaaaaaaaaaaaaaaaaaaaaaaaaaaaaaaaaaaaaaaaaaaaaaaaaaaaaa

SEQ ID NO: 40310 - RNA, 1745 nt, Artificial Sequence
  mRNA product Design a-1 (hSL-A100) comprising derived and/or modified sequence from LASV(LASV221-NIG-2010;Clade II)__AIT17624__GPCmut12 (opt5)
aggagagucccgcagucggcguccagcggcucugcuuguucgugugugugucguugcaggccuuauucaagcuuaccaugggccagaucauuaccuucuuucaagaggugccccacgucaucgaagagguuaugaacauugugcugaucgcccucagccugcuugcuauucugaaggggaucuacaauguggccacaugcggacucuucggccuggucuccuuucuucugcucugugggagaucuugcagcacgaccuauaaaggaguguacgaacugcagacacuggagcucgacauggcgucccugaacauguguaugccucuuucuugcaccaagaauaacagccaucacuauaucaugguuggcaaugaaacagggcuggagcucacccugacaaacaccuccauuaucaaucauaaauucuguaaccuuucugaugcucacaagaaaaaucuguacgaccaugcccucaugagcauuaucuccacguuucaccugagcauuccgaacuucaaucaguaugaggccaugucuugcgauuuuaacggaggcaagaucuccgugcaguacaaucugagccacaccuaugcuauugacgccgcuaaccauuguggcacaaucgccaaugggguccuccaaaccuucaugcggauggcguggggaggcucuuacaucgcccuggauuccgggaagggaagcugggacugcauuaugacaucuuaccaguaucuuaucauucagaacaccacgugggaagaucacugucaguuuucccgccccagcccuaucggcuaccuggggcuccugucccaaagaacacgggacauuuauaucucucgcagacuucugggaaccuucacauggacccucagcgauuccgagggcaacgaaacccccggcggguacugccugacacgguggaugcugaucgaggcugagcucaaauguuuuggaaauacggccguggcuaagugcaacgaaaaacaugacgaggaguucugcgauaugcugcgccuuuuugacuucuguaagcaggccauuagacggcugaaaaccgaagcgcagaugagcauccagcucauuaauaaggccguuaacgcucugaucaaugaucaacuuauuaugaagaaccaucugcgcgacaucaugggcaucccuuauugcaauuacucuaaauauuguuaccucaaccacacagugaccgggaagacaucccugcccagaugcugucuggucagcaauggaucuuaccucaacgaaacccacuucagcgacgauauugagcagcaggccgacaauaugaucacggagaugcugcaaaaagaauauauggaucggcagggcaagacaccucuugggcugguggaccucuuuguguucuccaccucuuuuuaccugauuagcaucuuccugcaccuugucaaaauuccgacccaucgccacguuaucggaaagcccugcccuaaaccccauagacucaaccacaugggcauuuguuccugcggccuguauaagcacccuggggugcccgugaaguggaaacggugaggacuagucccuguucccagagcccacuuuuuuuucuuuuuuugaaauaaaauagccugucuuucagaucucaaaggcucuuuucagagccaccaaaaaaaaaaaaaaaaaaaaaaaaaaaaaaaaaaaaaaaaaaaaaaaaaaaaaaaaaaaaaaaaaaaaaaaaaaaaaaaaaaaaaaaaaaaaaaaaaaaaa

SEQ ID NO: 40311 - RNA, 1745 nt, Artificial Sequence
  mRNA product Design a-1 (hSL-A100) comprising derived and/or modified sequence from LASV(LASV237-NIG-2010;Clade II)__AIT17638__GPCmut12 (opt5)
aggagagucccgcagucggcguccagcggcucugcuuguucgugugugugucguugcaggccuuauucaagcuuaccaugggccagaucauuaccuucuuucaagaggugccccacgucaucgaagagguuaugaacauugugcugaucgcccucagccugcuugcuauucugaaggggaucuacaauguggccacaugcggacucuucggccuggucuccuuucuucugcucugugggagaucuugcagcacgaccuauaaaggaguguacgaacugcagacacuggagcucgacauggcgucccugaacauguguaugccucuuucuugcaccaagaauaacagccaucacuauaucaugguuggcaaugaaacagggcuggagcucacccugacaaacaccuccauuaucaaucauaaauucuguaaccuuucugaugcucacaagaaagaccuguacgaucaugcccucaugagcauuaucuccacguuucaccugagcauuccgaauuucaaccaguaugaggccaugucuugcgacuuuaauggaggcaagaucuccgugcaguacaaccugagccacaccuaugcugucgaugccgcuaaucauuguggcacaauugccaacggggugcuccaaaccuucaugcggauggcguggggaggcucuuacaucgcccuggacuccgggaagggaagcugggauugcaucaugacaucuuaccaguaucuuauuauccagaauaccacgugggaagaccacugucaguuuucccgccccagcccuauuggcuaccuggggcuccugucccaaagaacacgggauaucuauauuucucgcagacuucugggaaccuucacauggacccucagcgacuccgagggcaacgaaacccccggcggguacugccugacacgguggaugcugaucgaggcugagcucaaauguuuuggaaacacggccguugcuaagugcaaugaaaaacaugaugaggaguucugcgacaugcugcgccuuuuugauuucuguaagcaggccaucagacggcugaaaaccgaagcgcagaugagcauucagcucaucaacaaggccgugaaugcucugauuaacgaccaacuuaucaugaagaaucaucugcgcgacauuaugggcaucccuuauugcaacuacucuaaauauuguuaccucaaucacacagucaccgggaagacaucccugcccagaugcugucuggugagcaacggaucuuaccucaaugaaacccacuucagcgaugacaucgagcagcaggccgauaacaugauuacggagcugcuucaaaaagaauauauggaccggcagggcaagacaccucuggggcucguggaucuguuugucuucuccaccucuuuuuaccugaucagcauuuuccuucaccucaucaaaauuccgacccaucgccacaucacaggaaagcccugcccuaaaccccauagacugaaucacaugggcauuuguuccugcggccuguauaagcacccugggguucccgugaaguggaaacggugaggacuagucccuguucccagagcccacuuuuuuuucuuuuuuugaaauaaaauagccugucuuucagaucucaaaggcucuuuucagagccaccaaaaaaaaaaaaaaaaaaaaaaaaaaaaaaaaaaaaaaaaaaaaaaaaaaaaaaaaaaaaaaaaaaaaaaaaaaaaaaaaaaaaaaaaaaaaaaaaaaaaa

SEQ ID NO: 40312 - RNA, 1745 nt, Artificial Sequence
  mRNA product Design a-1 (hSL-A100) comprising derived and/or modified sequence from LASV(LASV253-NIG-2011;Clade II)__AIT17670__GPCmut12 (opt5)
aggagagucccgcagucggcguccagcggcucugcuuguucgugugugugucguugcaggccuuauucaagcuuaccaugggccagaucauuaccuucuuucaagaggugccccacgucaucgaagagguuaugaacauugugcugaucgcccucagccugcuugcuauucugaaggggaucuacaauguggccacaugcggacucuucggccuggucuccuuucuucugcucugugggagaucuugcagcacgaccuauaaaggaguguacgaacugcagacacuggagcucgacauggcgucccugaacauguguaugccucuuucuugcaccaagaauaacagccaucacuauaucaugguuggcaaugaaacagggcuggagcucacccugacaaacaccuccauuaucaaucauaaauucuguaaccuuucugaugcucacaagaaaaaucuguacgaccaugcccucaugagcauuaucuccacguuucaccugagcauuccgaacuucaaucaguaugaggccaugucuugcgauuuuaacggaggcaagaucuccgugcaguacaaucugagccacaccuaugcugucgacgccgcuaaccauuguggcacaauugccaauggggugcuccaaaccuucaugcggauggcguggggaggcucuuacaucgcccuggauuccgggaagggaagcugggacugcaucaugacaucuuaccaguaucuuauuauccagaacaccacgugggaagaucacugucaguuuucccgccccagcccuauuggcuaccuggggcuccugucccaaagaacacgggacaucuauauuucucgcagacuucugggaaccuucacauggacccucagcgauuccgagggcaacgaaacccccggcggguacugccugacacgguggaugcugaucgaggcugagcucaaauguuuuggaaauacggccguugcuaagugcaacgaaaaacaugacgaggaguucugcgauaugcugcgccuuuuugacuucuguaagcaggccaucagacggcugaaagcggaagcccagaugagcauucagcucaucaauaaggcugugaacgcccugauuaaugaucaacuuaucaugaagaaccaucugcgcgacauuaugggcaucccuuauugcaauuacucuaaauauuguuaccucaaccacaccgucacagggagaaccucccugccccggugcugucuggugagcaauggaucuuaccucaacgaaacacacuucagcgacgauaucgagcagcaggcugacaauaugauuaccgagcugcuucaaaaggaauauaucgaucgccagggcaaaacgccucuggggcucguggaccuguuugucuucuccacaucuuuuuaccugauuagcaucuuccuucaccucguuaagauuccgacccauagacacaucauuggaaaacccugcccuaagccccaucggcugaaccacaugggcaucuguuccugcggccuguauaaacacccuggggugcccgugaaguggaagcgcugaggacuagucccuguucccagagcccacuuuuuuuucuuuuuuugaaauaaaauagccugucuuucagaucucaaaggcucuuuucagagccaccaaaaaaaaaaaaaaaaaaaaaaaaaaaaaaaaaaaaaaaaaaaaaaaaaaaaaaaaaaaaaaaaaaaaaaaaaaaaaaaaaaaaaaaaaaaaaaaaaaaaa

SEQ ID NO: 40313 - RNA, 1745 nt, Artificial Sequence
  mRNA product Design a-1 (hSL-A100) comprising derived and/or modified sequence from LASV(LASV254-NIG-2011;Clade II)__AIT17674__GPCmut12 (opt5)
aggagagucccgcagucggcguccagcggcucugcuuguucgugugugugucguugcaggccuuauucaagcuuaccaugggccagaucauuaccuucuuucaagaggugccccacgucaucgaagagguuaugaacauugugcugaucgcccucagccugcuugcuauucugaaggggaucuacaauguggccacaugcggacucuucggccuggucuccuuucuucugcucugugggagaucuugcagcacgaccuauaaaggaguguacgaacugcagacacuggagcucgacaugaccaaccugaauauguguaugccucuuuccugcacaaagaacaauucucaucacuauaucaugguuggcaacgaaaccgggcuggagcucacacugaccaauacgagcauuaucaaccauaaauucuguaaucuuuccgaugcgcacaagaaaaaccuguacaaucaugcucucaugucuauuaucagcaccuuucaccuguccauuccgaacuucaaucaguaugaggccaugagcugcgacuuuaacggaggcaagaucucugugcaguacaaucugucccacagcuaugccgucgaugcugccaaccauuguggcacaauugcuaacggggugcuccaaaccuucaugcggauggccuggggaggcucuuacaucgcgcuggacuccgggaagggaaauugggauugcaucaugacaagcuaccaguaucuuauuauccagaacaccacgugggaagaccacugucaguuuucucgccccuccccuauuggcuaccuggggcuccugagccaaagaacacgggauaucuauauuucccgcagacuucugggaaccuucacauggacccucucugacagcgagggcaaugaaacccccggcggguacugccugacacgguggaugcugaucgaggccgagcucaaauguuuuggaaacacggcuguugccaagugcaaugaaaaacaugaugaggaguucugcgacaugcugcgccuuuuugauuucuguaagcaggcuaucagacggcugaaaaccgaagcccaggcgaacauucagcucaucaauaaggccgugaacgcucugauuaaugaccaacuuaucaugaagaaccaucugcgcgauauuaugggcaucccuuauugcaauuacuccaaauauuguuaccucaaccacacagucaccgggaagacaagccugcccagaugcugucuggugucuaauggauccuaccucaacgaaacccacuucagcgacgacaucgagcagcaggccgauaauaugauuacggagcugcuucaaaaagaauauauggaccggcagggcaagacaccucuggggcucguggaucuguuugucuucucuaccagcuuuuaccugaucuccauuuuccuucaccucguuaaaaucccgacccaucgccacgugauuggaaagcccugcccuaaaccccauagacugaaccacaugggcaucuguucuugcggccuguauaagcacccuggggugcccgucaaguggaaacggugaggacuagucccuguucccagagcccacuuuuuuuucuuuuuuugaaauaaaauagccugucuuucagaucucaaaggcucuuuucagagccaccaaaaaaaaaaaaaaaaaaaaaaaaaaaaaaaaaaaaaaaaaaaaaaaaaaaaaaaaaaaaaaaaaaaaaaaaaaaaaaaaaaaaaaaaaaaaaaaaaaaaa

SEQ ID NO: 40314 - RNA, 1745 nt, Artificial Sequence
  mRNA product Design a-1 (hSL-A100) comprising derived and/or modified sequence from LASV(Nig08-A19;Clade III)__ADU56618__GPCmut12 (opt5)
aggagagucccgcagucggcguccagcggcucugcuuguucgugugugugucguugcaggccuuauucaagcuuaccaugggccagaucgugaccuucuuucaagaggucccccacguuauugaagaggugaugaacaucgugcugauugcccucagcauccuggcuauucuuaaggggcuguacaauaucgccacaugcggacucaucggccuggucacguuccuucugcucuccgggagaucuuguagcaugaccuauaaaggaguguacgaacugcagacacuggagcucaacaugaauacccugaacaugugcaugccucuuuccuguacaaagaauaacucucaucacuauauuaugguuggcaaugaaaccgggcuggagcucacacugaccaacacgagccuucugcaucacaaauuuugcaaucucuccgacgcgcauaagaaaaaccuguacgaucacacccugaugucuaucauuagcacauuccaccucuccaucccgaauuuuaaccaguaugaggcuaugagcugugacuucaauggaggcaagauuaccgugcaguacaaccugucucauuccuaugccaucgaugccgcuaaucacugcggcacagucgccaacggggugcuucaaaccuuuaugcggauggcuuggggaggcagcuacauugcccuggacucugggcgcggaaagugggauuguaucaugacguccuaccaguaucucaucauucagaacacaaccugggaagaccauugccaguucagcagacccucuccuaucggcuaccuggggcuucugucccaacggacacgcgauauuuauaucagcagacggcuccugggaaccuuuaccuggacacuguccgacucugagggcaaugaaacgcccggcggguacugucucacccgcuggaugcugauugaggcggagcuuaaaugcuucggaaacacagccguugcuaaguguaaugaaaaacacgaugaggaauuuugcgacaugcugagacucuucgauuuuugcaagcaggccauccggcgccugaaagcugaggcccagaugagcauccagcuuauuaacaaggcggugaaugcccugaucaacgaccaacucauuaugaagaaucaccugagagauaucaugggcauuccuuauuguaacuacuccaaauauugcuaccugaaucauaccagcacagggcggaccucucucccccgcuguugccuggucuccaacggaagcuaccuuaaugaaacgcacuucucugacgacaucgagcagcaggcugauaacaugaucacagagaugcugcaaaaggaauaucucgacagacagggcaaaaccccucuggggcugguggaucuuuucguguuuagcaccuccuucuaccucauuucuaucuuucugcaucuggucaagauuccgacacaccggcauaucguuggaaaacccuguccuaagccccaccgccucaaucacaugggcauuugcagcuguggccuguauaaacagccuggggugcccgugagauggaagcggugaggacuagucccuguucccagagcccacuuuuuuuucuuuuuuugaaauaaaauagccugucuuucagaucucaaaggcucuuuucagagccaccaaaaaaaaaaaaaaaaaaaaaaaaaaaaaaaaaaaaaaaaaaaaaaaaaaaaaaaaaaaaaaaaaaaaaaaaaaaaaaaaaaaaaaaaaaaaaaaaaaaaa

SEQ ID NO: 40315 - RNA, 1748 nt, Artificial Sequence
  mRNA product Design a-1 (hSL-A100) comprising derived and/or modified sequence from LASV(G1180-SLE-2010;Clade IV)__AIT17168__GPCmut12 (opt5)
aggagagucccgcagucggcguccagcggcucugcuuguucgugugugugucguugcaggccuuauucaagcuuaccaugggccagaucgugaccuucuuucaagaggucccccacguuauugaagaggugaugaacaucgugcugauugcccucagcauccuggcuguccuuaaggggcuguacaauuucgccacaugcggacucgugggccugcuuacguuucugcuccugugugggagauccugcaccgcgucucgguauaaaggaguuuacgaacugcagacacucgagcugaacauggaaacccuuaauauguguaugccucugagcugcacaaagaacaauucccaucacuauauuauggugggcaacgagaccgggcucgagcugacacuuaccaauacgucuaucaucaaccauaaauucuguaaucugagcgacgcucacaagaaaaaccucuacgaucaugcccugauguccauuaucucuaccuuucaccugagcauuccgaauuucaaccaguaugaagccauguccugcgacuuuaauggaggcaagaucagcguccaguacaaccucucucacuccuaugcuggcgaugccgcuaaucauugugggacaguggccaacggaguucugcaaaccuucaugcgcauggcguggggcgggagcuacauugcccuugacucuggacacggcuccugggauugcaucaugacaagcuaccaguaucugauuauccagaacaccacgugggaggaccauugucaguuuucuagacccuccccuaucggguaccucggacugcuuagccaacggacacgcgauauuuauaucuccagacggcugcucggcaccuucacauggacccugucugacagcgaaggcaaggauacccccgggggauacugccugacacgcuggaugcucauugaggcugagcugaaauguuuuggcaauacggccguggcuaagugcaacgaaaaacacgacgaggaguucugcgauaugcuuagacuguuugacuucuguaagcaggccauccagcggcucaaagcggaagcccagauguccauucaacugaucaauaaggcugucaacgcccuuaucaaugaucagcugauuaugaagaaccaccuccgcgacaucauggggauuccuuauugcaauuacagcaaauauuguuaccugaaccauaccacaaccggaaagacaucucugcccaaaugcugucucguguccaauggcagcuaccugaacgaaacccacuucucugacgauaucgagcagcaagcugacaauaugauuacggagaugcuucagaaggaauauauggagagacaggggaaaacaccucugggacucguggaucuguuugucuucagcaccuccuuuuaccugaucucuaucuuccuucaucucguuaagauuccgacccaccggcauaucgugggcaaaagcugccccaagccucaccgccugaaccacaugggcauuuguuccugcgggcuguauaagcagcccggagugccugucaaauggaagagaugaggacuagucccuguucccagagcccacuuuuuuuucuuuuuuugaaauaaaauagccugucuuucagaucucaaaggcucuuuucagagccaccaaaaaaaaaaaaaaaaaaaaaaaaaaaaaaaaaaaaaaaaaaaaaaaaaaaaaaaaaaaaaaaaaaaaaaaaaaaaaaaaaaaaaaaaaaaaaaaaaaaaa

SEQ ID NO: 40316 - RNA, 1748 nt, Artificial Sequence
  mRNA product Design a-1 (hSL-A100) comprising derived and/or modified sequence from LASV(G1442-SLE-2011;Clade IV)__AIT17180__GPCmut12 (opt5)
aggagagucccgcagucggcguccagcggcucugcuuguucgugugugugucguugcaggccuuauucaagcuuaccaugggccagaucgugaccuucuuucaagaggucccccacguuauugaagaggugaugaacaucgugcugauugcccucagcauccuggcuguccuuaaggggcuguacaauguggccacaugcggacucauuggccugguuacguuccuucugcucugugggagauccugcaccacaacccuguauaaaggaguguacgaacugcagacacucgagcugaacauggaaacccuuaauauguguaugccucugucuugcacaaagaacaauagccaucacuauauccgggucggcaacgagaccgggcucgagcugacgcuuaccaauacauccaucauuaaccauaaauuuuguaaucugucugacgcgcacaagaaaaaccucuacgaucaugcucugaugagcaucauuuccaccuuccaccugucuaucccgaauuuuaaccaguaugaagccaugagcugcgacuucaauggaggcaagauuuccgugcaguacaaccucagccacucuuaugccggcgaugcugccaaucauugugggacaguugcuaacggagugcugcaaaccuuuaugcgcauggccuggggcggguccuacaucgcgcuugacagcggaagaggcaacugggauugcauuaugacgucuuaccaguaucugaucauccagaauacaaccugggacgaucacugucaguucucccggcccagcccuauuggguaccucggacugcuuucucaacgcacaagagacgucuauaucucccggcgccugcucggcaccuuuaccuggacacugagcgauuccgagggcaaggacacgcccgggggauacugccugaccagauggaugcucauugaagccgagcugaaauguuucggcaacacagcuguggccaagugcaaugagaaacaugaugaagaguuuugcgacaugcuucggcuguucgauuuuuguaagcaggcuauccagcgccucaaagccgaagcgcagaugucuauucaacugaucaacaaggccgugaaugcucuuaucaacgaccagcugauuaugaagaaucaccucagagacaucauggggauuccuuauugcaacuacagcaaauauuguuaccugaauaacaccgccacaggaaagaccucccugcccaaaugcugucucaucagcaauggcucuuaccugaacgagacgcacuucuccgaugacauugaacaggaggcugauaauaugaucacagagaugcuucaaaaggaauauauggagcggcaggggaaaaccccucugggacucgucgaccuguucguuuuuagcaccucuuucuaccugaucagcauuuuucuucaucucgugaagaucccgacacaccgccauauugugggcaaauccugccccaagccucacagacugaaccauaugggcaucuguucuugcgggcuguauaagcagcccggagucccugugcgguggaaacgcugaggacuagucccuguucccagagcccacuuuuuuuucuuuuuuugaaauaaaauagccugucuuucagaucucaaaggcucuuuucagagccaccaaaaaaaaaaaaaaaaaaaaaaaaaaaaaaaaaaaaaaaaaaaaaaaaaaaaaaaaaaaaaaaaaaaaaaaaaaaaaaaaaaaaaaaaaaaaaaaaaaaaa

SEQ ID NO: 40317 - RNA, 1748 nt, Artificial Sequence
  mRNA product Design a-1 (hSL-A100) comprising derived and/or modified sequence from LASV(G3010-SLE-2013;Clade IV)__AIT17344__GPCmut12 (opt5)
aggagagucccgcagucggcguccagcggcucugcuuguucgugugugugucguugcaggccuuauucaagcuuaccaugggccagaucgugaccuucuuucaagaggucccccacguuauugaagaggugaugaacaucgugcugauugcccucagcauccuggcuguccuuaaggggcuguacaauuucgccacaugcggacucgugggccugguuacguuucuucugcucugugggagauccugcaccacaucucuguauaaaggaguguacgaacugcagacccucgagcugaacauggaaacacuuaauauguguaugccucugagcugcaccaagaacaauucccaucacuauauuauggucggcaacgagacagggcucgagcugacccuuacgaauaccucuaucaucaaccauaaauucuguaaucugagcgacgcgcacaagaaaaaccucuacaaucaugcucugauguccauuaucucuacauuucaccugagcauuccgaacuucaaucaguaugaagccauguccugcgauuuuaacggaggcaagaucagcgugcaguacaaucucucucacuccuaugccggcgacgcugccagccauugugggaccguugcuaacggagugcugcaaacauucaugcggauggccuggggcgggucuuacauugcgcuugauuccggauacggcaagugggacugcaucaugaccagcuaucaguaccugauuauccagaacacgacaugggaggaucacugucaguuuucucgccccuccccuaucggguaucucggacugcuuagccaaagaacccgggacauuuacaucucccgcagacugcucggcacauucaccuggacccugucugauagcgaaggcaaagacacacccgggggauauugccugacgcgguggaugcucauugaggccgagcugaaguguuuuggcaauaccgcugucgccaaaugcaacgaaaagcaugaugaggaguucugcgacaugcuucgccuguuugauuucuguaaacaggcuauccagagacucaagacagaagcccagauguccauucaacugaucaauaaggcggugaacgcccuuaucaaugaccagcugauuaugaaaaaccaccuccgggauaucauggggauuccuuacugcaauuauagcaaguacuguuaccugaaccacaccacaaccggaaaaacgucucugcccaagugcugucucguguccaauggcagcuaucugaacgaaacacauuucucugacgacaucgagcagcaagcugauaauaugauuaccgagaugcuucagaaagaauacauggagcgccaggggaagaccccucugggacucgucgaccuguuuguuuucagcacauccuuuuaucugaucucuaucuuccuucaccucgugaaaauuccgacccauagacacaucgugggcaagagcugccccaagccucaucggcugaaccacaugggcauuuguuccugcgggcuguacaaacagcccggagucccugugcgcuggaagagaugaggacuagucccuguucccagagcccacuuuuuuuucuuuuuuugaaauaaaauagccugucuuucagaucucaaaggcucuuuucagagccaccaaaaaaaaaaaaaaaaaaaaaaaaaaaaaaaaaaaaaaaaaaaaaaaaaaaaaaaaaaaaaaaaaaaaaaaaaaaaaaaaaaaaaaaaaaaaaaaaaaaaa

SEQ ID NO: 40318 - RNA, 1748 nt, Artificial Sequence
  mRNA product Design a-1 (hSL-A100) comprising derived and/or modified sequence from LASV(G502-SLE-2009;Clade IV)__AIT17126__GPCmut12 (opt5)
aggagagucccgcagucggcguccagcggcucugcuuguucgugugugugucguugcaggccuuauucaagcuuaccaugggccagaucgugaccuucuuucaagaggucccccacguuauugaagaggugaugaacaucgugcugauugcccucagcauccuggcuguccuuaaggggcuguacaauuucgccacaugcggacucgugggccugcuuacguuucugcuccugugugggagauccugcaccacaggacuguauaaaggcguuuacgaacuccagacccuggagcuuaacauggaaacacugaauauguguaugccucucucuugcaccaagaacaauagccaucacuauauuaugguggggaacgagacaggacuggagcuuacccugacgaauaccuccaucaucaaccauaaauucuguaaucucucugacgcgcacaagaaaaaccuguacgaucaugcucugaugagcauuaucuccacauuucaccucucuauuccgaauuucaaccaguaugaagccaugagcugcgacuuuaauggcggcaagaucuccguccaguacaaccugagccacucuuaugccggggaugcugccgaccauuguggaaccguggcuaauggcguucuucaaacauucaugcggauggccuggggaggguccuacauugcgcuggauagcggccgcgggagaugggacugcaucaugaccucuuaccaguaucucauuauccagaacacgacaugggaggaucacugucaguuuucccggcccagcccuaucggauaccugggccuucugucucaacgcaccagagacauuuauaucucccggcgccuccugggcacauucaccuggacccugagcgauuccgaagggaaggacacacccggaggcuacugccucacgagauggaugcugauugaggccgagcuuaaauguuuugggaacaccgcuguggccaagugcaaugaaaaacaugaugaggaguucugcgacaugcugcggcucuuugauuucuguaagcaggcuauccagcgccugaaagccgaagcgcagaugucuauucaacuuaucaacaaggccgucaaugcucugaucaacgaccagcucgugaugaagaaucaccugagagacauuaugggaaucccuuauugcaacuacagccgguauuguuaccugaaucacacaaccacaggccgcaccucccuccccaaaugcugucuggugagcaacgggucuuaccuuaaugaaacgcauuucuccgaugacauugagcagcaagccgauaacaugaucacagagaugcugcagaaggaauauauggagagacagggaaaaaccccucucggccuggucgaccuguuuguuuucagcaccucuuuuuaccuuauuagcaucuuccuccaccuggugaagaucccgacacaucggcacauugugggcaaauccugccccaagccucaucgccugaaucacauggggaucuguucuugcggacucuauaaacagcccggcgucccugugaaguggaagagaugaggacuagucccuguucccagagcccacuuuuuuuucuuuuuuugaaauaaaauagccugucuuucagaucucaaaggcucuuuucagagccaccaaaaaaaaaaaaaaaaaaaaaaaaaaaaaaaaaaaaaaaaaaaaaaaaaaaaaaaaaaaaaaaaaaaaaaaaaaaaaaaaaaaaaaaaaaaaaaaaaaaaa

SEQ ID NO: 40319 - RNA, 1748 nt, Artificial Sequence
  mRNA product Design a-1 (hSL-A100) comprising derived and/or modified sequence from LASV(G733-SLE-2010;Clade IV)__AIT17154__GPCmut12 (opt5)
aggagagucccgcagucggcguccagcggcucugcuuguucgugugugugucguugcaggccuuauucaagcuuaccaugggccagaucgugaccuucuuucaagaggucccccacguuauugaagaggugaugaacaucgugcugauugcccucagcauccuggcuguccuuaaggggcuguacaauuucgccacaugcggaauugugggccucguuuccuuucugcuucugugugggagaucuugcacgaccagccucuauaaaggaguguacgaacugcagacacuggagcucaacauggaaacccugaauauguguaugccucuuuccugcacaaagaacaauucucaucacuauaucauggucggcaacgagaccgggcuggagcucacacugaccaauacgagcaucauuaaccauaaauucuguaaucuuuccgacgcgcacaagaaaaaccuguacgaucaugcucucaugucuaucauuagcaccuuucaccuguccaucccgaauuucaaccaguaugaagccaugagcugcgacuuuaauggaggcaagauuucugugcaguacaaccugucccacagcuaugccggcgaugcugccaaucauugugggacaaucgcuaacggaguucuccaaaccuucaugcggauggccuggggcgggucuuacauugcgcuggacuccggacgcgauagaugggacugcaucaugacaagcuaccaguaucuuaucauucagaacaccacgugggaggaucacugucaguuuucucggcccuccccuaucggcuaccuggggcuccugagccaacgcacaagagacauuuauaucucccggcgccuucugggaaccuucacauggacccucucugauagcgaaggcaaggacacccccggcggguacugccugacaagauggaugcugauugaggccgagcucaaauguuuuggaaauacggcuguggccaagugcaacgaaaaacaugaugaggaguucugcgacaugcugcggcuuuuugauuucuguaagcaggcuauccagcgccugaaagccgaagcgcagauguccauccaacucauuaauaaggccgucaacgcucugaucaaugaccagcuuauuaugaagaaccaccugagagacaucaugggcauuccuuauugcaauuacagcaaauauuguuaccucaaccacaccacaaccgggaagacaucucugcccaaaugcugucugguguccaauggaagcuaccucaacgaaacccauuucucugaugacaucgagcagcaagccgauaauaugaucacggagaugcugcagaaggaauauauggagcggcagggcaaaacaccucuugggcugguggaccucuuugucuucagcaccuccuuuuaccugauuucuaucuuccugcaccuuguuaagauuccgacccaucgccacguggugggaaaaagcugccccaagccucauagacucaaccacaugggcaucuguuccugcggccuguaugggcagcccggagucccugugaaguggaaacggugaggacuagucccuguucccagagcccacuuuuuuuucuuuuuuugaaauaaaauagccugucuuucagaucucaaaggcucuuuucagagccaccaaaaaaaaaaaaaaaaaaaaaaaaaaaaaaaaaaaaaaaaaaaaaaaaaaaaaaaaaaaaaaaaaaaaaaaaaaaaaaaaaaaaaaaaaaaaaaaaaaaaa

SEQ ID NO: 40320 - RNA, 1748 nt, Artificial Sequence
  mRNA product Design a-1 (hSL-A100) comprising derived and/or modified sequence from MOPV/LASV reassortant(IGS-1;Clade IV)__AFY05576__GPCmut12 (opt5)
aggagagucccgcagucggcguccagcggcucugcuuguucgugugugugucguugcaggccuuauucaagcuuaccaugggccagaucgugaccuucuuucaagaggucccccacguuauugaagaggugaugaacaucgugcugauugcccucagcguccuggcugugcuuaaggggcuguacaauuucgccacaugcggacucguuggccuggugacguuucuucugcucugugggagauccugcaccacaucucuguauaaaggagucuacgaacugcagacccucgagcugaacauggaaacacuuaauauguguaugccucugagcugcaccaagaacaauucccaucacuauaucauggugggcaacgagacagggcucgagcugacccuuacgaauaccucuauuaucaaccauaaauucuguaaucugagcgacgcgcacaagaaaaaccucuacgaucaugcucugauguccaucauuucuacauuucaccugagcaucccgaauuucaaccaguaugaagccauguccugcgacuuuaauggaggcaagauuagcguucaguacaaccucucucacuccuaugccggcgaugcugccaaucauugugggaccguggcuaacggaguccugcaaacauucaugcggauggccuggggcgggagcuacaucgcgcuugacucuggacgcggcaacugggauugcauuaugaccuccuaccaguaucugaucauucagaauacgacaugggaggaccacugucaguuuagcagacccucuccuaucggguaccucggacugcuuucccaacggacccgcgauaucuauauuagcagacggcugcucggcacauucaccuggacccuguccgacucugaaggcgaggauacacccgggggauacugccugacgcgcuggaugcucaucgaggccgaacugaaguguuuuggcaacaccgcuguggccaaaugcaaugagaagcaugacgaagaguucugcgauaugcuuagacuguuugacuucuguaaacaggcuauucagcggcucaaggccgaagcgcagaugagcauccaacugauuaacaaagccgugaaugcucuuaucaacgaucagcugaucaugaagaaucaccuccgcgacauuauggggaucccuuauugcaacuacuccaaguauuguuaccugaaucacacaaccacaggaagaaccagccugcccaaaugcugucucgucucuaacggcuccuaccugaaugagacgcauuucagcgacgauauugagcagcaagccgacaacaugaucacagaaaugcuucagaaggaguauauggaacggcaggggaaaaccccucugggacucguugaucuguuuguguucucuaccagcuuuuaccugauuuccaucuuccuucaccucgugaagaucccgacacaucgccacauugucggcaaaucuugccccaagccucauagacugaaucacaugggcaucuguagcugcgggcuguauaaacagcccggagugccuguuaaguggaagcggugaggacuagucccuguucccagagcccacuuuuuuuucuuuuuuugaaauaaaauagccugucuuucagaucucaaaggcucuuuucagagccaccaaaaaaaaaaaaaaaaaaaaaaaaaaaaaaaaaaaaaaaaaaaaaaaaaaaaaaaaaaaaaaaaaaaaaaaaaaaaaaaaaaaaaaaaaaaaaaaaaaaaa

SEQ ID NO: 40321 - RNA, 1748 nt, Artificial Sequence
  mRNA product Design a-1 (hSL-A100) comprising derived and/or modified sequence from LASV(LM765-SLE-2012;Clade IV)__AIT17814__GPCmut12 (opt5)
aggagagucccgcagucggcguccagcggcucugcuuguucgugugugugucguugcaggccuuauucaagcuuaccaugggccagaucgugaccuucuuucaagaggucccccacguuauugaagaggugaugaacaucgugcugauugcccucagcauccuggcuguccuuaaggggcuguacaauuucgccacaugcggacucgugggccugguuacguuucuucugcucugugggagauccugcaccacaucucuguauaaaggaguguacgaacugcagacccucgagcugaacauggaaacacuuaauauguguaugccucugagcugcaccaagaacaauucccaucacuauauuauggucggcaacgagacagggcucgagcugacccuuacgaauaccucuaucaucgaccauaaauucuguaaccugagcgaugcgcaccggaagaaucucuacgaccaugcucugauguccauuaucucuacauuucaccugagcauuccgaacuucaaucaguaugaagccauguccugcgauuuuaacggaggcaaaaucagcgugcaguacaaucucucucacuccuaugccaaggacgcugccgaucauuguggcaccguugcuaacggggugcugcaaacauucaugcgcauggccuggggaggcagcuacauugcgcuugacucugggagaggacggugggauugcaucaugaccuccuaccaguaucugauuauccagaauacgacaugggaggaccacugucaguuuagccgccccucuccuaucggcuaccucgggcugcuuucccaaagaacccgggauauuuauaucagccgcagacugcucggaacauucaccuggacccuguccgacucugaaggcaaggauacacccggcggguacugccugacgcgguggaugcucauugaggccgagcugaaauguuuuggaaacaccgcugucgccaagugcaacgaaaaacaugacgaggaguucugcgauaugcuucgccuguuugacuucuguaagcaggcuauccagagacucaaagccgaagcgcagaugagcauucaacugaucaauaaggccgugaacgcucuuaucaaugaccagcugauuaugaagaaccaccuccgggauaucaugggcauuccuuauugcaauuacuccaaauauuguuaccugaaccacacaaccacagggaagaccagccugcccaaaugcugucucgugucuaauggauccuaccugaacgaaacgcauuucagcgacgauaucgagcagcaagccgacaauaugauuacagagaugcuucagaaggaauauauggagcgccagggcaaaaccccucuggggcucgucgaucuguuuguuuucucuaccagcuuuuaccugaucuccaucuuccuucaccucgugaagauuccgacacauagacacaucgugggaaaacccugcccuaagccccaucggcugaaccacaugggcauuuguucuugcggccuguauaagcagccugggguccccgugaaauggaagcgcugaggacuagucccuguucccagagcccacuuuuuuuucuuuuuuugaaauaaaauagccugucuuucagaucucaaaggcucuuuucagagccaccaaaaaaaaaaaaaaaaaaaaaaaaaaaaaaaaaaaaaaaaaaaaaaaaaaaaaaaaaaaaaaaaaaaaaaaaaaaaaaaaaaaaaaaaaaaaaaaaaaaaa

SEQ ID NO: 40322 - RNA, 1748 nt, Artificial Sequence
  mRNA product Design a-1 (hSL-A100) comprising derived and/or modified sequence from LASV(LM776-SLE-2012;Clade IV)__AIT17824__GPCmut12 (opt5)
aggagagucccgcagucggcguccagcggcucugcuuguucgugugugugucguugcaggccuuauucaagcuuaccaugggccagaucgugaccuucuuucaagaggucccccacguuauugaagaggugaugaacaucgugcugauugcccucagcauccuggcuguccuuaaggggcuguacaauuucgccacaugcggacucgugggccugguuacguuucuucugcucugugggagauccugcaccacaucuguguauaaaggagucuacgaacugcagacccuggagcucaacauggaaacacugaauauguguaugccucuuagcugcaccaagaacaauucccaucacuauauuauggugggcaacgagacagggcuggagcucacccugacgaauaccucuaucaucaaccauaaauucuguaaucuuagcgacgcgcacaagaaaaaccuguacgaucaugcucucauguccauuaucucuacauuucaccugagcauuccgaauuucaaccaguaugaagccauguccugcgacuuuaauggaggcaagaucagcguucaguacaaccugucucacuccuaugccggcgaugcugccaaucauugugggaccguggcuaacggaguccuccaaacauucaugcggauggccuggggcgggagcuacauugcgcuggacucuggacacggcaagugggauugcaucaugaccuccuaccaguaucuuauuauccagaacacgacaugggaggaccauugucaguuuagccgccccucuccuaucggguaccugggacuccugucccaaagaacccgggauauuuauaucagccgcagacuucugggcacauucaccuggacccucuccgacucugaaggcaaagauacacccgggggauacugccugacgcgguggaugcugauugaggccgagcucaaguguuuuggcaauaccgcuguggccaaaugcaacgaaaagcacgacgaggaguucugcgauaugcugcgccuuuuugacuucuguaaacaggcuauccagagacugaaggccgaagcgcagaugagcauucaacucaucaauaaggccgugaacgcucugaucaaugaucagcuuauuaugaaaaaccaucugcgggacaucauggggauuccuuauugcaauuacuccaaguauuguuaccucaaccacacaaccacaggaaaaaccagccugcccaagugcugucuggucucuaauggcuccuaccucaacgaaacgcacuucagcgacgauaucgagcagcaagccgacaauaugauuacagagaugcugcagaaagaauauauggagcgccaggggaagaccccucuuggacugguugaucucuuuguguucucuaccagcuuuuaccugaucuccaucuuccugcaucuugugaaaauuccgacacacagacauaucgucggcaagucuugccccaagccucaccggcucaaccacaugggcauuuguagcugcgggcuguauaaacagcccggagugccuguucgcuggaagagaugaggacuagucccuguucccagagcccacuuuuuuuucuuuuuuugaaauaaaauagccugucuuucagaucucaaaggcucuuuucagagccaccaaaaaaaaaaaaaaaaaaaaaaaaaaaaaaaaaaaaaaaaaaaaaaaaaaaaaaaaaaaaaaaaaaaaaaaaaaaaaaaaaaaaaaaaaaaaaaaaaaaaa

SEQ ID NO: 40323 - RNA, 1748 nt, Artificial Sequence
  mRNA product Design a-1 (hSL-A100) comprising derived and/or modified sequence from LASV(Mad39;Clade IV)__ANH09722__GPCmut12 (opt5)
aggagagucccgcagucggcguccagcggcucugcuuguucgugugugugucguugcaggccuuauucaagcuuaccaugggccagaucgugaccuucuuucaagaggucccccacguuauugaagaggugaugaacaucgugcugauugcccucagcauccuggcuguccuuaaggggcuguacaauguggccacaugcggacucauuggccugguuacguuccuucugcucugugggagauccugcaccacaacccuguauaaaggaguguacgaacugcaggcgcucgagcugaacauggaaacacuuaauauguguaugccucugucuugcaccaagaacaauagccaucacuauauccgggucggcaacgagacagggcucgagcugacccuuacgaauaccucccugaucaaccauaaauuuuguaaucucucugacgcucacaagaaaaaccuguacgaucaugcccugaugagcauuaucuccacauuccaccucucuauuccgaauuuuaaccaguaugaagccaugagcugcgacuucaaugauggaaagaucuccgugcaguacaaccugagccacaccuaugcuggcgacacagccaaucauuguggcaccguugcuaacggggugcuucaaacguuuaugcgcauggccuggggaggcucuuacauugcgcuggauuccgggagaggaggcugggacugcaucaugacaagcuaccaguaucucauuauccagaacaccacaugggaggaucacugucaguucucucggcccuccccuaucggguaccugggacuucugagccaacgcaccagagacauuuauaucucucggcgccuccugggcaccuuuacauggacgcuguccgauagcgaaggcaaggacacccccgggggauacugccucacaagauggaugcugauugaggccgagcuuaaauguuucggcaauaccgcugucgccaagugcaacgaaaaacaugaugaggaauuuugcgacaugcugcgccucuucgauuuuuguaagcaggcuauccagcggcugaaagccgaggcgcagauguccauucaacuuaucaauaaggccgugaacgcucugaucaaugaccagcucauuaugaagaaccaccugagagacaucauggggauuccuuauugcaauuacucuaaauauuguuaccugaaccacacagugaccggaaagacgagccuccccaaaugcugucuggucuccaauggcagcuaccuuaacgaaacacauuucucugaugacaucgagcagcaagccgauaauaugauuaccgagaugcugcagaaggaauauauggagcggcaggggaaaaccccucucggacugguugaccuguucguguuuuccaccagcuucuaccuuaucucuaucuuucuccaccuggugaagauuccgacacaucgccacgucgugggcaaacccugcccuaagccccauagacugaaccacaugggcaucuguagcugcggguucuauaagcagccuggaguucccgugcgguggaaacgcugaggacuagucccuguucccagagcccacuuuuuuuucuuuuuuugaaauaaaauagccugucuuucagaucucaaaggcucuuuucagagccaccaaaaaaaaaaaaaaaaaaaaaaaaaaaaaaaaaaaaaaaaaaaaaaaaaaaaaaaaaaaaaaaaaaaaaaaaaaaaaaaaaaaaaaaaaaaaaaaaaaaaa

SEQ ID NO: 40324 - RNA, 1748 nt, Artificial Sequence
  mRNA product Design a-1 (hSL-A100) comprising derived and/or modified sequence from LASV(Z0947-SLE-2011;Clade IV)__AIT17840__GPCmut12 (opt5)
aggagagucccgcagucggcguccagcggcucugcuuguucgugugugugucguugcaggccuuauucaagcuuaccaugggccagaucgugaccuucuuucaagaggucccccacguuauugaagaggugaugaacaucgugcugauugcccucagcauccuggcuguccuuaaggggcuguacaauuucgccacaugcggacucgugggccugguuacguuucuucugcucugugggagauccugcaccauuucucuguauaaaggaguguacgaacugcagacacucgagcugaacauggaaacccuuaauauguguaugccucugagcugcacaaagaacaauucccaucacuauaucauggucggcaacgagaccgggcucgagcugacacuuaccaauacgucuaucauuaaccauaaauucuguaaucugagcgacgcgcacaagaaaaaccucuacgaucaugcucugauguccaucauuucuaccuuucaccugagcaucccgaauuucaaccaguaugaagccauguccugcgacuuuaauggaggcaagauuagcgugcaguacaaccucucucacuccuaugccggcgaugcugccaaucauugugggacaguugcuaacggagugcugcaaaccuucaugcggauggccuggggcgggagcuacaucgcgcuugacucuggacgcgauagaugggacugcauuaugacauccuaccaguaucugaucauccagaacaccacgugggaggaucacugucaguuuagccggcccucuccuauuggcuaccucgggcugcuuucccaacgcacaagagacaucuauauuagccggcgccugcucggaaccuucacauggacccuguccgauucugaaggcaaggacacccccggcggguacugccugacaagauggaugcucaucgaggccgagcugaaauguuuuggaaauacggcugucgccaagugcaacgaaaaacaugaugaggaguucugcgacaugcuucggcuguuugauuucuguaagcaggcuauucagcgccucaaagccgaagcgcagaugagcauccaacugaucaauaaggccgugaacgcucuuauuaaugaccagcugaucaugaagaaccaccucagagacauuaugggcaucccuuauugcaauuacuccaaauauuguuaccugaaccacaccacaaccgggaagacaagccugcccaaaugcugucucgugucuaauggauccuaccugaacgaaacccauuucagcgaugacauugagcagcaagccgauaauaugaucacggagaugcuucagaaggaauauauggagcggcagggcaaaacaccucuggggcucgucgaccuguuuguuuucucuaccagcuuuuaccugaucuccauuuuccuucaccucgugaagaucccgacccaucgccacauugugggaaaacccugcccuaagccccauagacugaaccacaugggcaucuguucuugcggccuguauaagcagccugggguccccgugaaauggaagcggugaggacuagucccuguucccagagcccacuuuuuuuucuuuuuuugaaauaaaauagccugucuuucagaucucaaaggcucuuuucagagccaccaaaaaaaaaaaaaaaaaaaaaaaaaaaaaaaaaaaaaaaaaaaaaaaaaaaaaaaaaaaaaaaaaaaaaaaaaaaaaaaaaaaaaaaaaaaaaaaaaaaaa

SEQ ID NO: 40325 - RNA, 1724 nt, Artificial Sequence
  mRNA product Design a-1 (A100) comprising derived and/or modified sequence from LASV(Josiah;Clade IV)__NP_694870__GPCmut12 (opt1)
aggagagucccgcagucggcguccagcggcucugcuuguucgugugugugucguugcaggccuuauucaagcuuaccaugggccagaucgugaccuucuuccaggaggucccccacgugaucgaggaggugaugaacaucguccugaucgcccucagcgugcuggccgugcugaaggggcucuacaacuucgcgaccugcggccuggucgggcuggugacguuccuccugcugugcggccgcuccugcaccaccagccucuacaaggggguguacgagcugcagacccuggagcucaacauggagacgcugaacaugugcaugccgcuguccugcaccaagaacaacagccaccacuacaucauggucggcaacgagaccggccucgagcugacgcugaccaacaccuccaucaucaaccacaaguucugcaaccucagcgacgcccacaagaagaaccuguacgaccacgcccugauguccaucaucagcaccuuccaccucuccauccccaacuucaaccaguacgaggccaugagcugcgacuucaacgggggcaagaucuccgugcaguacaaccugagccacuccuacgccggggacgcggccaaccacugcggcacgguggccaacgggguccugcagaccuucaugcggauggccuggggcggcagcuacaucgcgcucgacuccgggcgcggcaacugggacugcaucaugaccagcuaccaguaccugaucauccagaacaccacgugggaggaccacugccaguucucccggcccagccccaucggguaccugggccuccugucccagcgcacccgggacaucuacaucagccgccggcugcucggcaccuucaccuggacgcugagcgacuccgaggggaaggacaccccgggcggguacugccugacccgcuggaugcucaucgaggccgagcugaagugcuucggcaacaccgccguggccaagugcaacgagaagcacgacgaggaguucugcgacaugcugcggcuguucgacuucugcaagcaggccauccagcgccugaaggcggaggcccagaugagcauccagcugaucaacaaggccgugaacgcccucaucaacgaccagcugaucaugaagaaccaccuccgggacaucauggggauccccuacugcaacuacuccaaguacugcuaccucaaccacacgaccaccggccgcaccagccugcccaagugcugccuggucuccaacggcagcuaccucaacgagacgcacuucuccgacgacaucgagcagcaggccgacaacaugaucaccgagaugcugcagaaggaguacauggagcggcaggggaagacgccccugggccucguggaccuguucguguucagcaccuccuucuaccugaucagcaucuuccugcaccucgucaagaucccgacccaccgccacaucguggggaaguccugccccaagccccaccggcugaaccacaugggcaucugcagcugcgggcuguacaagcagcccggcgugccggucaaguggaagcgcugaggacuagucccuguucccagagcccacuuuuuuuucuuuuuuugaaauaaaauagccugucuuucagaucuaaaaaaaaaaaaaaaaaaaaaaaaaaaaaaaaaaaaaaaaaaaaaaaaaaaaaaaaaaaaaaaaaaaaaaaaaaaaaaaaaaaaaaaaaaaaaaaaaaaa

SEQ ID NO: 40326 - RNA, 1721 nt, Artificial Sequence
  mRNA product Design a-1 (A100) comprising derived and/or modified sequence from LASV(LP;Clade I)__AAF86701__GPCmut12 (opt1)
aggagagucccgcagucggcguccagcggcucugcuuguucgugugugugucguugcaggccuuauucaagcuuaccaugggccagaucaucaccuucuuccaggaggugccccacgucaucgaggaggugaugaacaucgugcugaucgcccucagccugcuggccauccucaaggggcuguacaacaucgcgaccugcggcaucaucgggcuggucgccuuccucuuccugugcggcaaguccugcagccugacgcucaagggcggguacgagcugcagacccuggagcucaacauggagacccugaacaugugcaugccgcuguccugcacgaagaacagcucccaccacuacauccgcgugggcaacgagaccgggcucgagcugacccugaccaacacgagcaucaucaaccacaaguucugcaaccucuccgacgcccacaagaagaaccuguacgaccacgcccugaugagcaucaucuccaccuuccaccucagcauccccaacuucaaccaguacgaggccauguccugcgacuucaacggcgggaagaucagcgugcaguacaaccugucccacagcuacgcgggcgacgccgccgagcacugcgggaccgucgccaacggcgugcugcagaccuucaugcggauggcguggggcgggcgcuacaucgcccucgacuccggcaaggggaacugggacugcaucaugacgagcuaccaguaccugaucauccagaacaccaccugggaggaccacugccaguucucccggcccagccccaucggcuaccugggccuccugucccagcgcacccgggacaucuacaucagccgccggcugcucgggacguucaccuggacccugagcgacuccgagggcaacgagacccccgggggcuacugccugacgcgcuggaugcucaucgaggccgagcugaagugcuucgggaacaccgccguggccaagugcaacgagaagcacgacgaggaguucugcgacaugcugcggcuguucgacuucugcaagcaggcgauccgccggcugaaggccgaggcccagaugagcauccagcugaucaacaaggccgucaacgcccucaucaacgaccagcugaucaugaagaaccaccuccgcgacaucaugggcauccccuacugcaacuacuccaaguacugcuaccucaaccacaccagcuccggccggaccagccugcccaagugcugccugaucuccaacgggagcuaccucaacgagacgcaguucuccgacgacaucgagcagcaggcggacaacaugaucaccgagaugcugcagaaggaguacaucgagcgccagggcaagaccccgcuggggcucguggacaucuucaucuucagcaccuccuucuaccugaucagcaucuuccugcaccugaucaagaucccgacgcaccggcacaucgugggcaagcccugccccaagccccaccgccucaaccacaugggggucugcuccugcggccuguacaagcacccgggcgugcccaccaaguggaagcggugaggacuagucccuguucccagagcccacuuuuuuuucuuuuuuugaaauaaaauagccugucuuucagaucuaaaaaaaaaaaaaaaaaaaaaaaaaaaaaaaaaaaaaaaaaaaaaaaaaaaaaaaaaaaaaaaaaaaaaaaaaaaaaaaaaaaaaaaaaaaaaaaaaaaa

SEQ ID NO: 40327 - RNA, 1721 nt, Artificial Sequence
  mRNA product Design a-1 (A100) comprising derived and/or modified sequence from LASV(803213;Clade II)__AAF86703__GPCmut12 (opt1)
aggagagucccgcagucggcguccagcggcucugcuuguucgugugugugucguugcaggccuuauucaagcuuaccaugggccagaucaucaccuucuuccaggaggugccccacgucaucgaggaggugaugaacaucgugcugaucgcccucagccugcuggccauccucaaggggaucuacaacgucgcgaccugcggccuguucgggcugaucuccuuccuccugcugugcggccgcagcugcuccgugacguacaaggggguguacgagcuccagacccuggagcugaacauggccaaccucaacaugugcaugccgcugagcugcaccaagaacaacucccaccacuacaucauggucggcaacgagacgggccuggagcucacccugaccaacaccagcaucaucaaccacaaguucugcaaccuguccgacgcccacaagaagaaccucuacgaccacgcccugaugagcaucaucuccacguuccaccugagcauccccaacuucaaccaguacgaggccauguccugcgacuucaacgggggcaagaucagcgugcaguacaaccucucccacagcuucgcgguggacgccgccaaccacugcgggaccaucgccaacggcguccugcagaccuucaugcggauggcguggggcggguccuacaucgcccuggacagcggcaaggggaacugggacugcaucaugaccuccuaccaguaccucaucauccagaacacgaccugggaggaccacugccaguucagccgccccucccccaucggcuaccuggggcugcucagccagcggacccgcgacaucuacaucagccggcgccugcugggcaccuucacguggacccucuccgacagcgagggcaacgaggcccccgggggcuacugccugacccgguggaugcugaucgaggccgagcucaagugcuucgggaacaccgccguggcgaagugcaacgagaagcacgacgaggaguucugcgacaugcugcgccuguucgacuucugcaagcaggccaucaagcggcucaagacggaggcccagauguccauccagcugaucaacaaggccgugaacgcccugaucaacgaccagcucaucaugaagaaccaccuccgcgacaucaugggcauccccuacugcaacuacagccgguacugcuaccugaaccacaccgucaccgggaagaccucccugccccgcugcugccuggugagcaacggcuccuaccugaacgagacgcacuucagcgacgacaucgagcagcaggcggacaacaugaucaccgagaugcuccagaaggaguacauggaccggcagggcaagaccccgcuggggcugguggaccucuucgucuucuccaccagcuucuaccugaucuccaucuuccugcaccuggugaagaucccgacgcaccgccacaucgugggcaagcccugccccaagccccaccggcucaaccacauggggaucugcagcugcggccuguacaagcacccggggguccccgugaaguggaagcgcugaggacuagucccuguucccagagcccacuuuuuuuucuuuuuuugaaauaaaauagccugucuuucagaucuaaaaaaaaaaaaaaaaaaaaaaaaaaaaaaaaaaaaaaaaaaaaaaaaaaaaaaaaaaaaaaaaaaaaaaaaaaaaaaaaaaaaaaaaaaaaaaaaaaaa

SEQ ID NO: 40328 - RNA, 1721 nt, Artificial Sequence
  mRNA product Design a-1 (A100) comprising derived and/or modified sequence from LASV(GA391;Clade III)__CAA36645__GPCmut12 (opt1)
aggagagucccgcagucggcguccagcggcucugcuuguucgugugugugucguugcaggccuuauucaagcuuaccaugggccagaucgugaccuucuuccaggaggucccccacgugaucgaggaggugaugaacaucguccugaucgcccucagcauccuggccauccugaaggggcucuacaacguggcgaccugcggccugaucgggcuggugacguuccuccugcuguccggccgcagcugcucccucaucuacaaggggaccuacgagcugcagacccuggagcucaacauggagacccugaacaugugcaugccgcugagcugcaccaagaacaacucccaccacuacauccgggucggcaacgagaccggccucgagcugacccugacgaacaccagcauccucaaccacaaguucugcaaccuguccgacgcccacaagcgcaaccuguacgaccacagccucauguccaucaucagcaccuuccaccuguccauccccaacuucaaccaguacgaggccaugagcugcgacuucaacgggggcaagaucaccgugcaguacaaccugucccacagcuucgccguggacgccgcggggcacugcggcacgcucgccaacgggguccugcagaccuucaugcggauggccuggggcggcuccuacaucgcccuggacagcgggcgcggcaacugggacugcaucaugaccuccuaccaguaccucaucauccagaacaccacgugggacgaccacugccaguucagccggcccucccccaucggguaccugggccugcucagccagcgcacccgggacaucuacaucagccgccggcugcugggcaccuucaccuggacgcucuccgacagcgaggggaacgagaccccgggcggguacugccugacccgcuggaugcugaucgaggcggagcucaagugcuucggcaacaccgccguggccaagugcaacgagaagcacgacgaggaguucugcgacaugcugcggcuguucgacuucugcaagcaggccauccgccggcucaagacggaggcccagauguccauccagcugaucaacaaggcggugaacgcccugaucaacgaccagcucaucaugaagaaccaccuccgcgacaucauggggauccccuacugcaacuacagccgguacugcuaccugaaccacaccuccaccggcaagaccagccugccccgcugcugccugaucuccaacggcagcuaccugaacgagacgaaguucuccgacgacaucgagcagcaggccgacaacaugaucaccgagaugcuccagaaggaguacaucgaccggcaggggaagacgccccugggccuggucgaccuguucguguucagcaccuccuucuaccucaucagcaucuuccugcaccuggugaagaucccgacccaccgccacaucgucgggaagcccugccccaagccccaccggcucaaccacaugggcaucugcuccugcgggcuguacaagcagccgggcgugcccgugcgcuggaagcggugaggacuagucccuguucccagagcccacuuuuuuuucuuuuuuugaaauaaaauagccugucuuucagaucuaaaaaaaaaaaaaaaaaaaaaaaaaaaaaaaaaaaaaaaaaaaaaaaaaaaaaaaaaaaaaaaaaaaaaaaaaaaaaaaaaaaaaaaaaaaaaaaaaaaa

SEQ ID NO: 40329 - RNA, 1724 nt, Artificial Sequence
  mRNA product Design a-1 (A100) comprising derived and/or modified sequence from LASV(AV;Clade V)__CCA30314__GPCmut12 (opt1)
aggagagucccgcagucggcguccagcggcucugcuuguucgugugugugucguugcaggccuuauucaagcuuaccaugggccagaucgugaccuucuuccaggaggucccccacgugaucgaggaggugaugaacaucguccugaucgcccucagcauccuggccgugcugaaggggcucuacaacaucgcgaccugcggccugaucgggcugaucacguuccuccugcugugcggccgcuccugcagcuccaaccucuacaaggggguguacgagcugcagagccuggaccucaacauggagacccugaacaugugcaugccgcuguccugcaccaagaacaacagccaccacuacauccgggucggcaacgacacgggccucgagcugacccugaccaacaccuccauccucaaccacaaguucugcaaccugagcgacgcccacaagaaggaccuguacgaccacgcccucauguccaucaucagcacguuccaccuguccauccccaacuucaaccaguacgaggccaugagcugcgacuucaacgggggcaagaucuccgugcaguacaaccugagccacuccuacgccaucgacgcggccaaccacugcgggaccguggccaacggcauccuccagaccuucaugcgcauggccuggggcgggagcuacaucgcgcuggacuccggccgggggaacugggacugcaucaugaccagcuaccaguaccugaucauccagaacacgaccugggagaaccacugccaguucucccgccccagccccaucggcuaccucgggcugcugagccagcggacccgcgacaucuacaucucccggcgccuccugggcaccuucacguggacccugagcgacuccgagggcaacgccacccccgggggcuacugccucacccgguggaugcugaucgaggccgagcugaagugcuucgggaacacggccgucgccaagugcaacgagaagcacgacgaggaguucugcgacaugcuccgccuguucgacuucugcaagcaggcgaucagccggcugaaguccgaggcccagaugagcauccagcucaucaacaaggccgugaacgcccugaucaacgaccagcugaucaugaagaaccaccuccgcgacaucaugggcauccccuacugcaacuacuccaaguacugcuaccugaaccacaccaucaccgggaagaccagccugcccaagugcugccucguguccaacggcagcuaccugaacgagacgcacuucuccgacgacaucgagcagcaggccgacaacaugaucaccgagaugcugcagaaggaguacauggagcggcagggcaagaccccgcucgggcuggucgaccuguucguguucagcaccuccuucuaccugaucagcaucuuccuccgccuggugaagaucccgacgcaccggcacaucgucggcaagcccugccccaagccccaccgccugaaccacauggggaucugcuccugcggccucuacaagcagccgggggugcccgugcgguggaagcgcugaggacuagucccuguucccagagcccacuuuuuuuucuuuuuuugaaauaaaauagccugucuuucagaucuaaaaaaaaaaaaaaaaaaaaaaaaaaaaaaaaaaaaaaaaaaaaaaaaaaaaaaaaaaaaaaaaaaaaaaaaaaaaaaaaaaaaaaaaaaaaaaaaaaaa

SEQ ID NO: 40330 - RNA, 1721 nt, Artificial Sequence
  mRNA product Design a-1 (A100) comprising derived and/or modified sequence from LASV(Togo/2016/7082;Clade VI)__AMR44577__GPCmut12 (opt1)
aggagagucccgcagucggcguccagcggcucugcuuguucgugugugugucguugcaggccuuauucaagcuuaccaugggccagaucaucaccuucuuccaggaggugccccacgucaucgaggaggugaugaacaucgugcugaucgcccucagccugcuggccauccucaagggggucuacaacguggcgaccugcggcaucaucgggcuggugacguuccuguuccucugcggccgcuccugcagccugaucuacaagggguccuacgagcugcagacccucgagcugaacauggagacccugaacaugugcaugccgcucagcugcacgaagaacuccagccaccacuacauccgggucggcaacgagaccggccuggagcugacccucaccaacacguccaucaucaaccacaaguucugcaaccugagcgacgcccacaagcgcaaccuguacgaccacgcccucauguccauccugagcaccuuccaccuguccauccccaacuucaaccaguacgaggccaugagcugcgacuucaacgggggcaagaucuccgugcaguacaaccucagccacgccuacgcgguggacgccgccgagcacugcgggaccgucgccaacggcgugcugcagaccuucaugcggauggcguggggcggguccuacaucgcccuggacagcggccgcgggaacugggacugcaucaugacguccuaccaguaccucaucauccagaacaccaccugggaggaccacugccaguucagccggcccucccccaucggcuaccuggggcugcucagccagcgcacccgggacaucuacaucagccgccggcugcugggcacguucaccuggacccucuccgacagcgagggcaacgagacccccgggggcuacugccugacgcgcuggaugcugaucgaggccgagcucaagugcuucgggaacaccgccguggccaagugcaacgagaagcacgacgaggaguucugcgacaugcugcggcuguucgacuucugcaagcaggcgauccagcgccucaaguccgaggcccagaugagcauccagcugaucaacaaggccgucaacgcccugaucaacgaccagcucaucaugaagaaccaccuccgggacaugaugggcauccccuacugcaacuacuccaaguacugcuaccugaaccacaccagcuccgggcgcaccagccugcccaagugcugccugguguccaacggcagcuaccugaacgagacgcacuucuccgacgacaucgagcagcaggccgacaacaugaucaccgagaugcuccagaaggaguacaucgaccggcagggcaagaccccgcuggggcugguggaccucuucgucuucagcaccuccuucuaccugaucagcaucuuccugcaccugaucaagaucccgacgcaccgccacaucgugggcaagcccugccccaagccccaccggcucaaccacauggggaucugcuccugcggccuguacaagcagccgggggugcccacccgcuggaagcggugaggacuagucccuguucccagagcccacuuuuuuuucuuuuuuugaaauaaaauagccugucuuucagaucuaaaaaaaaaaaaaaaaaaaaaaaaaaaaaaaaaaaaaaaaaaaaaaaaaaaaaaaaaaaaaaaaaaaaaaaaaaaaaaaaaaaaaaaaaaaaaaaaaaaa

SEQ ID NO: 40331 - RNA, 1721 nt, Artificial Sequence
  mRNA product Design a-1 (A100) comprising derived and/or modified sequence from LASV(KAK-428;Clade n.d. (VII))__ANH09740__GPCmut12 (opt1)
aggagagucccgcagucggcguccagcggcucugcuuguucgugugugugucguugcaggccuuauucaagcuuaccaugggccagaucgugaccuucuuccaggaggucccccacgugaucgaggaggugaugaacaucguccugaucgcccucagccugcuggccauccucaaggggcuguacaacuucgcgaccugcggcgugaucgggcugaucacguuccuccugcugugcggccgcuccugcagcgccaccuacaaggggcaguacgagcuccagacccuggagcugaacauggagucccucaacaugugcaugccgcugagcugcacgaagaacaacucccaccacuacauccgggccggcaacaacaccggccuggagcucacccugaccaacacgagcaucaucucccacaaguucugcaaccugagcgacgcccacaagaagaaccucuacgaccacacccugauguccaucaucaccaccuuccaccugagcauccccaacuucaaccaguacgaggccauguccugcgacuucaacgggggcaagaucagcauccaguacaaccucucccacagcuacgcgggggacgccgcccagcacugcggcacgguggccaacgggguccugcagaccuucaugcgcauggcguggggcggcuccuaccuggcccucgacagcgggcggcgcggcugggacugcaucaucuccagcuaccaguaccugaucauccagaacaccaccugggacgaccacugccaguucucccggcccagccccaucggguaccugggcuucgugagccagaagacgcgcgacaucuacaucucccggcgccuccugggcaccuucaccuggacccugagcgacuccgaggggcacgacaugccgggcggguacugccucacgcgguggaugcugaucgaggccgaccugaagugcuucggcaacaccgccguggccaagugcaacgagaagcacgacgaggaguucugcgacauguggcgccucuucgacuucugcaagcaggcgauccagcggcugaaggccgaggcccagaugaacauccagcugaucaacaaggccgucaacgcccucaucaacgaccagcugaugaugaagaaccaccuccgcgacaucauggggauccccuacugcaacuacagcaaguucugcuaccugaacaacaccaccacgggccggaccucccugccccgcugcugccugaucagcaacggcuccuaccucaacgagacccacuucagcgacgacaucgagcagcaggcggacaacaugaucaccgagaugcugcagaaggaguacauggaccggcaggggaagacgccccugggccucguggaccuguucguguucuccaccagcuucuaccugaucaccaucuuccuccaccuggucaagaucccgacccaccgccacaucguggggaagcccugccccaagccccaccggcugaaccacaugggcaucugcuccugcgggcuguacaagcagccgggcgugcccguccgcuggaagcggugaggacuagucccuguucccagagcccacuuuuuuuucuuuuuuugaaauaaaauagccugucuuucagaucuaaaaaaaaaaaaaaaaaaaaaaaaaaaaaaaaaaaaaaaaaaaaaaaaaaaaaaaaaaaaaaaaaaaaaaaaaaaaaaaaaaaaaaaaaaaaaaaaaaaa

SEQ ID NO: 40332 - RNA, 1721 nt, Artificial Sequence; identical to SEQ ID NO: 40326
  mRNA product Design a-1 (A100) comprising derived and/or modified sequence from LASV(Pinneo-NIG-1969;Clade I)__AIT17836__GPCmut12 (opt1)

SEQ ID NO: 40333 - RNA, 1721 nt, Artificial Sequence
  mRNA product Design a-1 (A100) comprising derived and/or modified sequence from LASV(ISTH0009-NIG-2011;Clade II)__AIT17404__GPCmut12 (opt1)
aggagagucccgcagucggcguccagcggcucugcuuguucgugugugugucguugcaggccuuauucaagcuuaccaugggccagaucaucaccuucuuccaggaggugccccacgucaucgaggaggugaugaacaucgugcugaucgcccucagccugcuggccauccucaaggggaucuacaacgucgcgaccugcggccuguucgggcugguguccuuccuccugcugugcggccgcagcugcuccacgaccuacaaggggguguacgagcuccagacccuggagcuggacauggccagccucaacaugugcaugccgcuguccugcacgaagaacaacagccaccacuacaucauggucggcaacgagaccggccuggagcucacccugaccaacacguccaucaucaaccacaaguucugcaaccugagcgacgcccacaagaagaaccucuacgaccacgcccugauguccaucaucagcaccuuccaccuguccauccccaacuucaaccaguacgaggccaugagcugcgacuucaacgggggcaagaucuccgugcaguacaaccucagccacgcguacgccguggacgccgccaaccacugcgggaccaucgcgaacggcguccugcagaccuucaugcggauggccuggggcggguccuacaucgcccuggacagcggcaagggguccugggacugcaucaugacgagcuaccaguaccucaucauccagaacaccaccugggaggaccacugccaguucucccgccccagccccaucggcuaccuggggcugcucagccagcggacccgcgacaucuacaucucccggcgccugcugggcacguucaccuggacccucagcgacuccgagggcaacgagacccccgggggcuacugccugacgcgguggaugcugaucgaggccgagcucaagugcuucgggaacaccgccguggcgaagugcaacgagaagcacgacgaggaguucugcgacaugcugcgccuguucgacuucugcaagcaggccauccggcgccucaagaccgaggcccagaugagcauccagcugaucaacaaggccgugaacgcccugaucaacgaccagcucaucaugaagaaccaccuccgggacaucaugggcaucccguacugcaacuacuccaaguacugcuaccugaaccacaccgucacggggaagaccagccugccccgcugcugccugguguccaacggcagcuaccugaacgagacccacuucuccgacgacaucgagcagcaggcggacaacaugaucaccgagcuccugcagaaggaguacauggaccggcagggcaagacgccccuggggcucguggaccuguucgucuucagcaccuccuucuaccugaucagcaucuuccugcaccucaucaagaucccgacccaccgccacaucaccggcaagcccugccccaagccccaccggcugaaccacauggggaucugcuccugcggccuguacaagcacccgggggugcccgugaaguggaagcgcugaggacuagucccuguucccagagcccacuuuuuuuucuuuuuuugaaauaaaauagccugucuuucagaucuaaaaaaaaaaaaaaaaaaaaaaaaaaaaaaaaaaaaaaaaaaaaaaaaaaaaaaaaaaaaaaaaaaaaaaaaaaaaaaaaaaaaaaaaaaaaaaaaaaaa

SEQ ID NO: 40334 - RNA, 1721 nt, Artificial Sequence
  mRNA product Design a-1 (A100) comprising derived and/or modified sequence from LASV(ISTH2010-NIG-2012;Clade II)__AIT17482__GPCmut12 (opt1)
aggagagucccgcagucggcguccagcggcucugcuuguucgugugugugucguugcaggccuuauucaagcuuaccaugggccagaucaucaccuucuuccaggaggugccccacgucaucgaggaggugaugaacaucgugcugaucgcccucagccugcuggccauccucaaggggaucuacaacgucgcgaccugcggccuguucgggcugguguccuuccuccugcugugcggccgcagcugcuccacgaccuacaaggggguguacgagcuccagacccuggagcuggacauggccagccucaacaugugcaugccgcuguccugcacgaagaacaacagccaccacuacaucauggucggcaacgagaccggccuggagcucacccugaccaacacguccaucaucaaccacaaguucugcaaccugagcgacgcccacaagaagaaccucuacgaccacgcccugauguccaucaucagcaccuuccaccuguccauccccaacuucaaccaguacgaggccaugagcugcgacuucaacgggggcaagaucuccgugcaguacaaccucagccacgcguacgccguggacgccgccaaccacugcgggaccaucgcgaacggcguccugcagaccuucaugcggauggccuggggcggguccuacaucgcccuggacagcggcaagggguccugggacugcaucaugacgagcuaccaguaccucaucauccagaacaucaccugggaggaccacugccaguucucccgccccagccccaucggcuaccuggggcugcucagccagcggacccgcgacaucuacaucucccggcgccugcugggcaccuucacguggacccucagcgacuccgagggcaacgagacccccgggggcuacugccugacccgguggaugcugaucgaggccgagcucaagugcuucgggaacacggccguggcgaagugcaacgagaagcacgacgaggaguucugcgacaugcugcgccuguucgacuucugcaagcaggccauccggcgccucaagaccgaggcccagaugagcauccagcugaucaacaaggccgugaacgcccugaucaacgaccagcucaucaugaagaaccaccuccgggacaucaugggcauccccuacugcaacuacuccaaguacugcuaccugaaccacaccgucaccgggaagacgagccugccccgcugcugccugguguccaacggcagcuaccugaacgagacccacuucuccgacgacaucgagcagcaggcggacaacaugaucaccgagcuccugcagaaggaguacaucgaccggcagggcaagaccccgcuggggcucguggaccuguucgucuucagcacguccuucuaccugaucagcaucuuccugcaccucgugaagaucccgacccaccgccacguggucggcaagcccugccccaagccccaccggcugaaccacauggggaucugcuccugcggccuguacaagcacccgggggugcccgugaaguggaagcgcugaggacuagucccuguucccagagcccacuuuuuuuucuuuuuuugaaauaaaauagccugucuuucagaucuaaaaaaaaaaaaaaaaaaaaaaaaaaaaaaaaaaaaaaaaaaaaaaaaaaaaaaaaaaaaaaaaaaaaaaaaaaaaaaaaaaaaaaaaaaaaaaaaaaaa

SEQ ID NO: 40335 - RNA, 1721 nt, Artificial Sequence
  mRNA product Design a-1 (A100) comprising derived and/or modified sequence from LASV(Lassa virus/H.sapiens-wt/NGA/2015/ISTH_0543;Clade II)__AVO03639__GPCmut12 (opt1)
aggagagucccgcagucggcguccagcggcucugcuuguucgugugugugucguugcaggccuuauucaagcuuaccaugggccagaucaucaccuucuuccaggaggugccccacgucaucgaggaggugaugaacaucgugcugaucgcccucagccugcuggccauccucaaggggaucuacaacgucgcgaccugcggccuguucgggcugguguccuuccuccugcugugcggccgcagcugcuccacgaccuacaaggggguguacgagcuccagacccuggagcuggacauggccaaccucaacaugugcaugccgcugagcugcacgaagaacaacucccaccacuacaucauggucggcaacgagaccggccuggagcucacccugaccaacacgagcaucaucaaccacaaguucugcaaccuguccgacgcccacaagaagaaccucuacgaccacgcccugaugagcaucaucuccaccuuccaccugagcauccccaacuucaaccaguacgaggccauguccugcgacuucaacgggggcaagaucagcgugcaguacaaccucucccacaccuacgcgguggacgccgccaaccacugcgggaccaucgccaacggcguccugcagacguucaugcggauggcguggggcgggagcuacaucgcccuggacuccggcaaggggagcugggacugcaucaugaccuccuaccaguaccucgugauccagaacaccaccugggaggaccacugccaguucagccgccccucccccaucggcuaccuggggcugcucagccagcggacgcgcgacaucuacaucagccggcgccugcugggcaccuucaccuggacccucuccgacagcgagggcaacgagacgcccgggggcuacugccugacccgguggaugcugaucgaggccgagcucaagugcuucgggaacaccgccguggccaagugcaacgagaagcacgacgaggaguucugcgacaugcugcgccuguucgacuucugcaagcaggcgauccggcgccucaagaccgaggcccagauguccauccagcugaucaacaaggccgucaacgcccugaucaacgaccagcucaucaugaagaaccaccuccgggacaucaugggcauccccuacugcaacuacagcaaguacugcuaccugaaccacacggugaccgggaagaccucccugccccgcugcugccuggugagcaacggcuccuaccugaacgagacccacuucagcgacgacaucgagcagcaggccgacaacaugaucacggagcuccugcagaaggaguacaucgaccggcagggcaagaccccgcuggggcucgucgaccuguucguguucuccaccagcuucuaccugaucuccaucuuccugcaccucgugaagaucccgacccaccgccacaucacgggcaagcccugccccaagccccaccggcugaaccacauggggaucugcagcugcggccuguacaagcacccggggguccccgugaaguggaagcgcugaggacuagucccuguucccagagcccacuuuuuuuucuuuuuuugaaauaaaauagccugucuuucagaucuaaaaaaaaaaaaaaaaaaaaaaaaaaaaaaaaaaaaaaaaaaaaaaaaaaaaaaaaaaaaaaaaaaaaaaaaaaaaaaaaaaaaaaaaaaaaaaaaaaaa

SEQ ID NO: 40336 - RNA, 1721 nt, Artificial Sequence
  mRNA product Design a-1 (A100) comprising derived and/or modified sequence from LASV(Lassa virus/H.sapiens-wt/NGA/2016/ISTH_0009;Clade II)__AVO03571__GPCmut12 (opt1)
aggagagucccgcagucggcguccagcggcucugcuuguucgugugugugucguugcaggccuuauucaagcuuaccaugggccagaucaucaccuucuuccaggaggugccccacgucaucgaggaggugaugaacaucgugcugaucgcccucagccugcuggccauccucaaggggaucuacaacgucgcgaccugcggccugcuggggcucguguccuuccugcugcucugcggccgcagcugcuccacgaccuacaaggggguguacgagcugcagacccuggagcucgacauggccagccugaacaugugcaugccgcuguccugcacgaagaacaacagccaccacuacaucauggucggcaacgagaccggccucgagcugacccugaccaacacguccaucaucaaccacaaguucugcaaccucagcgacgcccacaagaagaaccuguacgaccacgcccugauguccaucaucagcaccuuccaccucuccauccccaacuucaaccaguacgaggccaugagcugcgacuucaacgggggccggaucuccgugcaguacaaccugagccacuccuacgcgguggacgccgccaaccacugcgggaccaucgccaacggcguccugcagaccuucaugcgcauggcguggggcgggagcuacaucgcccucgacuccggcaaggggagcugggacugcaucaugacguccuaccaguaccugaucauccagaacaccaccugggaggaccacugccaguucagccggcccagccccaucggcuaccuggggcuccugucccagcgcacccgggacaucuacaucagccgccggcugcucggcacguucaccuggacccuguccgacagcgagggcaacgagacccccgggggcuacugccugacgcgcuggaugcucaucgaggccgagcugaagugcuucgggaacaccgccguggccaagugcaacgagaagcacgacgaggaguucugcgacaugcugcggcuguucgacuucugcaagcaggcgauccgccggcugaagaccgaggcccagauguccauccagcugaucaacaaggccgugaacgcccucaucaacgaccagcugaucaugaagaaccaccuccgcgacaucaugggcaucccguacugcaacuacagcaaguacugcuaccucaaccacaccgucacggggaagaccucccugccccggugcugccuggugagcaacggcuccuaccucaacgagacccacuucagcgacgacaucgagcagcaggccgacaacaugaucaccgagcugcugcagaaggaguacaucgaccgccagggcaagacgccccucgggcugguggaccuguucgucuucuccaccagcuucuaccugaucuccaucuuccuccaccuggugaagaucccgacccaccggcacaucaccggcaagcccugccccaagccccaccgccugaaccacauggggaucugcagcugcggccucuacaaccacccgggggugcccgucaaguggaagcggugaggacuagucccuguucccagagcccacuuuuuuuucuuuuuuugaaauaaaauagccugucuuucagaucuaaaaaaaaaaaaaaaaaaaaaaaaaaaaaaaaaaaaaaaaaaaaaaaaaaaaaaaaaaaaaaaaaaaaaaaaaaaaaaaaaaaaaaaaaaaaaaaaaaaa

SEQ ID NO: 40337 - RNA, 1721 nt, Artificial Sequence
  mRNA product Design a-1 (A100) comprising derived and/or modified sequence from LASV(Lassa virus/H.sapiens-wt/NGA/2016/ISTH_0017;Clade II)__AVO03567__GPCmut12 (opt1)
aggagagucccgcagucggcguccagcggcucugcuuguucgugugugugucguugcaggccuuauucaagcuuaccaugggccagaucaucaccuucuuccaggaggugccccacgucaucgaggaggugaugaacaucgugcugaucgcccucagccugcuggccauccucaaggggaucuacaacgucgcgaccugcggccuguucgggcugguguccuuccuccugcugugcggccgcagcugcuccacgaccuacaaggggguguacgagcuccagacccuggagcuggacauggccagccucaacaugugcaugccgcuguccugcacgaagaacaacagccaccacuacaucauggucggcaacgagaccggccuggagcucacccugaccaacacguccaucaucaaccacaaguucugcaaccugagcgacgcccacaagaagaaccucuacgaccacgcccugauguccaucaucagcaccuuccaccuguccauccccaacuucaaccaguacgaggccaugagcugcgacuucaacgggggcaagaucuccgugcaguacaaccucagccacaccuacgcgaucgacgccgccaaccacugcgggaccaucgccaacggcgugcugcagacguucaugcggauggcguggggcggguccuacaucgcccuggacagcggcaagggguccugggacugcaucaugaccagcuaccaguaccucaucauccagaacaccaccugggaggaccacugccaguucucccgccccagccccaucggcuaccuggggcugcucagccagcggacgcgcgacaucuacaucucccggcgccugcugggcaccuucaccuggacccucagcgacuccgagggcaacgagacgcccgggggcuacugccugacccgguggaugcugaucgaggccgagcucaagugcuucgggaacaccgccgucgccaagugcaacgagaagcacgacgaggaguucugcgacaugcugcgccuguucgacuucugcaagcaggcgauccggcgccucaagaccgaggcccagaugagcauccagcugaucaacaaggccgugaacgcccugaucaacgaccagcucaucaugaagaaccaccuccgggacaucaugggcauccccuacugcaacuacuccaaguacugcuaccugaaccacacggugaccgggaagaccagccugccccgcugcugccuggucuccaacggcagcuaccugaacgagacccacuucuccgacgacaucgagcagcaggccgacaacaugaucacggagcuccugcagaaggaguacauggaccggcagggcaagaccccgcuggggcucguggaccuguucguguucagcaccuccuucuaccugaucagcaucuuccugcaccucguccgcaucccgacccaccggcacgugaucggcaagcccugccccaagccccaccgccugaaccacauggggaucugcuccugcggccuguacaagcacccgggggugcccgucaaguggaagcggugaggacuagucccuguucccagagcccacuuuuuuuucuuuuuuugaaauaaaauagccugucuuucagaucuaaaaaaaaaaaaaaaaaaaaaaaaaaaaaaaaaaaaaaaaaaaaaaaaaaaaaaaaaaaaaaaaaaaaaaaaaaaaaaaaaaaaaaaaaaaaaaaaaaaa

SEQ ID NO: 40338 - RNA, 1721 nt, Artificial Sequence
  mRNA product Design a-1 (A100) comprising derived and/or modified sequence from LASV(Lassa virus/H.sapiens-wt/NGA/2018/ISTH_0959;Clade II)__AVV65099__GPCmut12 (opt1)
aggagagucccgcagucggcguccagcggcucugcuuguucgugugugugucguugcaggccuuauucaagcuuaccaugggccagaucaucaccuucuuccaggaggugccccacgucaucgaggaggugaugaacaucgugcugaucgcccucagccugcuggccauccucaaggggaucuacaacgucgugaccugcggccuguucgggcugguguccuuccuccugcugugcggccgcagcugcuccacgaccuacaagggggucuacgagcuccagacccuggagcuggacauggcgagccucaacaugugcaugccgcuguccugcacgaagaacaacagccaccacuacaucauggugggcaacgagaccggccuggagcucacccugaccaacacguccaucaucaaccacaaguucugcaaccugagcgacgcccacaagaagaaccucuacgaccacgcccugauguccaucaucagcaccuuccaccuguccauccccaacuucaaccaguacgaggccaugagcugcgacuucaacgggggcaagaucuccgugcaguacaaccucagccacgccuacgcgaucgacgccgccaaccacugcgggaccaucgccaacggcguccugcagaccuucaugcggauggcguggggcggguccuacaucgcccuggacagcggcaagggguccugggacugcaucaugacgagcuaccaguaccucaucauccagaacaccaccugggaggaccacugccaguucucccgccccagccccaucggcuaccuggggcugcucagccagcggacccgcgacaucuacaucucccggcgccugcugggcacguucaccuggacccucagcgacuccgagggcaacgagacccccgggggcuacugccugacgcgguggaugcugaucgaggccgagcucaagugcuucgggaacaccgccguggccaagugcaacgagaagcacgacgaggaguucugcgacaugcugcgccuguucgacuucugcaagcaggcgauccggcgccucaagaccgaggcccagaugagcauccagcugaucaacaaggccgugaacgcccugaucaacgaccagcucaucaugaagaaccaccuccgggacaucaugggcaucccguacugcaacuacuccaaguacugcuaccugaaccacaccgucacggggaagaccagccugccccgcugcugccugguguccaacggcagcuaccugaacgagacccacuucuccgacgacaucgagcagcaggccgacaacaugaucaccgagcuccugcagaaggaguacaucgaccggcagggcaagacgccccuggggcucguggaccuguucgucuucagcaccuccuucuaccugaucagcaucuuccugcaccucgugaagaucccgacccaccgccacgugaucggcaagcccugccccaagccccaccggcugaaccacauggggaucugcuccugcggccuguacaagcacccggggguccccgugaaguggaagcgcugaggacuagucccuguucccagagcccacuuuuuuuucuuuuuuugaaauaaaauagccugucuuucagaucuaaaaaaaaaaaaaaaaaaaaaaaaaaaaaaaaaaaaaaaaaaaaaaaaaaaaaaaaaaaaaaaaaaaaaaaaaaaaaaaaaaaaaaaaaaaaaaaaaaaa

SEQ ID NO: 40339 - RNA, 1721 nt, Artificial Sequence
  mRNA product Design a-1 (A100) comprising derived and/or modified sequence from LASV(LASV003-NIG-2008;Clade II)__AIT17580__GPCmut12 (opt1)
aggagagucccgcagucggcguccagcggcucugcuuguucgugugugugucguugcaggccuuauucaagcuuaccaugggccagaucaucaccuucuuccaggaggugccccacgucaucgaggaggugaugaacaucgugcugaucgcccucagccugcuggccauccucaaggggaucuacaacgucgcgaccugcggccuguucgggcugguguccuuccuccugcugugcggccgcagcugcuccacgaccuacaaggggguguacgagcuccagacccuggagcuggacauggccagccucaacaugugcaugccgcuguccugcacgaagaacaacagccaccacuacaucauggucggcaacgagaccggccuggagcucacccugaccaacacguccaucaucaaccacaaguucugcaaccugagcgacgcccacaagaagaaccucuacgaccacgcccugauguccaucaucagcaccuuccaccuguccauccccaacuucaaccaguacgaggccaugagcugcgacuucaacgggggcaagaucuccgugcaguacaaccucagccacaccuacgcgguggacgccgccaaccacugcgggaccaucgccaacggcguccugcagacguucaugcggauggcguggggcggguccuacaucgcccuggacagcggcaagggguccugggacugcaucaugaccagcuaccaguaccucaucauccagaacaccaccugggaggaccacugccaguucucccgccccagccccaucggcuaccuggggcugcucagccagcggacgcgcgacaucuacaucucccggcgccugcugggcaccuucaccuggacccucagcgacuccgagagcaacgagacgccgggcggguacugccugacccgguggaugcugaucgaggccgagcucaagugcuucggcaacaccgccguggccaagugcaacgagaagcacgacgaggaguucugcgacaugcugcgccuguucgacuucugcaagcaggcgauccggcgccucaaggccgaggcccagauguccauccagcugaucaacaaggccgugaacgcccugaucaacgaccagcucaucaugaagaaccaccuccgggacaucauggggauccccuacugcaacuacagcaaguacugcuaccugaaccacaccgucacgggccgcaccucccugccccggugcugccuggugagcaacggguccuaccugaacgagacccacuucagcgacgacaucgagcagcaggcggacaacaugaucaccgagcuccugcagaaggaguacauggaccgccagggcaagacgccccugggccucguggaccuguucgucuucuccaccagcuucuaccugaucuccaucuuccugcaccucgugaagaucccgacccaccggcacgugaucgggaagcccugccccaagccccaccgccugaaccacaugggcaucugcagcugcgggcuguacaagcacccgggcguccccgugaaguggaagcggugaggacuagucccuguucccagagcccacuuuuuuuucuuuuuuugaaauaaaauagccugucuuucagaucuaaaaaaaaaaaaaaaaaaaaaaaaaaaaaaaaaaaaaaaaaaaaaaaaaaaaaaaaaaaaaaaaaaaaaaaaaaaaaaaaaaaaaaaaaaaaaaaaaaaa

SEQ ID NO: 40340 - RNA, 1721 nt, Artificial Sequence
  mRNA product Design a-1 (A100) comprising derived and/or modified sequence from LASV(LASV035-NIG-2009;Clade II)__AIT17588__GPCmut12 (opt1)
aggagagucccgcagucggcguccagcggcucugcuuguucgugugugugucguugcaggccuuauucaagcuuaccaugggccagaucaucaccuucuuccaggaggugccccacgucaucgaggaggugaugaacaucgugcugaucgcccucagccugcuggccauccucaaggggaucuacaacgucgcgaccugcggccuguucgggcugguguccuuccuccugcugugcggccgcagcugcuccacgaccuacaaggggguguacgagcuccagacccuggagcuggacauggccagccucaacaugugcaugccgcuguccugcacgaagaacaacagccaccacuacaucauggucggcaacgagaccggccuggagcucacccugaccaacacguccaucaucaaccacaaguucugcaaccugagcgacgcccacaagaagaaccucuacgaccacgcccugauguccaucaucagcaccuuccaccuguccauccccaacuucaaccaguacgaggccaugagcugcgacuucaacgggggcaagaucuccgugcaguacaaccucagccacgcguacgccguggacgccgccaaccacugcgggaccaucgcgaacggcguccugcagaccuucaugcggauggccuggggcggguccuacaucgcccuggacagcggcaagggguccugggacugcaucaugacgagcuaccaguaccucaucauccagaacaccaccugggaggaccacugccaguucucccgccccagccccaucggcuaccuggggcugcucagccagcggacccgcgacaucuacaucucccggcgccugcugggcacguucaccuggacccucagcgacuccgagggcaacgagacccccgggggcuacugccugacgcgguggaugcugaucgaggccgagcucaagugcuucgggaacaccgccguggcgaagugcaacgagaagcacgacgaggaguucugcgacaugcugcgccuguucgacuucugcaagcaggccauccggcgccucaaggccgaggcccagaugagcauccagcugaucaacaaggccgugaacgcgcugaucaacgaccagcucaucaugaagaaccaccuccgggacaucaugggcauccccuacugcaacuacuccaaguacugcuaccugaaccacaccgucaccgggaagacgagccugccccgcugcugccugguguccaacggcagcuaccugaacgagacccacuucuccgacgacaucgagcagcaggccgacaacaugaucaccgagcuccugcagaaggaguacaucgaccggcagggcaagaccccgcuggggcucguggaccuguucgucuucagcacguccuucuaccugaucagcaucuuccugcaccucgugaagaucccgacccaccgccacgugaucggcaagcccugccccaagccccaccggcugaaccacauggggaucugcuccugcggccuguacaagcacccggggguccccgugaaguggaagcgcugaggacuagucccuguucccagagcccacuuuuuuuucuuuuuuugaaauaaaauagccugucuuucagaucuaaaaaaaaaaaaaaaaaaaaaaaaaaaaaaaaaaaaaaaaaaaaaaaaaaaaaaaaaaaaaaaaaaaaaaaaaaaaaaaaaaaaaaaaaaaaaaaaaaaa

SEQ ID NO: 40341 - RNA, 1721 nt, Artificial Sequence
  mRNA product Design a-1 (A100) comprising derived and/or modified sequence from LASV(LASV1000-NIG-2009;Clade II)__AIT17782__GPCmut12 (opt1)
aggagagucccgcagucggcguccagcggcucugcuuguucgugugugugucguugcaggccuuauucaagcuuaccaugggccagaucaucaccuucuuccaggaggugccccacgucaucgaggaggugaugaacaucgugcugaucgcccucagccugcuggccauccucaaggggaucuacaacgucgcgaccugcggccuguucgggcugguguccuuccuccugcugugcggccgcagcugcuccacgaccuacaaggggguguacgagcuccagacccuggagcuggacauggccagccucaacaugugcaugccgcuguccugcacgaagaacaacagccaccacuacaucauggucggcaacgagaccggccuggagcucacccugaccaacacguccaucaucaaccacaaguucugcaaccugagcgacgcccacaagaagaaccucuacgaccacgcccugauguccaucaucagcaccuuccaccuguccauccccaacuucaaccaguacgaggccaugagcugcgacuucaacgggggcaagaucuccgugcaguacaaccucagccacaccuacgcgguggacgccgccaaccacugcgggaccaucgccaacggcguccugcagacguucaugcggauggcguggggcggguccuacaucgcccuggacagcggcaagggguccugggacugcaucaugaccagcuaccaguaccucaucauccagaacaccaccugggaggaccacugccaguucucccgccccagccccaucggcuaccuggggcugcucagccagcggacgcgcgacaucuacaucucccggcgccugcugggcaccuucaccuggacccucagcgacuccgagggcaacgagacgcccgggggcuacugccugacccgguggaugcugaucgaggccgagcucaagugcuucgggaacaccgccguggccaagugcaacgagaagcacgacgaggaguucugcgacaugcugcgccuguucgacuucugcaagcaggcgaucaagcggcucaagaccgaggcccagaugagcauccagcugaucaacaaggccgugaacgcccugaucaacgaccagcucaucaugaagaaccaccuccgcgacaucaugggcauccccuacugcaacuacuccaaguacugcuaccugaaccacacggucaccgggaagaccagccugccccggugcugccugguguccaacggcagcuaccugaacgagacccacuucuccgacgacaucgagcagcaggccgacaacaugaucacggagcuccugcagaaggaguacaucgaccgccagggcaagaccccgcuggggcucguggaccuguucgucuucagcaccuccuucuaccugaucagcaucuuccugcaccucgugaagaucccgacccaccggcacguggucggcaagcccugccccaagccccaccgccugaaccacauggggaucugcuccugcggccuguacaagcacccgggggugcccgugaaguggaagcggugaggacuagucccuguucccagagcccacuuuuuuuucuuuuuuugaaauaaaauagccugucuuucagaucuaaaaaaaaaaaaaaaaaaaaaaaaaaaaaaaaaaaaaaaaaaaaaaaaaaaaaaaaaaaaaaaaaaaaaaaaaaaaaaaaaaaaaaaaaaaaaaaaaaaa

SEQ ID NO: 40342 - RNA, 1721 nt, Artificial Sequence
  mRNA product Design a-1 (A100) comprising derived and/or modified sequence from LASV(LASV221-NIG-2010;Clade II)__AIT17624__GPCmut12 (opt1)
aggagagucccgcagucggcguccagcggcucugcuuguucgugugugugucguugcaggccuuauucaagcuuaccaugggccagaucaucaccuucuuccaggaggugccccacgucaucgaggaggugaugaacaucgugcugaucgcccucagccugcuggccauccucaaggggaucuacaacgucgcgaccugcggccuguucgggcugguguccuuccuccugcugugcggccgcagcugcuccacgaccuacaaggggguguacgagcuccagacccuggagcuggacauggccagccucaacaugugcaugccgcuguccugcacgaagaacaacagccaccacuacaucauggucggcaacgagaccggccuggagcucacccugaccaacacguccaucaucaaccacaaguucugcaaccugagcgacgcccacaagaagaaccucuacgaccacgcccugauguccaucaucagcaccuuccaccuguccauccccaacuucaaccaguacgaggccaugagcugcgacuucaacgggggcaagaucuccgugcaguacaaccucagccacaccuacgcgaucgacgccgccaaccacugcgggaccaucgccaacggcgugcugcagacguucaugcggauggcguggggcggguccuacaucgcccuggacagcggcaagggguccugggacugcaucaugaccagcuaccaguaccucaucauccagaacaccaccugggaggaccacugccaguucucccgccccagccccaucggcuaccuggggcugcucagccagcggacgcgcgacaucuacaucucccggcgccugcugggcaccuucaccuggacccucagcgacuccgagggcaacgagacgcccgggggcuacugccugacccgguggaugcugaucgaggccgagcucaagugcuucgggaacaccgccgucgccaagugcaacgagaagcacgacgaggaguucugcgacaugcugcgccuguucgacuucugcaagcaggcgauccggcgccucaagaccgaggcccagaugagcauccagcugaucaacaaggccgugaacgcccugaucaacgaccagcucaucaugaagaaccaccuccgggacaucaugggcauccccuacugcaacuacuccaaguacugcuaccugaaccacacggugaccgggaagaccagccugccccgcugcugccuggucuccaacggcagcuaccugaacgagacccacuucuccgacgacaucgagcagcaggccgacaacaugaucacggagaugcuccagaaggaguacauggaccggcagggcaagaccccgcuggggcugguggaccucuucguguucagcaccuccuucuaccugaucagcaucuuccugcaccuggucaagaucccgacccaccgccacgugaucggcaagcccugccccaagccccaccggcucaaccacauggggaucugcuccugcggccuguacaagcacccgggggugcccgucaaguggaagcgcugaggacuagucccuguucccagagcccacuuuuuuuucuuuuuuugaaauaaaauagccugucuuucagaucuaaaaaaaaaaaaaaaaaaaaaaaaaaaaaaaaaaaaaaaaaaaaaaaaaaaaaaaaaaaaaaaaaaaaaaaaaaaaaaaaaaaaaaaaaaaaaaaaaaaa

SEQ ID NO: 40343 - RNA, 1721 nt, Artificial Sequence
  mRNA product Design a-1 (A100) comprising derived and/or modified sequence from LASV(LASV237-NIG-2010;Clade II)__AIT17638__GPCmut12 (opt1)
aggagagucccgcagucggcguccagcggcucugcuuguucgugugugugucguugcaggccuuauucaagcuuaccaugggccagaucaucaccuucuuccaggaggugccccacgucaucgaggaggugaugaacaucgugcugaucgcccucagccugcuggccauccucaaggggaucuacaacgucgcgaccugcggccuguucgggcugguguccuuccuccugcugugcggccgcagcugcuccacgaccuacaaggggguguacgagcuccagacccuggagcuggacauggccagccucaacaugugcaugccgcuguccugcacgaagaacaacagccaccacuacaucauggucggcaacgagaccggccuggagcucacccugaccaacacguccaucaucaaccacaaguucugcaaccugagcgacgcccacaagaaggaccucuacgaccacgcccugauguccaucaucagcaccuuccaccuguccauccccaacuucaaccaguacgaggccaugagcugcgacuucaacgggggcaagaucuccgugcaguacaaccucagccacaccuacgcgguggacgccgccaaccacugcgggaccaucgccaacggcguccugcagacguucaugcggauggcguggggcggguccuacaucgcccuggacagcggcaagggguccugggacugcaucaugaccagcuaccaguaccucaucauccagaacaccaccugggaggaccacugccaguucucccgccccagccccaucggcuaccuggggcugcucagccagcggacgcgcgacaucuacaucucccggcgccugcugggcaccuucaccuggacccucagcgacuccgagggcaacgagacgcccgggggcuacugccugacccgguggaugcugaucgaggccgagcucaagugcuucgggaacaccgccguggccaagugcaacgagaagcacgacgaggaguucugcgacaugcugcgccuguucgacuucugcaagcaggcgauccggcgccucaagaccgaggcccagaugagcauccagcugaucaacaaggccgugaacgcccugaucaacgaccagcucaucaugaagaaccaccuccgggacaucaugggcauccccuacugcaacuacuccaaguacugcuaccugaaccacacggucaccgggaagaccagccugccccgcugcugccugguguccaacggcagcuaccugaacgagacccacuucuccgacgacaucgagcagcaggccgacaacaugaucacggagcuccugcagaaggaguacauggaccggcagggcaagaccccgcuggggcucguggaccuguucgucuucagcaccuccuucuaccugaucagcaucuuccugcaccucaucaagaucccgacccaccgccacaucacgggcaagcccugccccaagccccaccggcugaaccacauggggaucugcuccugcggccuguacaagcacccgggggugcccgugaaguggaagcgcugaggacuagucccuguucccagagcccacuuuuuuuucuuuuuuugaaauaaaauagccugucuuucagaucuaaaaaaaaaaaaaaaaaaaaaaaaaaaaaaaaaaaaaaaaaaaaaaaaaaaaaaaaaaaaaaaaaaaaaaaaaaaaaaaaaaaaaaaaaaaaaaaaaaaa

SEQ ID NO: 40344 - RNA, 1721 nt, Artificial Sequence
  mRNA product Design a-1 (A100) comprising derived and/or modified sequence from LASV(LASV253-NIG-2011;Clade II)__AIT17670__GPCmut12 (opt1)
aggagagucccgcagucggcguccagcggcucugcuuguucgugugugugucguugcaggccuuauucaagcuuaccaugggccagaucaucaccuucuuccaggaggugccccacgucaucgaggaggugaugaacaucgugcugaucgcccucagccugcuggccauccucaaggggaucuacaacgucgcgaccugcggccuguucgggcugguguccuuccuccugcugugcggccgcagcugcuccacgaccuacaaggggguguacgagcuccagacccuggagcuggacauggccagccucaacaugugcaugccgcuguccugcacgaagaacaacagccaccacuacaucauggucggcaacgagaccggccuggagcucacccugaccaacacguccaucaucaaccacaaguucugcaaccugagcgacgcccacaagaagaaccucuacgaccacgcccugauguccaucaucagcaccuuccaccuguccauccccaacuucaaccaguacgaggccaugagcugcgacuucaacgggggcaagaucuccgugcaguacaaccucagccacaccuacgcgguggacgccgccaaccacugcgggaccaucgccaacggcguccugcagacguucaugcggauggcguggggcggguccuacaucgcccuggacagcggcaagggguccugggacugcaucaugaccagcuaccaguaccucaucauccagaacaccaccugggaggaccacugccaguucucccgccccagccccaucggcuaccuggggcugcucagccagcggacgcgcgacaucuacaucucccggcgccugcugggcaccuucaccuggacccucagcgacuccgagggcaacgagacgcccgggggcuacugccugacccgguggaugcugaucgaggccgagcucaagugcuucgggaacaccgccguggccaagugcaacgagaagcacgacgaggaguucugcgacaugcugcgccuguucgacuucugcaagcaggcgauccggcgccucaaggccgaggcccagaugagcauccagcugaucaacaaggccgugaacgcccugaucaacgaccagcucaucaugaagaaccaccuccgggacaucaugggcaucccguacugcaacuacuccaaguacugcuaccugaaccacaccgucacggggcgcaccagccugccccggugcugccugguguccaacggcagcuaccugaacgagacccacuucuccgacgacaucgagcagcaggcggacaacaugaucaccgagcuccugcagaaggaguacaucgaccgccagggcaagacgccccuggggcucguggaccuguucgucuucagcaccuccuucuaccugaucagcaucuuccugcaccucgugaagaucccgacccaccggcacaucaucggcaagcccugccccaagccccaccgccugaaccacauggggaucugcuccugcggccuguacaagcacccgggggugcccgucaaguggaagcggugaggacuagucccuguucccagagcccacuuuuuuuucuuuuuuugaaauaaaauagccugucuuucagaucuaaaaaaaaaaaaaaaaaaaaaaaaaaaaaaaaaaaaaaaaaaaaaaaaaaaaaaaaaaaaaaaaaaaaaaaaaaaaaaaaaaaaaaaaaaaaaaaaaaaa

SEQ ID NO: 40345 - RNA, 1721 nt, Artificial Sequence
  mRNA product Design a-1 (A100) comprising derived and/or modified sequence from LASV(LASV254-NIG-2011;Clade II)__AIT17674__GPCmut12 (opt1)
aggagagucccgcagucggcguccagcggcucugcuuguucgugugugugucguugcaggccuuauucaagcuuaccaugggccagaucaucaccuucuuccaggaggugccccacgucaucgaggaggugaugaacaucgugcugaucgcccucagccugcuggccauccucaaggggaucuacaacgucgcgaccugcggccuguucgggcugguguccuuccuccugcugugcggccgcagcugcuccacgaccuacaaggggguguacgagcuccagacccuggagcuggacaugaccaaccucaacaugugcaugccgcugagcugcaccaagaacaacucccaccacuacaucauggucggcaacgagaccggccuggagcucacccugacgaacaccagcaucaucaaccacaaguucugcaaccuguccgacgcccacaagaagaaccucuacaaccacgcccugaugagcaucaucuccaccuuccaccugagcauccccaacuucaaccaguacgaggccauguccugcgacuucaacgggggcaagaucagcgugcaguacaaccucucccacagcuacgccguggacgcggccaaccacugcgggaccaucgccaacggcguccugcagacguucaugcggauggccuggggcggguccuacaucgcgcuggacagcggcaaggggaacugggacugcaucaugaccuccuaccaguaccucaucauccagaacaccaccugggaggaccacugccaguucagccgccccucccccaucggcuaccuggggcugcucagccagcggacgcgcgacaucuacaucagccggcgccugcugggcaccuucaccuggacccucuccgacagcgagggcaacgagacgcccgggggcuacugccugacccgguggaugcugaucgaggccgagcucaagugcuucgggaacaccgccguggccaagugcaacgagaagcacgacgaggaguucugcgacaugcugcgccuguucgacuucugcaagcaggccauccggcgccucaagaccgaggcgcaggccaacauccagcugaucaacaaggccgugaacgcccugaucaacgaccagcucaucaugaagaaccaccuccgggacaucaugggcauccccuacugcaacuacuccaaguacugcuaccugaaccacacggucaccgggaagaccagccugccccgcugcugccugguguccaacggcagcuaccugaacgagacccacuucuccgacgacaucgagcagcaggccgacaacaugaucacggagcuccugcagaaggaguacauggaccggcagggcaagaccccgcuggggcucguggaccuguucgucuucagcaccuccuucuaccugaucagcaucuuccugcaccucgugaagaucccgacccaccgccacgugaucggcaagcccugccccaagccccaccggcugaaccacauggggaucugcuccugcggccuguacaagcacccggggguccccgugaaguggaagcgcugaggacuagucccuguucccagagcccacuuuuuuuucuuuuuuugaaauaaaauagccugucuuucagaucuaaaaaaaaaaaaaaaaaaaaaaaaaaaaaaaaaaaaaaaaaaaaaaaaaaaaaaaaaaaaaaaaaaaaaaaaaaaaaaaaaaaaaaaaaaaaaaaaaaaa

SEQ ID NO: 40346 - RNA, 1721 nt, Artificial Sequence
  mRNA product Design a-1 (A100) comprising derived and/or modified sequence from LASV(Nig08-A19;Clade III)__ADU56618__GPCmut12 (opt1)
aggagagucccgcagucggcguccagcggcucugcuuguucgugugugugucguugcaggccuuauucaagcuuaccaugggccagaucgugaccuucuuccaggaggucccccacgugaucgaggaggugaugaacaucguccugaucgcccucagcauccuggccauccugaaggggcucuacaacaucgcgaccugcggccugaucgggcuggugacguuccuccugcuguccggccgcagcugcuccaugaccuacaaggggguguacgagcuccagacccuggagcugaacaugaacacccucaacaugugcaugccgcugagcugcaccaagaacaacucccaccacuacaucauggucggcaacgagaccggccuggagcucacccugacgaacaccagccugcuccaccacaaguucugcaaccuguccgacgcccacaagaagaaccuguacgaccacacccucaugagcaucaucuccaccuuccaccugagcauccccaacuucaaccaguacgaggccauguccugcgacuucaacgggggcaagaucacggugcaguacaaccugagccacuccuacgccaucgacgccgcgaaccacugcgggaccguggccaacggcguccuccagaccuucaugcggauggccuggggcgggagcuacaucgcccuggacuccggccgcgggaagugggacugcaucaugaccagcuaccaguaccugaucauccagaacacgaccugggaggaccacugccaguucucccggcccagccccaucggcuaccucgggcugcugucccagcgcacccgggacaucuacaucagccgccggcuccugggcaccuucacguggacccugagcgacuccgagggcaacgagacccccgggggcuacugccucacccgcuggaugcugaucgaggcggagcugaagugcuucgggaacacggccguggccaagugcaacgagaagcacgacgaggaguucugcgacaugcuccggcuguucgacuucugcaagcaggccauccgccggcugaaggccgaggcgcagaugagcauccagcucaucaacaaggccgugaacgcccugaucaacgaccagcugaucaugaagaaccaccuccgcgacaucaugggcauccccuacugcaacuacuccaaguacugcuaccugaaccacaccagcaccgggcggaccucccugccccgcugcugccucgucagcaacggcuccuaccugaacgagacgcacuucagcgacgacaucgagcagcaggccgacaacaugaucaccgagaugcugcagaaggaguaccucgaccggcagggcaagaccccgcuggggcugguggaccuguucguguucuccaccagcuucuaccucaucuccaucuuccugcaccuggucaagaucccgacgcaccgccacaucgugggcaagcccugccccaagccccaccggcucaaccacauggggaucugcagcugcggccuguacaagcagccgggggugcccguccgcuggaagcggugaggacuagucccuguucccagagcccacuuuuuuuucuuuuuuugaaauaaaauagccugucuuucagaucuaaaaaaaaaaaaaaaaaaaaaaaaaaaaaaaaaaaaaaaaaaaaaaaaaaaaaaaaaaaaaaaaaaaaaaaaaaaaaaaaaaaaaaaaaaaaaaaaaaaa

SEQ ID NO: 40347 - RNA, 1724 nt, Artificial Sequence
  mRNA product Design a-1 (A100) comprising derived and/or modified sequence from LASV(G1180-SLE-2010;Clade IV)__AIT17168__GPCmut12 (opt1)
aggagagucccgcagucggcguccagcggcucugcuuguucgugugugugucguugcaggccuuauucaagcuuaccaugggccagaucgugaccuucuuccaggaggucccccacgugaucgaggaggugaugaacaucguccugaucgcccucagcauccuggccgugcugaaggggcucuacaacuucgcgaccugcggccugguggggcugcucaccuuccugcugcucugcggccgcuccugcaccgccagccgguacaagggggucuacgagcugcagacccuggagcucaacauggagacccugaacaugugcaugccgcuguccugcaccaagaacaacagccaccacuacaucauggugggcaacgagaccggccucgagcugacccugacgaacaccuccaucaucaaccacaaguucugcaaccucagcgacgcccacaagaagaaccuguacgaccacgcccugauguccaucaucagcaccuuccaccucuccauccccaacuucaaccaguacgaggccaugagcugcgacuucaacgggggcaagaucuccgugcaguacaaccugagccacuccuacgcgggggacgccgccaaccacugcggcaccgucgccaacggggugcugcagacguucaugcgcauggcguggggcggcagcuacaucgcccucgacuccgggcacggcagcugggacugcaucaugaccuccuaccaguaccugaucauccagaacaccaccugggaggaccacugccaguucagccggcccucccccaucggguaccugggccuccugagccagcgcacgcgggacaucuacaucagccgccggcugcucggcaccuucaccuggacccuguccgacagcgaggggaaggacacgccgggcggguacugccugacccgcuggaugcucaucgaggccgagcugaagugcuucggcaacaccgccguggccaagugcaacgagaagcacgacgaggaguucugcgacaugcugcggcuguucgacuucugcaagcaggcgauccagcgccugaaggccgaggcccagauguccauccagcugaucaacaaggccgucaacgcccucaucaacgaccagcugaucaugaagaaccaccuccgggacaucauggggauccccuacugcaacuacagcaaguacugcuaccucaaccacaccacgaccggcaagaccucccugcccaagugcugccuggugagcaacggcuccuaccucaacgagacccacuucagcgacgacaucgagcagcaggcggacaacaugaucacggagaugcugcagaaggaguacauggagcgccaggggaagacgccccugggccucguggaccuguucgucuucuccaccagcuucuaccugaucuccaucuuccugcaccucgugaagaucccgacccaccggcacaucgugggcaagagcugccccaagccccaccgccugaaccacauggggaucugcuccugcgggcuguacaagcagcccggcgucccggugaaguggaagcggugaggacuagucccuguucccagagcccacuuuuuuuucuuuuuuugaaauaaaauagccugucuuucagaucuaaaaaaaaaaaaaaaaaaaaaaaaaaaaaaaaaaaaaaaaaaaaaaaaaaaaaaaaaaaaaaaaaaaaaaaaaaaaaaaaaaaaaaaaaaaaaaaaaaaa

SEQ ID NO: 40348 - RNA, 1724 nt, Artificial Sequence
  mRNA product Design a-1 (A100) comprising derived and/or modified sequence from LASV(G1442-SLE-2011;Clade IV)__AIT17180__GPCmut12 (opt1)
aggagagucccgcagucggcguccagcggcucugcuuguucgugugugugucguugcaggccuuauucaagcuuaccaugggccagaucgugaccuucuuccaggaggucccccacgugaucgaggaggugaugaacaucguccugaucgcccucagcauccuggccgugcugaaggggcucuacaacguggcgaccugcggccugaucgggcuggucacguuccuccugcugugcggccgcuccugcaccaccacccucuacaaggggguguacgagcugcagacgcuggagcucaacauggagacccugaacaugugcaugccgcugagcugcaccaagaacaacucccaccacuacauccgggugggcaacgagacgggccucgagcugacccugaccaacaccagcaucaucaaccacaaguucugcaaccucuccgacgcccacaagaagaaccuguacgaccacgcccugaugagcaucaucuccacguuccaccucagcauccccaacuucaaccaguacgaggccauguccugcgacuucaacgggggcaagaucagcguccaguacaaccugucccacagcuacgccggggacgcggccaaccacugcggcaccguggccaacggggugcugcagaccuucaugcgcauggccuggggcggcuccuacaucgcgcucgacagcgggcggggcaacugggacugcaucaugaccuccuaccaguaccugaucauccagaacacgaccugggacgaccacugccaguucagccgccccucccccaucggguaccugggccuccugagccagcggacccgcgacgucuacaucucccggcgccugcucggcaccuucacguggacccugagcgacagcgaggggaaggacaccccgggcggguacugccugacccgguggaugcucaucgaggccgagcugaagugcuucggcaacacggccguggccaagugcaacgagaagcacgacgaggaguucugcgacaugcugcgccucuucgacuucugcaagcaggccauccagcggcugaaggcggaggcccagauguccauccagcugaucaacaaggccgugaacgcccucaucaacgaccagcugaucaugaagaaccaccuccgcgacaucauggggauccccuacugcaacuacagcaaguacugcuaccugaacaacaccgccaccggcaagaccucccugcccaagugcugccugaucagcaacggcuccuaccucaacgagacgcacuucagcgacgacaucgagcaggaggcggacaacaugaucaccgagaugcugcagaaggaguacauggagcggcaggggaagacgccccugggccucgucgaccuguucguguucuccaccagcuucuaccugaucuccaucuuccugcaccucgugaagaucccgacccaccgccacaucgucggcaagagcugccccaagccccaccggcugaaccacauggggaucugcuccugcgggcuguacaagcagcccggcgugccggugcgcuggaagcggugaggacuagucccuguucccagagcccacuuuuuuuucuuuuuuugaaauaaaauagccugucuuucagaucuaaaaaaaaaaaaaaaaaaaaaaaaaaaaaaaaaaaaaaaaaaaaaaaaaaaaaaaaaaaaaaaaaaaaaaaaaaaaaaaaaaaaaaaaaaaaaaaaaaaa

SEQ ID NO: 40349 - RNA, 1724 nt, Artificial Sequence
  mRNA product Design a-1 (A100) comprising derived and/or modified sequence from LASV(G3010-SLE-2013;Clade IV)__AIT17344__GPCmut12 (opt1)
aggagagucccgcagucggcguccagcggcucugcuuguucgugugugugucguugcaggccuuauucaagcuuaccaugggccagaucgugaccuucuuccaggaggucccccacgugaucgaggaggugaugaacaucguccugaucgcccucagcauccuggccgugcugaaggggcucuacaacuucgcgaccugcggccugguggggcuggucacguuccuccugcugugcggccgcuccugcaccaccagccucuacaaggggguguacgagcugcagacccuggagcucaacauggagacgcugaacaugugcaugccgcuguccugcaccaagaacaacagccaccacuacaucauggugggcaacgagaccggccucgagcugacgcugaccaacaccuccaucaucaaccacaaguucugcaaccucagcgacgcccacaagaagaaccuguacaaccacgcccugauguccaucaucagcaccuuccaccucuccauccccaacuucaaccaguacgaggccaugagcugcgacuucaacgggggcaagaucuccguccaguacaaccugagccacuccuacgccggggacgcggccagccacugcggcacgguggccaacggggugcugcagaccuucaugcggauggccuggggcggcuccuacaucgcgcucgacagcggguacggcaagugggacugcaucaugaccuccuaccaguaccugaucauccagaacaccacgugggaggaccacugccaguucagccgccccucccccaucggguaccugggccuccugagccagcggacccgcgacaucuacaucagccggcgccugcucggcaccuucaccuggacgcuguccgacagcgaggggaaggacaccccgggcggguacugccugacccgguggaugcucaucgaggccgagcugaagugcuucggcaacaccgccgucgccaagugcaacgagaagcacgacgaggaguucugcgacaugcugcgccucuucgacuucugcaagcaggccauccagcggcugaagacggaggcgcagauguccauccagcugaucaacaaggccgugaacgcccucaucaacgaccagcugaucaugaagaaccaccuccgcgacaucauggggauccccuacugcaacuacagcaaguacugcuaccugaaccacaccaccaccggcaagacgucccugcccaagugcugccuggugagcaacggcuccuaccucaacgagacccacuucagcgacgacaucgagcagcaggccgacaacaugaucaccgagaugcugcagaaggaguacauggagcggcaggggaagacgccccugggccucgucgaccuguucguguucuccaccagcuucuaccugaucuccaucuuccugcaccucgugaagaucccgacccaccgccacaucgucggcaagagcugccccaagccccaccggcugaaccacauggggaucugcuccugcgggcuguacaagcagcccggcgugccggugcgcuggaagcggugaggacuagucccuguucccagagcccacuuuuuuuucuuuuuuugaaauaaaauagccugucuuucagaucuaaaaaaaaaaaaaaaaaaaaaaaaaaaaaaaaaaaaaaaaaaaaaaaaaaaaaaaaaaaaaaaaaaaaaaaaaaaaaaaaaaaaaaaaaaaaaaaaaaaa

SEQ ID NO: 40350 - RNA, 1724 nt, Artificial Sequence
  mRNA product Design a-1 (A100) comprising derived and/or modified sequence from LASV(G502-SLE-2009;Clade IV)__AIT17126__GPCmut12 (opt1)
aggagagucccgcagucggcguccagcggcucugcuuguucgugugugugucguugcaggccuuauucaagcuuaccaugggccagaucgugaccuucuuccaggaggucccccacgugaucgaggaggugaugaacaucguccugaucgcccucagcauccuggccgugcugaaggggcucuacaacuucgcgaccugcggccugguggggcugcucacguuccugcugcucugcggccgcuccugcaccaccgggcuguacaagggcgucuacgagcugcagacccucgagcugaacauggagacgcugaacaugugcaugccgcucagcugcaccaagaacaacucccaccacuacaucauggugggcaacgagaccgggcuggagcugacgcucaccaacaccagcaucaucaaccacaaguucugcaaccuguccgacgcccacaagaagaaccuguacgaccacgcccucaugagcaucaucuccaccuuccaccugagcauccccaacuucaaccaguacgaggccauguccugcgacuucaacggcgggaagaucagcgugcaguacaaccugucccacagcuacgccggcgacgcggccgaccacugcgggacggucgccaacggcgugcuccagaccuucaugcggauggccuggggcggguccuacaucgcgcuggacagcggccgcgggcggugggacugcaucaugaccuccuaccaguaccugaucauccagaacaccacgugggaggaccacugccaguucagccgccccucccccaucggcuaccucggccugcugagccagcggacccgcgacaucuacaucucccggcgccuccuggggaccuucaccuggacgcugagcgacagcgagggcaaggacacccccgggggcuacugccucacccgguggaugcugaucgaggccgagcugaagugcuucgggaacaccgccguggccaagugcaacgagaagcacgacgaggaguucugcgacaugcuccgccuguucgacuucugcaagcaggccauccagcggcugaaggcggaggcccagauguccauccagcucaucaacaaggccgucaacgcccugaucaacgaccagcuggugaugaagaaccaccuccgcgacaucaugggcauccccuacugcaacuacagccgguacugcuaccugaaccacacgaccaccggccgcaccucccugcccaagugcugccucgugagcaacggguccuaccugaacgagacgcacuucagcgacgacaucgagcagcaggccgacaacaugaucaccgagaugcugcagaaggaguacauggagcggcagggcaagaccccgcucgggcuggucgaccuguucguguucuccaccagcuucuaccugaucuccaucuuccuccaccuggugaagaucccgacgcaccgccacaucgucggcaagagcugccccaagccccaccggcugaaccacauggggaucugcuccugcggccucuacaagcagcccggcgugccggugaaguggaagcgcugaggacuagucccuguucccagagcccacuuuuuuuucuuuuuuugaaauaaaauagccugucuuucagaucuaaaaaaaaaaaaaaaaaaaaaaaaaaaaaaaaaaaaaaaaaaaaaaaaaaaaaaaaaaaaaaaaaaaaaaaaaaaaaaaaaaaaaaaaaaaaaaaaaaaa

SEQ ID NO: 40351 - RNA, 1724 nt, Artificial Sequence
  mRNA product Design a-1 (A100) comprising derived and/or modified sequence from LASV(G733-SLE-2010;Clade IV)__AIT17154__GPCmut12 (opt1)
aggagagucccgcagucggcguccagcggcucugcuuguucgugugugugucguugcaggccuuauucaagcuuaccaugggccagaucgugaccuucuuccaggaggucccccacgugaucgaggaggugaugaacaucguccugaucgcccucagcauccuggccgugcugaaggggcucuacaacuucgcgaccugcggcaucguggggcuggucuccuuccugcuccugugcggccgcagcugcacgaccucccuguacaaggggguguacgagcuccagacccuggagcugaacauggagacccucaacaugugcaugccgcugagcugcaccaagaacaacucccaccacuacaucauggugggcaacgagaccggccuggagcucacccugacgaacaccagcaucaucaaccacaaguucugcaaccuguccgacgcccacaagaagaaccucuacgaccacgcccugaugagcaucaucuccaccuuccaccugagcauccccaacuucaaccaguacgaggccauguccugcgacuucaacgggggcaagaucagcguccaguacaaccucucccacagcuacgccggggacgcggccaaccacugcggcaccaucgccaacggggugcugcagacguucaugcggauggccuggggcggcuccuacaucgcgcuggacagcgggcgcgaccggugggacugcaucaugaccuccuaccaguaccucaucauccagaacaccaccugggaggaccacugccaguucagccgccccucccccaucggcuaccuggggcugcucagccagcggacgcgcgacaucuacaucagccggcgccugcugggcaccuucaccuggacccucuccgacagcgagggcaaggacacgcccgggggcuacugccugacccgguggaugcugaucgaggccgagcucaagugcuucgggaacaccgccguggccaagugcaacgagaagcacgacgaggaguucugcgacaugcugcgccuguucgacuucugcaagcaggccauccagcggcucaaggcggaggcccagauguccauccagcugaucaacaaggccgucaacgcccugaucaacgaccagcucaucaugaagaaccaccuccgcgacaucaugggcauccccuacugcaacuacagcaaguacugcuaccugaaccacaccacgaccgggaagaccucccugcccaagugcugccuggugagcaacggcuccuaccugaacgagacccacuucagcgacgacaucgagcagcaggccgacaacaugaucacggagaugcuccagaaggaguacauggagcggcagggcaagaccccgcuggggcugguggaccucuucgucuucuccaccagcuucuaccugaucuccaucuuccugcaccuggugaagaucccgacccaccgccacguggucggcaagagcugccccaagccccaccggcucaaccacauggggaucugcuccugcggccuguacgggcagcccggcgugccggugaaguggaagcgcugaggacuagucccuguucccagagcccacuuuuuuuucuuuuuuugaaauaaaauagccugucuuucagaucuaaaaaaaaaaaaaaaaaaaaaaaaaaaaaaaaaaaaaaaaaaaaaaaaaaaaaaaaaaaaaaaaaaaaaaaaaaaaaaaaaaaaaaaaaaaaaaaaaaaa

SEQ ID NO: 40352 - RNA, 1724 nt, Artificial Sequence
  mRNA product Design a-1 (A100) comprising derived and/or modified sequence from MOPV/LASV reassortant(IGS-1;Clade IV)__AFY05576__GPCmut12 (opt1)
aggagagucccgcagucggcguccagcggcucugcuuguucgugugugugucguugcaggccuuauucaagcuuaccaugggccagaucgugaccuucuuccaggaggucccccacgugaucgaggaggugaugaacaucguccugaucgcccucagcgugcuggccgugcugaaggggcucuacaacuucgcgaccugcggccuggucgggcuggugacguuccuccugcugugcggccgcuccugcaccaccagccucuacaaggggguguacgagcugcagacccuggagcucaacauggagacgcugaacaugugcaugccgcuguccugcaccaagaacaacagccaccacuacaucauggucggcaacgagaccggccucgagcugacgcugaccaacaccuccaucaucaaccacaaguucugcaaccucagcgacgcccacaagaagaaccuguacgaccacgcccugauguccaucaucagcaccuuccaccucuccauccccaacuucaaccaguacgaggccaugagcugcgacuucaacgggggcaagaucuccgugcaguacaaccugagccacuccuacgccggggacgcggccaaccacugcggcacgguggccaacgggguccugcagaccuucaugcggauggccuggggcggcagcuacaucgcgcucgacuccgggcgcggcaacugggacugcaucaugaccagcuaccaguaccugaucauccagaacaccacgugggaggaccacugccaguucucccggcccagccccaucggguaccugggccuccugucccagcgcacccgggacaucuacaucagccgccggcugcucggcaccuucaccuggacgcugagcgacuccgagggggaggacaccccgggcggguacugccugacccgcuggaugcucaucgaggccgagcugaagugcuucggcaacaccgccguggccaagugcaacgagaagcacgacgaggaguucugcgacaugcugcggcuguucgacuucugcaagcaggccauccagcgccugaaggcggaggcccagaugagcauccagcugaucaacaaggccgugaacgcccucaucaacgaccagcugaucaugaagaaccaccuccgggacaucauggggauccccuacugcaacuacuccaaguacugcuaccucaaccacacgaccaccggccgcaccagccugcccaagugcugccuggucuccaacggcagcuaccucaacgagacgcacuucuccgacgacaucgagcagcaggccgacaacaugaucaccgagaugcugcagaaggaguacauggagcggcaggggaagacgccccugggccucguggaccuguucguguucagcaccuccuucuaccugaucagcaucuuccugcaccucgucaagaucccgacccaccgccacaucguggggaaguccugccccaagccccaccggcugaaccacaugggcaucugcagcugcgggcuguacaagcagcccggcgugccggucaaguggaagcgcugaggacuagucccuguucccagagcccacuuuuuuuucuuuuuuugaaauaaaauagccugucuuucagaucuaaaaaaaaaaaaaaaaaaaaaaaaaaaaaaaaaaaaaaaaaaaaaaaaaaaaaaaaaaaaaaaaaaaaaaaaaaaaaaaaaaaaaaaaaaaaaaaaaaaa

SEQ ID NO: 40353 - RNA, 1724 nt, Artificial Sequence
  mRNA product Design a-1 (A100) comprising derived and/or modified sequence from LASV(LM765-SLE-2012;Clade IV)__AIT17814__GPCmut12 (opt1)
aggagagucccgcagucggcguccagcggcucugcuuguucgugugugugucguugcaggccuuauucaagcuuaccaugggccagaucgugaccuucuuccaggaggucccccacgugaucgaggaggugaugaacaucguccugaucgcccucagcauccuggccgugcugaaggggcucuacaacuucgcgaccugcggccugguggggcuggucacguuccuccugcugugcggccgcuccugcaccaccagccucuacaaggggguguacgagcugcagacccuggagcucaacauggagacgcugaacaugugcaugccgcuguccugcaccaagaacaacagccaccacuacaucauggugggcaacgagaccggccucgagcugacgcugaccaacaccuccaucaucgaccacaaguucugcaaccucagcgacgcccaccggaagaaccuguacgaccacgcccugauguccaucaucagcaccuuccaccucuccauccccaacuucaaccaguacgaggccaugagcugcgacuucaacgggggcaagaucuccguccaguacaaccugagccacuccuacgccaaggacgcggccgaccacugcgggacgguggccaacggcgugcugcagaccuucaugcgcauggccuggggcgggagcuacaucgcgcucgacuccggccgggggcgcugggacugcaucaugaccagcuaccaguaccugaucauccagaacaccacgugggaggaccacugccaguucucccggcccagccccaucggcuaccuggggcuccugucccagcgcacccgggacaucuacaucagccgccggcugcucggcaccuucaccuggacgcugagcgacuccgagggcaaggacacccccgggggcuacugccugacccgcuggaugcucaucgaggccgagcugaagugcuucgggaacaccgccgucgccaagugcaacgagaagcacgacgaggaguucugcgacaugcugcggcuguucgacuucugcaagcaggccauccagcgccugaaggcggaggcccagaugagcauccagcugaucaacaaggccgugaacgcccucaucaacgaccagcugaucaugaagaaccaccuccgggacaucaugggcauccccuacugcaacuacuccaaguacugcuaccucaaccacacgaccaccgggaagaccagccugcccaagugcugccugguguccaacggcagcuaccucaacgagacgcacuucuccgacgacaucgagcagcaggccgacaacaugaucaccgagaugcugcagaaggaguacauggagcgccagggcaagaccccgcuggggcucgucgaccuguucguguucagcaccuccuucuaccugaucagcaucuuccugcaccucgugaagaucccgacgcaccggcacaucgucggcaagcccugccccaagccccaccgccugaaccacauggggaucugcuccugcggccuguacaagcagccgggggugcccgugaaguggaagcggugaggacuagucccuguucccagagcccacuuuuuuuucuuuuuuugaaauaaaauagccugucuuucagaucuaaaaaaaaaaaaaaaaaaaaaaaaaaaaaaaaaaaaaaaaaaaaaaaaaaaaaaaaaaaaaaaaaaaaaaaaaaaaaaaaaaaaaaaaaaaaaaaaaaaa

SEQ ID NO: 40354 - RNA, 1724 nt, Artificial Sequence
  mRNA product Design a-1 (A100) comprising derived and/or modified sequence from LASV(LM776-SLE-2012;Clade IV)__AIT17824__GPCmut12 (opt1)
aggagagucccgcagucggcguccagcggcucugcuuguucgugugugugucguugcaggccuuauucaagcuuaccaugggccagaucgugaccuucuuccaggaggucccccacgugaucgaggaggugaugaacaucguccugaucgcccucagcauccuggccgugcugaaggggcucuacaacuucgcgaccugcggccugguggggcuggucacguuccuccugcugugcggccgcuccugcaccaccagcguguacaaggggguguacgagcuccagacccuggagcugaacauggagacgcucaacaugugcaugccgcuguccugcaccaagaacaacagccaccacuacaucauggucggcaacgagaccggccuggagcucacgcugaccaacaccuccaucaucaaccacaaguucugcaaccugagcgacgcccacaagaagaaccucuacgaccacgcccugauguccaucaucagcaccuuccaccuguccauccccaacuucaaccaguacgaggccaugagcugcgacuucaacgggggcaagaucuccgugcaguacaaccucagccacuccuacgccggggacgcggccaaccacugcggcacgguggccaacgggguccugcagaccuucaugcggauggccuggggcggcagcuacaucgcgcuggacuccgggcacggcaagugggacugcaucaugaccagcuaccaguaccucaucauccagaacaccacgugggaggaccacugccaguucucccgccccagccccaucggguaccugggccugcucucccagcggacccgcgacaucuacaucagccggcgccugcugggcaccuucaccuggacgcucagcgacuccgaggggaaggacaccccgggcggguacugccugacccgguggaugcugaucgaggccgagcucaagugcuucggcaacaccgccguggccaagugcaacgagaagcacgacgaggaguucugcgacaugcugcgccuguucgacuucugcaagcaggccauccagcggcucaaggcggaggcccagaugagcauccagcugaucaacaaggccgugaacgcccugaucaacgaccagcucaucaugaagaaccaccuccgcgacaucauggggauccccuacugcaacuacuccaaguacugcuaccugaaccacacgaccaccggcaagaccagccugcccaagugcugccuggucuccaacggcagcuaccugaacgagacgcacuucuccgacgacaucgagcagcaggccgacaacaugaucaccgagaugcuccagaaggaguacauggagcggcaggggaagacgccccugggccugguggaccucuucguguucagcaccuccuucuaccugaucagcaucuuccugcaccuggucaagaucccgacccaccgccacaucguggggaaguccugccccaagccccaccggcucaaccacaugggcaucugcagcugcgggcuguacaagcagcccggcgugccgguccgcuggaagcggugaggacuagucccuguucccagagcccacuuuuuuuucuuuuuuugaaauaaaauagccugucuuucagaucuaaaaaaaaaaaaaaaaaaaaaaaaaaaaaaaaaaaaaaaaaaaaaaaaaaaaaaaaaaaaaaaaaaaaaaaaaaaaaaaaaaaaaaaaaaaaaaaaaaaa

SEQ ID NO: 40355 - RNA, 1724 nt, Artificial Sequence
  mRNA product Design a-1 (A100) comprising derived and/or modified sequence from LASV(Mad39;Clade IV)__ANH09722__GPCmut12 (opt1)
aggagagucccgcagucggcguccagcggcucugcuuguucgugugugugucguugcaggccuuauucaagcuuaccaugggccagaucgugaccuucuuccaggaggucccccacgugaucgaggaggugaugaacaucguccugaucgcccucagcauccuggccgugcugaaggggcucuacaacguggcgaccugcggccugaucgggcuggucacguuccuccugcugugcggccgcuccugcaccaccacccucuacaaggggguguacgagcugcaggcccuggagcucaacauggagacgcugaacaugugcaugccgcugagcugcaccaagaacaacucccaccacuacauccgggugggcaacgagaccggccucgagcugacgcugaccaacaccagccucaucaaccacaaguucugcaaccuguccgacgcccacaagaagaaccuguacgaccacgcccucaugagcaucaucuccaccuuccaccugagcauccccaacuucaaccaguacgaggccauguccugcgacuucaacgacgggaagaucagcguccaguacaaccugucccacacguacgcgggcgacaccgccaaccacugcgggaccguggccaacggcgugcuccagaccuucaugcgcauggccuggggcgggagcuacaucgcgcuggacuccggccgcgggggcugggacugcaucaugacgagcuaccaguaccugaucauccagaacaccaccugggaggaccacugccaguucucccggcccagccccaucggguaccucggccugcugucccagcggacccgcgacaucuacaucagccggcgccuccugggcacguucaccuggacccuguccgacagcgaggggaaggacaccccgggcggguacugccucacgcgguggaugcugaucgaggccgagcugaagugcuucggcaacaccgccgucgccaagugcaacgagaagcacgacgaggaguucugcgacaugcuccgccuguucgacuucugcaagcaggccauccagcggcugaaggcggaggcccagaugagcauccagcucaucaacaaggccgugaacgcccugaucaacgaccagcugaucaugaagaaccaccuccgcgacaucauggggauccccuacugcaacuacuccaaguacugcuaccugaaccacaccgugaccggcaagacgagccugcccaagugcugccucgucuccaacggcagcuaccugaacgagacccacuucuccgacgacaucgagcagcaggccgacaacaugaucaccgagaugcugcagaaggaguacauggagcggcaggggaagacgccccucggccugguggaccuguucguguucagcaccuccuucuaccugaucagcaucuuccuccaccuggucaagaucccgacccaccgccacgugguggggaagcccugccccaagccccaccggcugaaccacaugggcaucugcuccugcggguucuacaagcagccgggcguccccgugcgcuggaagcggugaggacuagucccuguucccagagcccacuuuuuuuucuuuuuuugaaauaaaauagccugucuuucagaucuaaaaaaaaaaaaaaaaaaaaaaaaaaaaaaaaaaaaaaaaaaaaaaaaaaaaaaaaaaaaaaaaaaaaaaaaaaaaaaaaaaaaaaaaaaaaaaaaaaaa

SEQ ID NO: 40356 - RNA, 1724 nt, Artificial Sequence
  mRNA product Design a-1 (A100) comprising derived and/or modified sequence from LASV(Z0947-SLE-2011;Clade IV)__AIT17840__GPCmut12 (opt1)
aggagagucccgcagucggcguccagcggcucugcuuguucgugugugugucguugcaggccuuauucaagcuuaccaugggccagaucgugaccuucuuccaggaggucccccacgugaucgaggaggugaugaacaucguccugaucgcccucagcauccuggccgugcugaaggggcucuacaacuucgcgaccugcggccugguggggcuggucacguuccuccugcugugcggccgcuccugcaccaucagccucuacaaggggguguacgagcugcagacccuggagcucaacauggagacccugaacaugugcaugccgcuguccugcaccaagaacaacagccaccacuacaucauggugggcaacgagaccggccucgagcugacccugacgaacaccuccaucaucaaccacaaguucugcaaccucagcgacgcccacaagaagaaccuguacgaccacgcccugauguccaucaucagcaccuuccaccucuccauccccaacuucaaccaguacgaggccaugagcugcgacuucaacgggggcaagaucuccguccaguacaaccugagccacuccuacgccggggacgcggccaaccacugcggcaccguggccaacggggugcugcagacguucaugcggauggccuggggcggcagcuacaucgcgcucgacuccgggcgcgaccggugggacugcaucaugaccagcuaccaguaccugaucauccagaacaccaccugggaggaccacugccaguucucccgccccagccccaucggcuaccuggggcuccugucccagcggacgcgcgacaucuacaucagccggcgccugcucggcaccuucaccuggacccugagcgacuccgagggcaaggacacgcccgggggcuacugccugacccgguggaugcucaucgaggccgagcugaagugcuucgggaacaccgccgucgccaagugcaacgagaagcacgacgaggaguucugcgacaugcugcgccucuucgacuucugcaagcaggccauccagcggcugaaggcggaggcccagaugagcauccagcugaucaacaaggccgugaacgcccucaucaacgaccagcugaucaugaagaaccaccuccgcgacaucaugggcauccccuacugcaacuacuccaaguacugcuaccugaaccacaccacgaccgggaagaccagccugcccaagugcugccugguguccaacggcagcuaccucaacgagacccacuucuccgacgacaucgagcagcaggccgacaacaugaucacggagaugcugcagaaggaguacauggagcggcagggcaagaccccgcuggggcucgucgaccuguucguguucagcaccuccuucuaccugaucagcaucuuccugcaccucgugaagaucccgacccaccgccacaucgucggcaagcccugccccaagccccaccggcugaaccacauggggaucugcuccugcggccuguacaagcagccgggggugcccgugaaguggaagcgcugaggacuagucccuguucccagagcccacuuuuuuuucuuuuuuugaaauaaaauagccugucuuucagaucuaaaaaaaaaaaaaaaaaaaaaaaaaaaaaaaaaaaaaaaaaaaaaaaaaaaaaaaaaaaaaaaaaaaaaaaaaaaaaaaaaaaaaaaaaaaaaaaaaaaa

SEQ ID NO: 40357 - RNA, 1724 nt, Artificial Sequence
  mRNA product Design a-1 (A100) comprising derived and/or modified sequence from LASV(Josiah;Clade IV)__NP_694870__GPCmut12 (opt1)
aggagagucccgcagucggcguccagcggcucugcuuguucgugugugugucguugcaggccuuauucaagcuuaccaugggccagaucgugaccuucuuccaggaggucccccacgugaucgaggaggugaugaacaucguccugaucgcccucagcgugcuggccgugcugaaggggcucuacaacuucgcgaccugcggccuggucgggcuggugaccuuccuccugcugugcggccgcuccugcaccaccagccucuacaaggggguguacgagcugcagacccuggagcucaacauggagacgcugaacaugugcaugccgcuguccugcaccaagaacaacagccaccacuacaucauggucggcaacgagaccggccucgagcugacccugacgaacaccuccaucaucaaccacaaguucugcaaccucagcgacgcccacaagaagaaccuguacgaccacgcccugauguccaucaucagcaccuuccaccucuccauccccaacuucaaccaguacgaggccaugagcugcgacuucaacgggggcaagaucuccgugcaguacaaccugagccacuccuacgccggggacgcggccaaccacugcggcaccguggccaacgggguccugcagacguucaugcggauggccuggggcggcagcuacaucgcgcucgacuccgggcgcggcaacugggacugcaucaugaccagcuaccaguaccugaucauccagaacaccaccugggaggaccacugccaguucucccggcccagccccaucggguaccugggccuccugucccagcgcacgcgggacaucuacaucagccgccggcugcucggcaccuucaccuggacccugagcgacuccgaggggaaggacacgccgggcggguacugccugacccgcuggaugcucaucgaggccgagcugaagugcuucggcaacaccgccguggccaagugcaacgagaagcacgacgaggaguucugcgacaugcugcggcuguucgacuucugcaagcaggccauccagcgccugaaggcggaggcccagaugagcauccagcugaucaacaaggccgugaacgcccucaucaacgaccagcugaucaugaagaaccaccuccgggacaucauggggauccccuacugcaacuacuccaaguacugcuaccucaaccacaccacgaccggccgcaccagccugcccaagugcugccuggucuccaacggcagcuaccucaacgagacccacuucuccgacgacaucgagcagcaggccgacaacaugaucacggagaugcugcagaaggaguacauggagcggcaggggaagacgccccugggccugguggaccucuucguguucagcaccuccuucuaccugaucagcaucuuccugcaccucgucaagaucccgacccaccgccacaucguggggaaguccugccccaagccccaccggcugaaccacaugggcaucugcagcugcgggcuguacaagcagcccggcgugccggucaaguggaagcgcugaggacuagucccuguucccagagcccacuuuuuuuucuuuuuuugaaauaaaauagccugucuuucagaucuaaaaaaaaaaaaaaaaaaaaaaaaaaaaaaaaaaaaaaaaaaaaaaaaaaaaaaaaaaaaaaaaaaaaaaaaaaaaaaaaaaaaaaaaaaaaaaaaaaaa

SEQ ID NO: 40358 - RNA, 1721 nt, Artificial Sequence
  mRNA product Design a-1 (A100) comprising derived and/or modified sequence from LASV(LP;Clade I)__AAF86701__GPCmut12 (opt1)
aggagagucccgcagucggcguccagcggcucugcuuguucgugugugugucguugcaggccuuauucaagcuuaccaugggccagaucaucaccuucuuccaggaggugccccacgucaucgaggaggugaugaacaucgugcugaucgcccucagccugcuggccauccucaaggggcuguacaacaucgcgaccugcggcaucaucgggcuggucgccuuccucuuccugugcggcaaguccugcagccugacgcucaagggcggguacgagcugcagacccuggagcucaacauggagacccugaacaugugcaugccgcuguccugcaccaagaacagcucccaccacuacauccgcgugggcaacgagacggggcucgagcugacccugaccaacaccagcaucaucaaccacaaguucugcaaccucuccgacgcccacaagaagaaccuguacgaccacgcccugaugagcaucaucuccacguuccaccucagcauccccaacuucaaccaguacgaggccauguccugcgacuucaacggcgggaagaucagcgugcaguacaaccugucccacagcuacgcgggcgacgccgccgagcacugcgggaccgucgccaacggcgugcugcagaccuucaugcggauggcguggggcgggcgcuacaucgcccucgacuccggcaaggggaacugggacugcaucaugaccagcuaccaguaccugaucauccagaacacgaccugggaggaccacugccaguucucccggcccagccccaucggcuaccugggccuccugucccagcgcacccgggacaucuacaucagccgccggcugcucgggaccuucacguggacccugagcgacuccgagggcaacgagacccccgggggcuacugccugacccgcuggaugcucaucgaggccgagcugaagugcuucgggaacacggccguggccaagugcaacgagaagcacgacgaggaguucugcgacaugcugcggcuguucgacuucugcaagcaggcgauccgccggcugaaggccgaggcccagaugagcauccagcugaucaacaaggccgucaacgcccucaucaacgaccagcugaucaugaagaaccaccuccgcgacaucaugggcauccccuacugcaacuacuccaaguacugcuaccucaaccacaccagcuccggccggaccagccugcccaagugcugccugaucuccaacgggagcuaccucaacgagacccaguucuccgacgacaucgagcagcaggcggacaacaugaucacggagaugcugcagaaggaguacaucgagcgccagggcaagaccccgcuggggcugguggacaucuucaucuucagcaccuccuucuaccucaucagcaucuuccugcaccugaucaagaucccgacccaccggcacaucgugggcaagcccugccccaagccccaccgccucaaccacaugggggucugcuccugcggccuguacaagcacccgggcgugcccacgaaguggaagcggugaggacuagucccuguucccagagcccacuuuuuuuucuuuuuuugaaauaaaauagccugucuuucagaucuaaaaaaaaaaaaaaaaaaaaaaaaaaaaaaaaaaaaaaaaaaaaaaaaaaaaaaaaaaaaaaaaaaaaaaaaaaaaaaaaaaaaaaaaaaaaaaaaaaaa

SEQ ID NO: 40359 - RNA, 1721 nt, Artificial Sequence
  mRNA product Design a-1 (A100) comprising derived and/or modified sequence from LASV(803213;Clade II)__AAF86703__GPCmut12 (opt1)
aggagagucccgcagucggcguccagcggcucugcuuguucgugugugugucguugcaggccuuauucaagcuuaccaugggccagaucaucaccuucuuccaggaggugccccacgucaucgaggaggugaugaacaucgugcugaucgcccucagccugcuggccauccucaaggggaucuacaacgucgcgaccugcggccuguucgggcugaucuccuuccuccugcugugcggccgcagcugcuccgugacguacaaggggguguacgagcuccagacccuggagcugaacauggccaaccucaacaugugcaugccgcugagcugcaccaagaacaacucccaccacuacaucauggucggcaacgagaccggccuggagcucacgcugaccaacaccagcaucaucaaccacaaguucugcaaccuguccgacgcccacaagaagaaccucuacgaccacgcccugaugagcaucaucuccaccuuccaccugagcauccccaacuucaaccaguacgaggccauguccugcgacuucaacgggggcaagaucagcgugcaguacaaccucucccacagcuucgcgguggacgccgccaaccacugcgggacgaucgccaacggcguccugcagaccuucaugcggauggcguggggcggguccuacaucgcccuggacagcggcaaggggaacugggacugcaucaugaccuccuaccaguaccucaucauccagaacaccacgugggaggaccacugccaguucagccgccccucccccaucggcuaccuggggcugcucagccagcggacccgcgacaucuacaucagccggcgccugcugggcaccuucaccuggacgcucuccgacagcgagggcaacgaggcccccgggggcuacugccugacccgguggaugcugaucgaggccgagcucaagugcuucgggaacaccgccguggcgaagugcaacgagaagcacgacgaggaguucugcgacaugcugcgccuguucgacuucugcaagcaggccaucaagcggcucaagaccgaggcccagauguccauccagcugaucaacaaggccgugaacgcccugaucaacgaccagcucaucaugaagaaccaccuccgcgacaucaugggcauccccuacugcaacuacagccgguacugcuaccugaaccacacggucaccgggaagaccucccugccccgcugcugccuggugagcaacggcuccuaccugaacgagacccacuucagcgacgacaucgagcagcaggcggacaacaugaucacggagaugcuccagaaggaguacauggaccggcagggcaagaccccgcuggggcugguggaccuguucgucuucuccaccagcuucuaccucaucuccaucuuccugcaccuggugaagaucccgacccaccgccacaucgugggcaagcccugccccaagccccaccggcucaaccacauggggaucugcagcugcggccuguacaagcacccggggguccccgugaaguggaagcgcugaggacuagucccuguucccagagcccacuuuuuuuucuuuuuuugaaauaaaauagccugucuuucagaucuaaaaaaaaaaaaaaaaaaaaaaaaaaaaaaaaaaaaaaaaaaaaaaaaaaaaaaaaaaaaaaaaaaaaaaaaaaaaaaaaaaaaaaaaaaaaaaaaaaaa

SEQ ID NO: 40360 - RNA, 1721 nt, Artificial Sequence
  mRNA product Design a-1 (A100) comprising derived and/or modified sequence from LASV(GA391;Clade III)__CAA36645__GPCmut12 (opt1)
aggagagucccgcagucggcguccagcggcucugcuuguucgugugugugucguugcaggccuuauucaagcuuaccaugggccagaucgugaccuucuuccaggaggucccccacgugaucgaggaggugaugaacaucguccugaucgcccucagcauccuggccauccugaaggggcucuacaacguggcgaccugcggccugaucgggcuggugaccuuccuccugcuguccggccgcagcugcucccucaucuacaaggggaccuacgagcugcagacccuggagcucaacauggagacccugaacaugugcaugccgcugagcugcacgaagaacaacucccaccacuacauccgggucggcaacgagaccggccucgagcugacccugaccaacacgagcauccucaaccacaaguucugcaaccuguccgacgcccacaagcgcaaccuguacgaccacagccucauguccaucaucagcaccuuccaccuguccauccccaacuucaaccaguacgaggccaugagcugcgacuucaacgggggcaagaucaccgugcaguacaaccugucccacagcuucgccguggacgccgcggggcacugcggcacccucgccaacgggguccugcagacguucaugcggauggccuggggcggcuccuacaucgcccuggacagcgggcgcggcaacugggacugcaucaugaccuccuaccaguaccucaucauccagaacaccaccugggacgaccacugccaguucagccggcccucccccaucggguaccugggccugcucagccagcgcacgcgggacaucuacaucagccgccggcugcugggcaccuucaccuggacccucuccgacagcgaggggaacgagacgccgggcggguacugccugacccgcuggaugcugaucgaggcggagcucaagugcuucggcaacaccgccguggccaagugcaacgagaagcacgacgaggaguucugcgacaugcugcggcuguucgacuucugcaagcaggccauccgccggcucaagaccgaggcccagauguccauccagcugaucaacaaggcggugaacgcccugaucaacgaccagcucaucaugaagaaccaccuccgcgacaucauggggauccccuacugcaacuacagccgguacugcuaccugaaccacacguccaccggcaagaccagccugccccgcugcugccugaucuccaacggcagcuaccugaacgagaccaaguucuccgacgacaucgagcagcaggccgacaacaugaucacggagaugcugcagaaggaguacaucgaccggcaggggaagacgccccucggccuggucgaccuguucguguucagcaccuccuucuaccucaucagcaucuuccugcaccuggugaagaucccgacccaccgccacaucgucgggaagcccugccccaagccccaccggcucaaccacaugggcaucugcuccugcgggcuguacaagcagccgggcgugcccgugcgcuggaagcggugaggacuagucccuguucccagagcccacuuuuuuuucuuuuuuugaaauaaaauagccugucuuucagaucuaaaaaaaaaaaaaaaaaaaaaaaaaaaaaaaaaaaaaaaaaaaaaaaaaaaaaaaaaaaaaaaaaaaaaaaaaaaaaaaaaaaaaaaaaaaaaaaaaaaa

SEQ ID NO: 40361 - RNA, 1724 nt, Artificial Sequence
  mRNA product Design a-1 (A100) comprising derived and/or modified sequence from LASV(AV;Clade V)__CCA30314__GPCmut12 (opt1)
aggagagucccgcagucggcguccagcggcucugcuuguucgugugugugucguugcaggccuuauucaagcuuaccaugggccagaucgugaccuucuuccaggaggucccccacgugaucgaggaggugaugaacaucguccugaucgcccucagcauccuggccgugcugaaggggcucuacaacaucgcgaccugcggccugaucgggcugaucacguuccuccugcugugcggccgcuccugcagcuccaaccucuacaaggggguguacgagcugcagagccuggaccucaacauggagacccugaacaugugcaugccgcuguccugcaccaagaacaacagccaccacuacauccgggucggcaacgacaccggccucgagcugacgcugaccaacaccuccauccucaaccacaaguucugcaaccugagcgacgcccacaagaaggaccuguacgaccacgcccucauguccaucaucagcaccuuccaccuguccauccccaacuucaaccaguacgaggccaugagcugcgacuucaacgggggcaagaucuccgugcaguacaaccugagccacuccuacgccaucgacgcggccaaccacugcgggacgguggccaacggcauccuccagaccuucaugcgcauggccuggggcgggagcuacaucgcgcuggacuccggccgggggaacugggacugcaucaugaccagcuaccaguaccugaucauccagaacaccacgugggagaaccacugccaguucucccgccccagccccaucggcuaccucgggcugcugagccagcggacccgcgacaucuacaucucccggcgccuccugggcaccuucaccuggacgcugagcgacuccgagggcaacgccacccccgggggcuacugccucacccgguggaugcugaucgaggccgagcugaagugcuucgggaacaccgccgucgccaagugcaacgagaagcacgacgaggaguucugcgacaugcuccgccuguucgacuucugcaagcaggcgaucagccggcugaaguccgaggcccagaugagcauccagcucaucaacaaggccgugaacgcccugaucaacgaccagcugaucaugaagaaccaccuccgcgacaucaugggcauccccuacugcaacuacuccaaguacugcuaccugaaccacacgaucaccgggaagaccagccugcccaagugcugccucguguccaacggcagcuaccugaacgagacccacuucuccgacgacaucgagcagcaggccgacaacaugaucacggagaugcugcagaaggaguacauggagcggcagggcaagaccccgcuggggcucgucgaccuguucguguucagcaccuccuucuaccugaucagcaucuuccuccgccuggugaagaucccgacccaccggcacaucgucggcaagcccugccccaagccccaccgccugaaccacauggggaucugcuccugcggccucuacaagcagccgggggugcccgugcgguggaagcgcugaggacuagucccuguucccagagcccacuuuuuuuucuuuuuuugaaauaaaauagccugucuuucagaucuaaaaaaaaaaaaaaaaaaaaaaaaaaaaaaaaaaaaaaaaaaaaaaaaaaaaaaaaaaaaaaaaaaaaaaaaaaaaaaaaaaaaaaaaaaaaaaaaaaaa

SEQ ID NO: 40362 - RNA, 1721 nt, Artificial Sequence
  mRNA product Design a-1 (A100) comprising derived and/or modified sequence from LASV(Togo/2016/7082;Clade VI)__AMR44577__GPCmut12 (opt1)
aggagagucccgcagucggcguccagcggcucugcuuguucgugugugugucguugcaggccuuauucaagcuuaccaugggccagaucaucaccuucuuccaggaggugccccacgucaucgaggaggugaugaacaucgugcugaucgcccucagccugcuggccauccucaagggggucuacaacguggcgaccugcggcaucaucgggcuggugacguuccuguuccucugcggccgcuccugcagccugaucuacaagggguccuacgagcugcagacccucgagcugaacauggagacccugaacaugugcaugccgcucagcugcaccaagaacuccagccaccacuacauccgggucggcaacgagacgggccuggagcugacccucaccaacaccuccaucaucaaccacaaguucugcaaccugagcgacgcccacaagcgcaaccuguacgaccacgcccucauguccauccugagcacguuccaccuguccauccccaacuucaaccaguacgaggccaugagcugcgacuucaacgggggcaagaucuccgugcaguacaaccucagccacgccuacgcgguggacgccgccgagcacugcgggaccgucgccaacggcgugcugcagaccuucaugcggauggcguggggcggguccuacaucgcccuggacagcggccgcgggaacugggacugcaucaugaccuccuaccaguaccucaucauccagaacacgaccugggaggaccacugccaguucagccggcccucccccaucggcuaccuggggcugcucagccagcgcacccgggacaucuacaucagccgccggcugcugggcaccuucacguggacccucuccgacagcgagggcaacgagacccccgggggcuacugccugacccgcuggaugcugaucgaggccgagcucaagugcuucgggaacacggccguggccaagugcaacgagaagcacgacgaggaguucugcgacaugcugcggcuguucgacuucugcaagcaggcgauccagcgccucaaguccgaggcccagaugagcauccagcugaucaacaaggccgucaacgcccugaucaacgaccagcucaucaugaagaaccaccuccgggacaugaugggcauccccuacugcaacuacuccaaguacugcuaccugaaccacaccagcuccgggcgcaccagccugcccaagugcugccugguguccaacggcagcuaccugaacgagacccacuucuccgacgacaucgagcagcaggccgacaacaugaucacggagaugcuccagaaggaguacaucgaccggcagggcaagaccccgcuggggcugguggaccuguucgucuucagcaccuccuucuaccucaucagcaucuuccugcaccugaucaagaucccgacccaccgccacaucgugggcaagcccugccccaagccccaccggcucaaccacauggggaucugcuccugcggccuguacaagcagccgggggugcccacgcgcuggaagcggugaggacuagucccuguucccagagcccacuuuuuuuucuuuuuuugaaauaaaauagccugucuuucagaucuaaaaaaaaaaaaaaaaaaaaaaaaaaaaaaaaaaaaaaaaaaaaaaaaaaaaaaaaaaaaaaaaaaaaaaaaaaaaaaaaaaaaaaaaaaaaaaaaaaaa

SEQ ID NO: 40363 - RNA, 1721 nt, Artificial Sequence
  mRNA product Design a-1 (A100) comprising derived and/or modified sequence from LASV(KAK-428;Clade n.d. (VII))__ANH09740__GPCmut12 (opt1)
aggagagucccgcagucggcguccagcggcucugcuuguucgugugugugucguugcaggccuuauucaagcuuaccaugggccagaucgugaccuucuuccaggaggucccccacgugaucgaggaggugaugaacaucguccugaucgcccucagccugcuggccauccucaaggggcuguacaacuucgcgaccugcggcgugaucgggcugaucacguuccuccugcugugcggccgcuccugcagcgccaccuacaaggggcaguacgagcuccagacccuggagcugaacauggagucccucaacaugugcaugccgcugagcugcaccaagaacaacucccaccacuacauccgggccggcaacaacacgggccuggagcucacccugaccaacaccagcaucaucucccacaaguucugcaaccugagcgacgcccacaagaagaaccucuacgaccacacgcugauguccaucaucaccaccuuccaccugagcauccccaacuucaaccaguacgaggccauguccugcgacuucaacgggggcaagaucagcauccaguacaaccucucccacagcuacgcgggggacgccgcccagcacugcggcaccguggccaacgggguccugcagacguucaugcgcauggcguggggcggcuccuaccuggcccucgacagcgggcggcgcggcugggacugcaucaucuccagcuaccaguaccugaucauccagaacaccaccugggacgaccacugccaguucucccggcccagccccaucggguaccugggcuucgugagccagaagacccgcgacaucuacaucucccggcgccuccugggcacguucaccuggacccugagcgacuccgaggggcacgacaugccgggcggguacugccucacccgguggaugcugaucgaggccgaccugaagugcuucggcaacacggccguggccaagugcaacgagaagcacgacgaggaguucugcgacauguggcgccucuucgacuucugcaagcaggcgauccagcggcugaaggccgaggcccagaugaacauccagcugaucaacaaggccgucaacgcccucaucaacgaccagcugaugaugaagaaccaccuccgcgacaucauggggauccccuacugcaacuacagcaaguucugcuaccugaacaacaccaccaccggccggacgucccugccccgcugcugccugaucagcaacggcuccuaccucaacgagacccacuucagcgacgacaucgagcagcaggcggacaacaugaucaccgagaugcugcagaaggaguacauggaccggcaggggaagacgccccugggccucguggaccuguucguguucuccaccagcuucuaccugaucaccaucuuccugcaccucgucaagaucccgacccaccgccacaucguggggaagcccugccccaagccccaccggcugaaccacaugggcaucugcuccugcgggcuguacaagcagccgggcgugcccguccgcuggaagcggugaggacuagucccuguucccagagcccacuuuuuuuucuuuuuuugaaauaaaauagccugucuuucagaucuaaaaaaaaaaaaaaaaaaaaaaaaaaaaaaaaaaaaaaaaaaaaaaaaaaaaaaaaaaaaaaaaaaaaaaaaaaaaaaaaaaaaaaaaaaaaaaaaaaaa

SEQ ID NO: 40364 - RNA, 1721 nt, Artificial Sequence; identical to SEQ ID NO: 40358
  mRNA product Design a-1 (A100) comprising derived and/or modified sequence from LASV(Pinneo-NIG-1969;Clade I)__AIT17836__GPCmut12 (opt1)

SEQ ID NO: 40365 - RNA, 1721 nt, Artificial Sequence
  mRNA product Design a-1 (A100) comprising derived and/or modified sequence from LASV(ISTH0009-NIG-2011;Clade II)__AIT17404__GPCmut12 (opt1)
aggagagucccgcagucggcguccagcggcucugcuuguucgugugugugucguugcaggccuuauucaagcuuaccaugggccagaucaucaccuucuuccaggaggugccccacgucaucgaggaggugaugaacaucgugcugaucgcccucagccugcuggccauccucaaggggaucuacaacgucgcgaccugcggccuguucgggcugguguccuuccuccugcugugcggccgcagcugcuccacgaccuacaaggggguguacgagcuccagacccuggagcuggacauggccagccucaacaugugcaugccgcuguccugcaccaagaacaacagccaccacuacaucauggucggcaacgagacgggccuggagcucacccugaccaacaccuccaucaucaaccacaaguucugcaaccugagcgacgcccacaagaagaaccucuacgaccacgcccugauguccaucaucagcacguuccaccuguccauccccaacuucaaccaguacgaggccaugagcugcgacuucaacgggggcaagaucuccgugcaguacaaccucagccacgcguacgccguggacgccgccaaccacugcgggaccaucgcgaacggcguccugcagaccuucaugcggauggccuggggcggguccuacaucgcccuggacagcggcaagggguccugggacugcaucaugaccagcuaccaguaccucaucauccagaacacgaccugggaggaccacugccaguucucccgccccagccccaucggcuaccuggggcugcucagccagcggacccgcgacaucuacaucucccggcgccugcugggcaccuucacguggacccucagcgacuccgagggcaacgagacccccgggggcuacugccugacccgguggaugcugaucgaggccgagcucaagugcuucgggaacacggccguggcgaagugcaacgagaagcacgacgaggaguucugcgacaugcugcgccuguucgacuucugcaagcaggccauccggcgccucaagaccgaggcccagaugagcauccagcugaucaacaaggccgugaacgcccugaucaacgaccagcucaucaugaagaaccaccuccgggacaucaugggcauccccuacugcaacuacuccaaguacugcuaccugaaccacaccgucaccgggaagacgagccugccccgcugcugccugguguccaacggcagcuaccugaacgagacccacuucuccgacgacaucgagcagcaggcggacaacaugaucaccgagcuccugcagaaggaguacauggaccggcagggcaagaccccgcuggggcugguggaccucuucgucuucagcacguccuucuaccugaucagcaucuuccugcaccucaucaagaucccgacccaccgccacaucaccggcaagcccugccccaagccccaccggcugaaccacauggggaucugcuccugcggccuguacaagcacccgggggugcccgugaaguggaagcgcugaggacuagucccuguucccagagcccacuuuuuuuucuuuuuuugaaauaaaauagccugucuuucagaucuaaaaaaaaaaaaaaaaaaaaaaaaaaaaaaaaaaaaaaaaaaaaaaaaaaaaaaaaaaaaaaaaaaaaaaaaaaaaaaaaaaaaaaaaaaaaaaaaaaaa

SEQ ID NO: 40366 - RNA, 1721 nt, Artificial Sequence
  mRNA product Design a-1 (A100) comprising derived and/or modified sequence from LASV(ISTH2010-NIG-2012;Clade II)__AIT17482__GPCmut12 (opt1)
aggagagucccgcagucggcguccagcggcucugcuuguucgugugugugucguugcaggccuuauucaagcuuaccaugggccagaucaucaccuucuuccaggaggugccccacgucaucgaggaggugaugaacaucgugcugaucgcccucagccugcuggccauccucaaggggaucuacaacgucgcgaccugcggccuguucgggcugguguccuuccuccugcugugcggccgcagcugcuccacgaccuacaaggggguguacgagcuccagacccuggagcuggacauggccagccucaacaugugcaugccgcuguccugcaccaagaacaacagccaccacuacaucauggucggcaacgagacgggccuggagcucacccugaccaacaccuccaucaucaaccacaaguucugcaaccugagcgacgcccacaagaagaaccucuacgaccacgcccugauguccaucaucagcacguuccaccuguccauccccaacuucaaccaguacgaggccaugagcugcgacuucaacgggggcaagaucuccgugcaguacaaccucagccacgcguacgccguggacgccgccaaccacugcgggaccaucgcgaacggcguccugcagaccuucaugcggauggccuggggcggguccuacaucgcccuggacagcggcaagggguccugggacugcaucaugaccagcuaccaguaccucaucauccagaacaucacgugggaggaccacugccaguucucccgccccagccccaucggcuaccuggggcugcucagccagcggacccgcgacaucuacaucucccggcgccugcugggcaccuucaccuggacgcucagcgacuccgagggcaacgagacccccgggggcuacugccugacccgguggaugcugaucgaggccgagcucaagugcuucgggaacaccgccguggcgaagugcaacgagaagcacgacgaggaguucugcgacaugcugcgccuguucgacuucugcaagcaggccauccggcgccucaagacggaggcccagaugagcauccagcugaucaacaaggccgugaacgcccugaucaacgaccagcucaucaugaagaaccaccuccgggacaucaugggcauccccuacugcaacuacuccaaguacugcuaccugaaccacaccgucaccgggaagaccagccugccccgcugcugccugguguccaacggcagcuaccugaacgagacgcacuucuccgacgacaucgagcagcaggcggacaacaugaucaccgagcuccugcagaaggaguacaucgaccggcagggcaagaccccgcuggggcugguggaccucuucgucuucagcaccuccuucuaccugaucagcaucuuccugcaccucgugaagaucccgacgcaccgccacguggucggcaagcccugccccaagccccaccggcugaaccacauggggaucugcuccugcggccuguacaagcacccgggggugcccgugaaguggaagcgcugaggacuagucccuguucccagagcccacuuuuuuuucuuuuuuugaaauaaaauagccugucuuucagaucuaaaaaaaaaaaaaaaaaaaaaaaaaaaaaaaaaaaaaaaaaaaaaaaaaaaaaaaaaaaaaaaaaaaaaaaaaaaaaaaaaaaaaaaaaaaaaaaaaaaa

SEQ ID NO: 40367 - RNA, 1721 nt, Artificial Sequence
  mRNA product Design a-1 (A100) comprising derived and/or modified sequence from LASV(Lassa virus/H.sapiens-wt/NGA/2015/ISTH_0543;Clade II)__AVO03639__GPCmut12 (opt1)
aggagagucccgcagucggcguccagcggcucugcuuguucgugugugugucguugcaggccuuauucaagcuuaccaugggccagaucaucaccuucuuccaggaggugccccacgucaucgaggaggugaugaacaucgugcugaucgcccucagccugcuggccauccucaaggggaucuacaacgucgcgaccugcggccuguucgggcugguguccuuccuccugcugugcggccgcagcugcuccacgaccuacaaggggguguacgagcuccagacccuggagcuggacauggccaaccucaacaugugcaugccgcugagcugcaccaagaacaacucccaccacuacaucauggucggcaacgagacgggccuggagcucacccugaccaacaccagcaucaucaaccacaaguucugcaaccuguccgacgcccacaagaagaaccucuacgaccacgcccugaugagcaucaucuccacguuccaccugagcauccccaacuucaaccaguacgaggccauguccugcgacuucaacgggggcaagaucagcgugcaguacaaccucucccacaccuacgcgguggacgccgccaaccacugcgggaccaucgccaacggcguccugcagaccuucaugcggauggcguggggcgggagcuacaucgcccuggacuccggcaaggggagcugggacugcaucaugacguccuaccaguaccucgugauccagaacaccaccugggaggaccacugccaguucagccgccccucccccaucggcuaccuggggcugcucagccagcggacccgcgacaucuacaucagccggcgccugcugggcacguucaccuggacccucuccgacagcgagggcaacgagacccccgggggcuacugccugacgcgguggaugcugaucgaggccgagcucaagugcuucgggaacaccgccguggccaagugcaacgagaagcacgacgaggaguucugcgacaugcugcgccuguucgacuucugcaagcaggcgauccggcgccucaagaccgaggcccagauguccauccagcugaucaacaaggccgucaacgcccugaucaacgaccagcucaucaugaagaaccaccuccgggacaucaugggcaucccguacugcaacuacagcaaguacugcuaccugaaccacaccgugacggggaagaccucccugccccgcugcugccuggugagcaacggcuccuaccugaacgagacccacuucagcgacgacaucgagcagcaggccgacaacaugaucaccgagcuccugcagaaggaguacaucgaccggcagggcaagacgccccuggggcuggucgaccucuucguguucuccaccagcuucuaccugaucuccaucuuccugcaccucgugaagaucccgacccaccgccacaucaccggcaagcccugccccaagccccaccggcugaaccacauggggaucugcagcugcggccuguacaagcacccggggguccccgugaaguggaagcgcugaggacuagucccuguucccagagcccacuuuuuuuucuuuuuuugaaauaaaauagccugucuuucagaucuaaaaaaaaaaaaaaaaaaaaaaaaaaaaaaaaaaaaaaaaaaaaaaaaaaaaaaaaaaaaaaaaaaaaaaaaaaaaaaaaaaaaaaaaaaaaaaaaaaaa

SEQ ID NO: 40368 - RNA, 1721 nt, Artificial Sequence
  mRNA product Design a-1 (A100) comprising derived and/or modified sequence from LASV(Lassa virus/H.sapiens-wt/NGA/2016/ISTH_0009;Clade II)__AVO03571__GPCmut12 (opt1)
aggagagucccgcagucggcguccagcggcucugcuuguucgugugugugucguugcaggccuuauucaagcuuaccaugggccagaucaucaccuucuuccaggaggugccccacgucaucgaggaggugaugaacaucgugcugaucgcccucagccugcuggccauccucaaggggaucuacaacgucgcgaccugcggccugcuggggcucguguccuuccugcugcucugcggccgcagcugcuccacgaccuacaaggggguguacgagcugcagacccuggagcucgacauggccagccugaacaugugcaugccgcuguccugcaccaagaacaacagccaccacuacaucauggucggcaacgagacgggccucgagcugacccugaccaacaccuccaucaucaaccacaaguucugcaaccucagcgacgcccacaagaagaaccuguacgaccacgcccugauguccaucaucagcacguuccaccucuccauccccaacuucaaccaguacgaggccaugagcugcgacuucaacgggggccggaucuccgugcaguacaaccugagccacuccuacgcgguggacgccgccaaccacugcgggaccaucgccaacggcguccugcagaccuucaugcgcauggcguggggcgggagcuacaucgcccucgacuccggcaaggggagcugggacugcaucaugaccuccuaccaguaccugaucauccagaacacgaccugggaggaccacugccaguucagccggcccagccccaucggcuaccuggggcuccugucccagcgcacccgggacaucuacaucagccgccggcugcucggcaccuucacguggacccuguccgacagcgagggcaacgagacccccgggggcuacugccugacccgcuggaugcucaucgaggccgagcugaagugcuucgggaacacggccguggccaagugcaacgagaagcacgacgaggaguucugcgacaugcugcggcuguucgacuucugcaagcaggcgauccgccggcugaagaccgaggcccagauguccauccagcugaucaacaaggccgugaacgcccucaucaacgaccagcugaucaugaagaaccaccuccgcgacaucaugggcauccccuacugcaacuacagcaaguacugcuaccucaaccacaccgucaccgggaagacgucccugccccggugcugccuggugagcaacggcuccuaccucaacgagacccacuucagcgacgacaucgagcagcaggccgacaacaugaucaccgagcugcugcagaaggaguacaucgaccgccagggcaagaccccgcuggggcucguggaccuguucgucuucuccacgagcuucuaccugaucuccaucuuccuccaccuggugaagaucccgacccaccggcacaucaccggcaagcccugccccaagccccaccgccugaaccacauggggaucugcagcugcggccucuacaaccacccgggggugcccgucaaguggaagcggugaggacuagucccuguucccagagcccacuuuuuuuucuuuuuuugaaauaaaauagccugucuuucagaucuaaaaaaaaaaaaaaaaaaaaaaaaaaaaaaaaaaaaaaaaaaaaaaaaaaaaaaaaaaaaaaaaaaaaaaaaaaaaaaaaaaaaaaaaaaaaaaaaaaaa

SEQ ID NO: 40369 - RNA, 1721 nt, Artificial Sequence
  mRNA product Design a-1 (A100) comprising derived and/or modified sequence from LASV(Lassa virus/H.sapiens-wt/NGA/2016/ISTH_0017;Clade II)__AVO03567__GPCmut12 (opt1)
aggagagucccgcagucggcguccagcggcucugcuuguucgugugugugucguugcaggccuuauucaagcuuaccaugggccagaucaucaccuucuuccaggaggugccccacgucaucgaggaggugaugaacaucgugcugaucgcccucagccugcuggccauccucaaggggaucuacaacgucgcgaccugcggccuguucgggcugguguccuuccuccugcugugcggccgcagcugcuccacgaccuacaaggggguguacgagcuccagacccuggagcuggacauggccagccucaacaugugcaugccgcuguccugcaccaagaacaacagccaccacuacaucauggucggcaacgagacgggccuggagcucacccugaccaacaccuccaucaucaaccacaaguucugcaaccugagcgacgcccacaagaagaaccucuacgaccacgcccugauguccaucaucagcacguuccaccuguccauccccaacuucaaccaguacgaggccaugagcugcgacuucaacgggggcaagaucuccgugcaguacaaccucagccacaccuacgcgaucgacgccgccaaccacugcgggaccaucgccaacggcgugcugcagaccuucaugcggauggcguggggcggguccuacaucgcccuggacagcggcaagggguccugggacugcaucaugacgagcuaccaguaccucaucauccagaacaccaccugggaggaccacugccaguucucccgccccagccccaucggcuaccuggggcugcucagccagcggacccgcgacaucuacaucucccggcgccugcugggcacguucaccuggacccucagcgacuccgagggcaacgagacccccgggggcuacugccugacgcgguggaugcugaucgaggccgagcucaagugcuucgggaacaccgccgucgccaagugcaacgagaagcacgacgaggaguucugcgacaugcugcgccuguucgacuucugcaagcaggcgauccggcgccucaagaccgaggcccagaugagcauccagcugaucaacaaggccgugaacgcccugaucaacgaccagcucaucaugaagaaccaccuccgggacaucaugggcaucccguacugcaacuacuccaaguacugcuaccugaaccacaccgugacggggaagaccagccugccccgcugcugccuggucuccaacggcagcuaccugaacgagacccacuucuccgacgacaucgagcagcaggccgacaacaugaucaccgagcuccugcagaaggaguacauggaccggcagggcaagacgccccuggggcugguggaccucuucguguucagcaccuccuucuaccugaucagcaucuuccugcaccucguccgcaucccgacccaccggcacgugaucggcaagcccugccccaagccccaccgccugaaccacauggggaucugcuccugcggccuguacaagcacccgggggugcccgucaaguggaagcggugaggacuagucccuguucccagagcccacuuuuuuuucuuuuuuugaaauaaaauagccugucuuucagaucuaaaaaaaaaaaaaaaaaaaaaaaaaaaaaaaaaaaaaaaaaaaaaaaaaaaaaaaaaaaaaaaaaaaaaaaaaaaaaaaaaaaaaaaaaaaaaaaaaaaa

SEQ ID NO: 40370 - RNA, 1721 nt, Artificial Sequence
  mRNA product Design a-1 (A100) comprising derived and/or modified sequence from LASV(Lassa virus/H.sapiens-wt/NGA/2018/ISTH_0959;Clade II)__AVV65099__GPCmut12 (opt1)
aggagagucccgcagucggcguccagcggcucugcuuguucgugugugugucguugcaggccuuauucaagcuuaccaugggccagaucaucaccuucuuccaggaggugccccacgucaucgaggaggugaugaacaucgugcugaucgcccucagccugcuggccauccucaaggggaucuacaacgucgugaccugcggccuguucgggcugguguccuuccuccugcugugcggccgcagcugcuccacgaccuacaagggggucuacgagcuccagacccuggagcuggacauggcgagccucaacaugugcaugccgcuguccugcaccaagaacaacagccaccacuacaucauggugggcaacgagacgggccuggagcucacccugaccaacaccuccaucaucaaccacaaguucugcaaccugagcgacgcccacaagaagaaccucuacgaccacgcccugauguccaucaucagcacguuccaccuguccauccccaacuucaaccaguacgaggccaugagcugcgacuucaacgggggcaagaucuccgugcaguacaaccucagccacgccuacgcgaucgacgccgccaaccacugcgggaccaucgccaacggcguccugcagaccuucaugcggauggcguggggcggguccuacaucgcccuggacagcggcaagggguccugggacugcaucaugaccagcuaccaguaccucaucauccagaacacgaccugggaggaccacugccaguucucccgccccagccccaucggcuaccuggggcugcucagccagcggacccgcgacaucuacaucucccggcgccugcugggcaccuucacguggacccucagcgacuccgagggcaacgagacccccgggggcuacugccugacccgguggaugcugaucgaggccgagcucaagugcuucgggaacacggccguggccaagugcaacgagaagcacgacgaggaguucugcgacaugcugcgccuguucgacuucugcaagcaggcgauccggcgccucaagaccgaggcccagaugagcauccagcugaucaacaaggccgugaacgcccugaucaacgaccagcucaucaugaagaaccaccuccgggacaucaugggcauccccuacugcaacuacuccaaguacugcuaccugaaccacaccgucaccgggaagacgagccugccccgcugcugccugguguccaacggcagcuaccugaacgagacccacuucuccgacgacaucgagcagcaggccgacaacaugaucaccgagcuccugcagaaggaguacaucgaccggcagggcaagaccccgcuggggcugguggaccucuucgucuucagcacguccuucuaccugaucagcaucuuccugcaccucgugaagaucccgacccaccgccacgugaucggcaagcccugccccaagccccaccggcugaaccacauggggaucugcuccugcggccuguacaagcacccggggguccccgugaaguggaagcgcugaggacuagucccuguucccagagcccacuuuuuuuucuuuuuuugaaauaaaauagccugucuuucagaucuaaaaaaaaaaaaaaaaaaaaaaaaaaaaaaaaaaaaaaaaaaaaaaaaaaaaaaaaaaaaaaaaaaaaaaaaaaaaaaaaaaaaaaaaaaaaaaaaaaaa

SEQ ID NO: 40371 - RNA, 1721 nt, Artificial Sequence
  mRNA product Design a-1 (A100) comprising derived and/or modified sequence from LASV(LASV003-NIG-2008;Clade II)__AIT17580__GPCmut12 (opt1)
aggagagucccgcagucggcguccagcggcucugcuuguucgugugugugucguugcaggccuuauucaagcuuaccaugggccagaucaucaccuucuuccaggaggugccccacgucaucgaggaggugaugaacaucgugcugaucgcccucagccugcuggccauccucaaggggaucuacaacgucgcgaccugcggccuguucgggcugguguccuuccuccugcugugcggccgcagcugcuccacgaccuacaaggggguguacgagcuccagacccuggagcuggacauggccagccucaacaugugcaugccgcuguccugcaccaagaacaacagccaccacuacaucauggucggcaacgagacgggccuggagcucacccugaccaacaccuccaucaucaaccacaaguucugcaaccugagcgacgcccacaagaagaaccucuacgaccacgcccugauguccaucaucagcacguuccaccuguccauccccaacuucaaccaguacgaggccaugagcugcgacuucaacgggggcaagaucuccgugcaguacaaccucagccacaccuacgcgguggacgccgccaaccacugcgggaccaucgccaacggcguccugcagaccuucaugcggauggcguggggcggguccuacaucgcccuggacagcggcaagggguccugggacugcaucaugacgagcuaccaguaccucaucauccagaacaccaccugggaggaccacugccaguucucccgccccagccccaucggcuaccuggggcugcucagccagcggacccgcgacaucuacaucucccggcgccugcugggcacguucaccuggacccucagcgacuccgagagcaacgagaccccgggcggguacugccugacgcgguggaugcugaucgaggccgagcucaagugcuucggcaacaccgccguggccaagugcaacgagaagcacgacgaggaguucugcgacaugcugcgccuguucgacuucugcaagcaggcgauccggcgccucaaggccgaggcccagauguccauccagcugaucaacaaggccgugaacgcccugaucaacgaccagcucaucaugaagaaccaccuccgggacaucauggggauccccuacugcaacuacagcaaguacugcuaccugaaccacaccgucaccggccgcacgucccugccccggugcugccuggugagcaacggguccuaccugaacgagacccacuucagcgacgacaucgagcagcaggcggacaacaugaucaccgagcuccugcagaaggaguacauggaccgccagggcaagacgccccugggccugguggaccucuucgucuucuccaccagcuucuaccugaucuccaucuuccugcaccucgugaagaucccgacccaccggcacgugaucgggaagcccugccccaagccccaccgccugaaccacaugggcaucugcagcugcgggcuguacaagcacccgggcguccccgugaaguggaagcggugaggacuagucccuguucccagagcccacuuuuuuuucuuuuuuugaaauaaaauagccugucuuucagaucuaaaaaaaaaaaaaaaaaaaaaaaaaaaaaaaaaaaaaaaaaaaaaaaaaaaaaaaaaaaaaaaaaaaaaaaaaaaaaaaaaaaaaaaaaaaaaaaaaaaa

SEQ ID NO: 40372 - RNA, 1721 nt, Artificial Sequence
  mRNA product Design a-1 (A100) comprising derived and/or modified sequence from LASV(LASV035-NIG-2009;Clade II)__AIT17588__GPCmut12 (opt1)
aggagagucccgcagucggcguccagcggcucugcuuguucgugugugugucguugcaggccuuauucaagcuuaccaugggccagaucaucaccuucuuccaggaggugccccacgucaucgaggaggugaugaacaucgugcugaucgcccucagccugcuggccauccucaaggggaucuacaacgucgcgaccugcggccuguucgggcugguguccuuccuccugcugugcggccgcagcugcuccacgaccuacaaggggguguacgagcuccagacccuggagcuggacauggccagccucaacaugugcaugccgcuguccugcaccaagaacaacagccaccacuacaucauggucggcaacgagacgggccuggagcucacccugaccaacaccuccaucaucaaccacaaguucugcaaccugagcgacgcccacaagaagaaccucuacgaccacgcccugauguccaucaucagcacguuccaccuguccauccccaacuucaaccaguacgaggccaugagcugcgacuucaacgggggcaagaucuccgugcaguacaaccucagccacgcguacgccguggacgccgccaaccacugcgggaccaucgcgaacggcguccugcagaccuucaugcggauggccuggggcggguccuacaucgcccuggacagcggcaagggguccugggacugcaucaugaccagcuaccaguaccucaucauccagaacacgaccugggaggaccacugccaguucucccgccccagccccaucggcuaccuggggcugcucagccagcggacccgcgacaucuacaucucccggcgccugcugggcaccuucacguggacccucagcgacuccgagggcaacgagacccccgggggcuacugccugacccgguggaugcugaucgaggccgagcucaagugcuucgggaacacggccguggcgaagugcaacgagaagcacgacgaggaguucugcgacaugcugcgccuguucgacuucugcaagcaggccauccggcgccucaaggccgaggcccagaugagcauccagcugaucaacaaggccgugaacgcgcugaucaacgaccagcucaucaugaagaaccaccuccgggacaucaugggcauccccuacugcaacuacuccaaguacugcuaccugaaccacaccgucaccgggaagaccagccugccccgcugcugccugguguccaacggcagcuaccugaacgagacgcacuucuccgacgacaucgagcagcaggccgacaacaugaucaccgagcuccugcagaaggaguacaucgaccggcagggcaagaccccgcuggggcugguggaccucuucgucuucagcaccuccuucuaccugaucagcaucuuccugcaccucgugaagaucccgacgcaccgccacgugaucggcaagcccugccccaagccccaccggcugaaccacauggggaucugcuccugcggccuguacaagcacccggggguccccgugaaguggaagcgcugaggacuagucccuguucccagagcccacuuuuuuuucuuuuuuugaaauaaaauagccugucuuucagaucuaaaaaaaaaaaaaaaaaaaaaaaaaaaaaaaaaaaaaaaaaaaaaaaaaaaaaaaaaaaaaaaaaaaaaaaaaaaaaaaaaaaaaaaaaaaaaaaaaaaa

SEQ ID NO: 40373 - RNA, 1721 nt, Artificial Sequence
  mRNA product Design a-1 (A100) comprising derived and/or modified sequence from LASV(LASV1000-NIG-2009;Clade II)__AIT17782__GPCmut12 (opt1)
aggagagucccgcagucggcguccagcggcucugcuuguucgugugugugucguugcaggccuuauucaagcuuaccaugggccagaucaucaccuucuuccaggaggugccccacgucaucgaggaggugaugaacaucgugcugaucgcccucagccugcuggccauccucaaggggaucuacaacgucgcgaccugcggccuguucgggcugguguccuuccuccugcugugcggccgcagcugcuccacgaccuacaaggggguguacgagcuccagacccuggagcuggacauggccagccucaacaugugcaugccgcuguccugcaccaagaacaacagccaccacuacaucauggucggcaacgagacgggccuggagcucacccugaccaacaccuccaucaucaaccacaaguucugcaaccugagcgacgcccacaagaagaaccucuacgaccacgcccugauguccaucaucagcacguuccaccuguccauccccaacuucaaccaguacgaggccaugagcugcgacuucaacgggggcaagaucuccgugcaguacaaccucagccacaccuacgcgguggacgccgccaaccacugcgggaccaucgccaacggcguccugcagaccuucaugcggauggcguggggcggguccuacaucgcccuggacagcggcaagggguccugggacugcaucaugacgagcuaccaguaccucaucauccagaacaccaccugggaggaccacugccaguucucccgccccagccccaucggcuaccuggggcugcucagccagcggacccgcgacaucuacaucucccggcgccugcugggcacguucaccuggacccucagcgacuccgagggcaacgagacccccgggggcuacugccugacgcgguggaugcugaucgaggccgagcucaagugcuucgggaacaccgccguggccaagugcaacgagaagcacgacgaggaguucugcgacaugcugcgccuguucgacuucugcaagcaggcgaucaagcggcucaagaccgaggcccagaugagcauccagcugaucaacaaggccgugaacgcccugaucaacgaccagcucaucaugaagaaccaccuccgcgacaucaugggcaucccguacugcaacuacuccaaguacugcuaccugaaccacaccgucacggggaagaccagccugccccggugcugccugguguccaacggcagcuaccugaacgagacccacuucuccgacgacaucgagcagcaggccgacaacaugaucaccgagcuccugcagaaggaguacaucgaccgccagggcaagacgccccuggggcugguggaccucuucgucuucagcaccuccuucuaccugaucagcaucuuccugcaccucgugaagaucccgacccaccggcacguggucggcaagcccugccccaagccccaccgccugaaccacauggggaucugcuccugcggccuguacaagcacccgggggugcccgugaaguggaagcggugaggacuagucccuguucccagagcccacuuuuuuuucuuuuuuugaaauaaaauagccugucuuucagaucuaaaaaaaaaaaaaaaaaaaaaaaaaaaaaaaaaaaaaaaaaaaaaaaaaaaaaaaaaaaaaaaaaaaaaaaaaaaaaaaaaaaaaaaaaaaaaaaaaaaa

SEQ ID NO: 40374 - RNA, 1721 nt, Artificial Sequence
  mRNA product Design a-1 (A100) comprising derived and/or modified sequence from LASV(LASV221-NIG-2010;Clade II)__AIT17624__GPCmut12 (opt1)
aggagagucccgcagucggcguccagcggcucugcuuguucgugugugugucguugcaggccuuauucaagcuuaccaugggccagaucaucaccuucuuccaggaggugccccacgucaucgaggaggugaugaacaucgugcugaucgcccucagccugcuggccauccucaaggggaucuacaacgucgcgaccugcggccuguucgggcugguguccuuccuccugcugugcggccgcagcugcuccacgaccuacaaggggguguacgagcuccagacccuggagcuggacauggccagccucaacaugugcaugccgcuguccugcaccaagaacaacagccaccacuacaucauggucggcaacgagacgggccuggagcucacccugaccaacaccuccaucaucaaccacaaguucugcaaccugagcgacgcccacaagaagaaccucuacgaccacgcccugauguccaucaucagcacguuccaccuguccauccccaacuucaaccaguacgaggccaugagcugcgacuucaacgggggcaagaucuccgugcaguacaaccucagccacaccuacgcgaucgacgccgccaaccacugcgggaccaucgccaacggcgugcugcagaccuucaugcggauggcguggggcggguccuacaucgcccuggacagcggcaagggguccugggacugcaucaugacgagcuaccaguaccucaucauccagaacaccaccugggaggaccacugccaguucucccgccccagccccaucggcuaccuggggcugcucagccagcggacccgcgacaucuacaucucccggcgccugcugggcacguucaccuggacccucagcgacuccgagggcaacgagacccccgggggcuacugccugacgcgguggaugcugaucgaggccgagcucaagugcuucgggaacaccgccgucgccaagugcaacgagaagcacgacgaggaguucugcgacaugcugcgccuguucgacuucugcaagcaggcgauccggcgccucaagaccgaggcccagaugagcauccagcugaucaacaaggccgugaacgcccugaucaacgaccagcucaucaugaagaaccaccuccgggacaucaugggcaucccguacugcaacuacuccaaguacugcuaccugaaccacaccgugacggggaagaccagccugccccgcugcugccuggucuccaacggcagcuaccugaacgagacccacuucuccgacgacaucgagcagcaggccgacaacaugaucaccgagaugcuccagaaggaguacauggaccggcagggcaagacgccccuggggcugguggaccuguucguguucagcaccuccuucuaccucaucagcaucuuccugcaccuggucaagaucccgacccaccgccacgugaucggcaagcccugccccaagccccaccggcucaaccacauggggaucugcuccugcggccuguacaagcacccgggggugcccgucaaguggaagcgcugaggacuagucccuguucccagagcccacuuuuuuuucuuuuuuugaaauaaaauagccugucuuucagaucuaaaaaaaaaaaaaaaaaaaaaaaaaaaaaaaaaaaaaaaaaaaaaaaaaaaaaaaaaaaaaaaaaaaaaaaaaaaaaaaaaaaaaaaaaaaaaaaaaaaa

SEQ ID NO: 40375 - RNA, 1721 nt, Artificial Sequence
  mRNA product Design a-1 (A100) comprising derived and/or modified sequence from LASV(LASV237-NIG-2010;Clade II)__AIT17638__GPCmut12 (opt1)
aggagagucccgcagucggcguccagcggcucugcuuguucgugugugugucguugcaggccuuauucaagcuuaccaugggccagaucaucaccuucuuccaggaggugccccacgucaucgaggaggugaugaacaucgugcugaucgcccucagccugcuggccauccucaaggggaucuacaacgucgcgaccugcggccuguucgggcugguguccuuccuccugcugugcggccgcagcugcuccacgaccuacaaggggguguacgagcuccagacccuggagcuggacauggccagccucaacaugugcaugccgcuguccugcaccaagaacaacagccaccacuacaucauggucggcaacgagacgggccuggagcucacccugaccaacaccuccaucaucaaccacaaguucugcaaccugagcgacgcccacaagaaggaccucuacgaccacgcccugauguccaucaucagcacguuccaccuguccauccccaacuucaaccaguacgaggccaugagcugcgacuucaacgggggcaagaucuccgugcaguacaaccucagccacaccuacgcgguggacgccgccaaccacugcgggaccaucgccaacggcguccugcagaccuucaugcggauggcguggggcggguccuacaucgcccuggacagcggcaagggguccugggacugcaucaugacgagcuaccaguaccucaucauccagaacaccaccugggaggaccacugccaguucucccgccccagccccaucggcuaccuggggcugcucagccagcggacccgcgacaucuacaucucccggcgccugcugggcacguucaccuggacccucagcgacuccgagggcaacgagacccccgggggcuacugccugacgcgguggaugcugaucgaggccgagcucaagugcuucgggaacaccgccguggccaagugcaacgagaagcacgacgaggaguucugcgacaugcugcgccuguucgacuucugcaagcaggcgauccggcgccucaagaccgaggcccagaugagcauccagcugaucaacaaggccgugaacgcccugaucaacgaccagcucaucaugaagaaccaccuccgggacaucaugggcaucccguacugcaacuacuccaaguacugcuaccugaaccacaccgucacggggaagaccagccugccccgcugcugccugguguccaacggcagcuaccugaacgagacccacuucuccgacgacaucgagcagcaggccgacaacaugaucaccgagcuccugcagaaggaguacauggaccggcagggcaagacgccccuggggcugguggaccucuucgucuucagcaccuccuucuaccugaucagcaucuuccugcaccucaucaagaucccgacccaccgccacaucaccggcaagcccugccccaagccccaccggcugaaccacauggggaucugcuccugcggccuguacaagcacccgggggugcccgugaaguggaagcgcugaggacuagucccuguucccagagcccacuuuuuuuucuuuuuuugaaauaaaauagccugucuuucagaucuaaaaaaaaaaaaaaaaaaaaaaaaaaaaaaaaaaaaaaaaaaaaaaaaaaaaaaaaaaaaaaaaaaaaaaaaaaaaaaaaaaaaaaaaaaaaaaaaaaaa

SEQ ID NO: 40376 - RNA, 1721 nt, Artificial Sequence
  mRNA product Design a-1 (A100) comprising derived and/or modified sequence from LASV(LASV253-NIG-2011;Clade II)__AIT17670__GPCmut12 (opt1)
aggagagucccgcagucggcguccagcggcucugcuuguucgugugugugucguugcaggccuuauucaagcuuaccaugggccagaucaucaccuucuuccaggaggugccccacgucaucgaggaggugaugaacaucgugcugaucgcccucagccugcuggccauccucaaggggaucuacaacgucgcgaccugcggccuguucgggcugguguccuuccuccugcugugcggccgcagcugcuccacgaccuacaaggggguguacgagcuccagacccuggagcuggacauggccagccucaacaugugcaugccgcuguccugcaccaagaacaacagccaccacuacaucauggucggcaacgagacgggccuggagcucacccugaccaacaccuccaucaucaaccacaaguucugcaaccugagcgacgcccacaagaagaaccucuacgaccacgcccugauguccaucaucagcacguuccaccuguccauccccaacuucaaccaguacgaggccaugagcugcgacuucaacgggggcaagaucuccgugcaguacaaccucagccacaccuacgcgguggacgccgccaaccacugcgggaccaucgccaacggcguccugcagaccuucaugcggauggcguggggcggguccuacaucgcccuggacagcggcaagggguccugggacugcaucaugacgagcuaccaguaccucaucauccagaacaccaccugggaggaccacugccaguucucccgccccagccccaucggcuaccuggggcugcucagccagcggacccgcgacaucuacaucucccggcgccugcugggcacguucaccuggacccucagcgacuccgagggcaacgagacccccgggggcuacugccugacgcgguggaugcugaucgaggccgagcucaagugcuucgggaacaccgccguggccaagugcaacgagaagcacgacgaggaguucugcgacaugcugcgccuguucgacuucugcaagcaggcgauccggcgccucaaggccgaggcccagaugagcauccagcugaucaacaaggccgugaacgcccugaucaacgaccagcucaucaugaagaaccaccuccgggacaucaugggcauccccuacugcaacuacuccaaguacugcuaccugaaccacaccgucaccgggcgcacgagccugccccggugcugccugguguccaacggcagcuaccugaacgagacccacuucuccgacgacaucgagcagcaggcggacaacaugaucaccgagcuccugcagaaggaguacaucgaccgccagggcaagaccccgcuggggcugguggaccucuucgucuucagcacguccuucuaccugaucagcaucuuccugcaccucgugaagaucccgacccaccggcacaucaucggcaagcccugccccaagccccaccgccugaaccacauggggaucugcuccugcggccuguacaagcacccgggggugcccgucaaguggaagcggugaggacuagucccuguucccagagcccacuuuuuuuucuuuuuuugaaauaaaauagccugucuuucagaucuaaaaaaaaaaaaaaaaaaaaaaaaaaaaaaaaaaaaaaaaaaaaaaaaaaaaaaaaaaaaaaaaaaaaaaaaaaaaaaaaaaaaaaaaaaaaaaaaaaaa

SEQ ID NO: 40377 - RNA, 1721 nt, Artificial Sequence
  mRNA product Design a-1 (A100) comprising derived and/or modified sequence from LASV(LASV254-NIG-2011;Clade II)__AIT17674__GPCmut12 (opt1)
aggagagucccgcagucggcguccagcggcucugcuuguucgugugugugucguugcaggccuuauucaagcuuaccaugggccagaucaucaccuucuuccaggaggugccccacgucaucgaggaggugaugaacaucgugcugaucgcccucagccugcuggccauccucaaggggaucuacaacgucgcgaccugcggccuguucgggcugguguccuuccuccugcugugcggccgcagcugcuccacgaccuacaaggggguguacgagcuccagacccuggagcuggacaugaccaaccucaacaugugcaugccgcugagcugcacgaagaacaacucccaccacuacaucauggucggcaacgagaccggccuggagcucacccugaccaacacgagcaucaucaaccacaaguucugcaaccuguccgacgcccacaagaagaaccucuacaaccacgcccugaugagcaucaucuccaccuuccaccugagcauccccaacuucaaccaguacgaggccauguccugcgacuucaacgggggcaagaucagcgugcaguacaaccucucccacagcuacgccguggacgcggccaaccacugcgggaccaucgccaacggcguccugcagaccuucaugcggauggccuggggcggguccuacaucgcgcuggacagcggcaaggggaacugggacugcaucaugacguccuaccaguaccucaucauccagaacaccaccugggaggaccacugccaguucagccgccccucccccaucggcuaccuggggcugcucagccagcggacccgcgacaucuacaucagccggcgccugcugggcacguucaccuggacccucuccgacagcgagggcaacgagacccccgggggcuacugccugacgcgguggaugcugaucgaggccgagcucaagugcuucgggaacaccgccguggccaagugcaacgagaagcacgacgaggaguucugcgacaugcugcgccuguucgacuucugcaagcaggccauccggcgccucaagaccgaggcgcaggccaacauccagcugaucaacaaggccgugaacgcccugaucaacgaccagcucaucaugaagaaccaccuccgggacaucaugggcaucccguacugcaacuacuccaaguacugcuaccugaaccacaccgucacggggaagaccagccugccccgcugcugccugguguccaacggcagcuaccugaacgagacccacuucuccgacgacaucgagcagcaggccgacaacaugaucaccgagcuccugcagaaggaguacauggaccggcagggcaagacgccccuggggcugguggaccucuucgucuucagcaccuccuucuaccugaucagcaucuuccugcaccucgugaagaucccgacccaccgccacgugaucggcaagcccugccccaagccccaccggcugaaccacauggggaucugcuccugcggccuguacaagcacccggggguccccgugaaguggaagcgcugaggacuagucccuguucccagagcccacuuuuuuuucuuuuuuugaaauaaaauagccugucuuucagaucuaaaaaaaaaaaaaaaaaaaaaaaaaaaaaaaaaaaaaaaaaaaaaaaaaaaaaaaaaaaaaaaaaaaaaaaaaaaaaaaaaaaaaaaaaaaaaaaaaaaa

SEQ ID NO: 40378 - RNA, 1721 nt, Artificial Sequence
  mRNA product Design a-1 (A100) comprising derived and/or modified sequence from LASV(Nig08-A19;Clade III)__ADU56618__GPCmut12 (opt1)
aggagagucccgcagucggcguccagcggcucugcuuguucgugugugugucguugcaggccuuauucaagcuuaccaugggccagaucgugaccuucuuccaggaggucccccacgugaucgaggaggugaugaacaucguccugaucgcccucagcauccuggccauccugaaggggcucuacaacaucgcgaccugcggccugaucgggcuggugacguuccuccugcuguccggccgcagcugcuccaugaccuacaaggggguguacgagcuccagacccuggagcugaacaugaacacccucaacaugugcaugccgcugagcugcacgaagaacaacucccaccacuacaucauggucggcaacgagaccggccuggagcucacccugaccaacacgagccugcuccaccacaaguucugcaaccuguccgacgcccacaagaagaaccuguacgaccacacccucaugagcaucaucuccaccuuccaccugagcauccccaacuucaaccaguacgaggccauguccugcgacuucaacgggggcaagaucaccgugcaguacaaccugagccacuccuacgccaucgacgccgcgaaccacugcgggacgguggccaacggcguccuccagaccuucaugcggauggccuggggcgggagcuacaucgcccuggacuccggccgcgggaagugggacugcaucaugaccagcuaccaguaccugaucauccagaacaccacgugggaggaccacugccaguucucccggcccagccccaucggcuaccucgggcugcugucccagcgcacccgggacaucuacaucagccgccggcuccugggcaccuucaccuggacgcugagcgacuccgagggcaacgagacccccgggggcuacugccucacccgcuggaugcugaucgaggcggagcugaagugcuucgggaacaccgccguggccaagugcaacgagaagcacgacgaggaguucugcgacaugcuccggcuguucgacuucugcaagcaggccauccgccggcugaaggccgaggcgcagaugagcauccagcucaucaacaaggccgugaacgcccugaucaacgaccagcugaucaugaagaaccaccuccgcgacaucaugggcauccccuacugcaacuacuccaaguacugcuaccugaaccacacgagcaccgggcggaccucccugccccgcugcugccucgucagcaacggcuccuaccugaacgagacccacuucagcgacgacaucgagcagcaggccgacaacaugaucacggagaugcugcagaaggaguaccuggaccggcagggcaagaccccgcucgggcugguggaccuguucguguucuccaccagcuucuaccucaucuccaucuuccugcaccuggucaagaucccgacccaccgccacaucgugggcaagcccugccccaagccccaccggcucaaccacauggggaucugcagcugcggccuguacaagcagccgggggugcccguccgcuggaagcggugaggacuagucccuguucccagagcccacuuuuuuuucuuuuuuugaaauaaaauagccugucuuucagaucuaaaaaaaaaaaaaaaaaaaaaaaaaaaaaaaaaaaaaaaaaaaaaaaaaaaaaaaaaaaaaaaaaaaaaaaaaaaaaaaaaaaaaaaaaaaaaaaaaaaa

SEQ ID NO: 40379 - RNA, 1724 nt, Artificial Sequence
  mRNA product Design a-1 (A100) comprising derived and/or modified sequence from LASV(G1180-SLE-2010;Clade IV)__AIT17168__GPCmut12 (opt1)
aggagagucccgcagucggcguccagcggcucugcuuguucgugugugugucguugcaggccuuauucaagcuuaccaugggccagaucgugaccuucuuccaggaggucccccacgugaucgaggaggugaugaacaucguccugaucgcccucagcauccuggccgugcugaaggggcucuacaacuucgcgaccugcggccugguggggcugcucacguuccugcugcucugcggccgcuccugcaccgccagccgguacaagggggucuacgagcugcagacccuggagcucaacauggagacccugaacaugugcaugccgcuguccugcacgaagaacaacagccaccacuacaucauggugggcaacgagaccggccucgagcugacccugaccaacacguccaucaucaaccacaaguucugcaaccucagcgacgcccacaagaagaaccuguacgaccacgcccugauguccaucaucagcaccuuccaccucuccauccccaacuucaaccaguacgaggccaugagcugcgacuucaacgggggcaagaucuccgugcaguacaaccugagccacuccuacgcgggggacgccgccaaccacugcggcaccgucgccaacggggugcugcagaccuucaugcgcauggcguggggcggcagcuacaucgcccucgacuccgggcacggcagcugggacugcaucaugacguccuaccaguaccugaucauccagaacaccaccugggaggaccacugccaguucagccggcccucccccaucggguaccugggccuccugagccagcgcacccgggacaucuacaucagccgccggcugcucggcacguucaccuggacccuguccgacagcgaggggaaggacaccccgggcggguacugccugacgcgcuggaugcucaucgaggccgagcugaagugcuucggcaacaccgccguggccaagugcaacgagaagcacgacgaggaguucugcgacaugcugcggcuguucgacuucugcaagcaggcgauccagcgccugaaggccgaggcccagauguccauccagcugaucaacaaggccgucaacgcccucaucaacgaccagcugaucaugaagaaccaccuccgggacaucauggggauccccuacugcaacuacagcaaguacugcuaccucaaccacaccaccacgggcaagaccucccugcccaagugcugccuggugagcaacggcuccuaccucaacgagacccacuucagcgacgacaucgagcagcaggcggacaacaugaucaccgagaugcugcagaaggaguacauggagcgccaggggaagacgccccugggccugguggaccucuucgucuucuccaccagcuucuaccugaucuccaucuuccugcaccucgugaagaucccgacccaccggcacaucgugggcaagagcugccccaagccccaccgccugaaccacauggggaucugcuccugcgggcuguacaagcagcccggcgucccggugaaguggaagcggugaggacuagucccuguucccagagcccacuuuuuuuucuuuuuuugaaauaaaauagccugucuuucagaucuaaaaaaaaaaaaaaaaaaaaaaaaaaaaaaaaaaaaaaaaaaaaaaaaaaaaaaaaaaaaaaaaaaaaaaaaaaaaaaaaaaaaaaaaaaaaaaaaaaaa

SEQ ID NO: 40380 - RNA, 1724 nt, Artificial Sequence
  mRNA product Design a-1 (A100) comprising derived and/or modified sequence from LASV(G1442-SLE-2011;Clade IV)__AIT17180__GPCmut12 (opt1)
aggagagucccgcagucggcguccagcggcucugcuuguucgugugugugucguugcaggccuuauucaagcuuaccaugggccagaucgugaccuucuuccaggaggucccccacgugaucgaggaggugaugaacaucguccugaucgcccucagcauccuggccgugcugaaggggcucuacaacguggcgaccugcggccugaucgggcuggucaccuuccuccugcugugcggccgcuccugcaccaccacccucuacaaggggguguacgagcugcagacgcuggagcucaacauggagacccugaacaugugcaugccgcugagcugcaccaagaacaacucccaccacuacauccgggugggcaacgagaccggccucgagcugacgcugaccaacaccagcaucaucaaccacaaguucugcaaccucuccgacgcccacaagaagaaccuguacgaccacgcccugaugagcaucaucuccaccuuccaccucagcauccccaacuucaaccaguacgaggccauguccugcgacuucaacgggggcaagaucagcguccaguacaaccugucccacagcuacgccggggacgcggccaaccacugcggcacgguggccaacggggugcugcagaccuucaugcgcauggccuggggcggcuccuacaucgcgcucgacagcgggcggggcaacugggacugcaucaugaccuccuaccaguaccugaucauccagaacaccacgugggacgaccacugccaguucagccgccccucccccaucggguaccugggccuccugagccagcggacccgcgacgucuacaucucccggcgccugcucggcaccuucaccuggacgcugagcgacagcgaggggaaggacaccccgggcggguacugccugacccgguggaugcucaucgaggccgagcugaagugcuucggcaacaccgccguggccaagugcaacgagaagcacgacgaggaguucugcgacaugcugcgccucuucgacuucugcaagcaggccauccagcggcugaaggcggaggcccagauguccauccagcugaucaacaaggccgugaacgcccucaucaacgaccagcugaucaugaagaaccaccuccgcgacaucauggggauccccuacugcaacuacagcaaguacugcuaccugaacaacacggccaccggcaagaccucccugcccaagugcugccugaucagcaacggcuccuaccucaacgagacccacuucagcgacgacaucgagcaggaggcggacaacaugaucacggagaugcugcagaaggaguacauggagcggcaggggaagacgccccugggccuggucgaccucuucguguucuccaccagcuucuaccugaucuccaucuuccugcaccucgugaagaucccgacccaccgccacaucgucggcaagagcugccccaagccccaccggcugaaccacauggggaucugcuccugcgggcuguacaagcagcccggcgugccggugcgcuggaagcggugaggacuagucccuguucccagagcccacuuuuuuuucuuuuuuugaaauaaaauagccugucuuucagaucuaaaaaaaaaaaaaaaaaaaaaaaaaaaaaaaaaaaaaaaaaaaaaaaaaaaaaaaaaaaaaaaaaaaaaaaaaaaaaaaaaaaaaaaaaaaaaaaaaaaa

SEQ ID NO: 40381 - RNA, 1724 nt, Artificial Sequence
  mRNA product Design a-1 (A100) comprising derived and/or modified sequence from LASV(G3010-SLE-2013;Clade IV)__AIT17344__GPCmut12 (opt1)
aggagagucccgcagucggcguccagcggcucugcuuguucgugugugugucguugcaggccuuauucaagcuuaccaugggccagaucgugaccuucuuccaggaggucccccacgugaucgaggaggugaugaacaucguccugaucgcccucagcauccuggccgugcugaaggggcucuacaacuucgcgaccugcggccugguggggcuggucacguuccuccugcugugcggccgcuccugcaccaccagccucuacaaggggguguacgagcugcagacccuggagcucaacauggagacgcugaacaugugcaugccgcuguccugcaccaagaacaacagccaccacuacaucauggugggcaacgagaccggccucgagcugacccugacgaacaccuccaucaucaaccacaaguucugcaaccucagcgacgcccacaagaagaaccuguacaaccacgcccugauguccaucaucagcaccuuccaccucuccauccccaacuucaaccaguacgaggccaugagcugcgacuucaacgggggcaagaucuccguccaguacaaccugagccacuccuacgccggggacgcggccagccacugcggcaccguggccaacggggugcugcagacguucaugcggauggccuggggcggcuccuacaucgcgcucgacagcggguacggcaagugggacugcaucaugaccuccuaccaguaccugaucauccagaacaccaccugggaggaccacugccaguucagccgccccucccccaucggguaccugggccuccugagccagcggacgcgcgacaucuacaucagccggcgccugcucggcaccuucaccuggacccuguccgacagcgaggggaaggacacgccgggcggguacugccugacccgguggaugcucaucgaggccgagcugaagugcuucggcaacaccgccgucgccaagugcaacgagaagcacgacgaggaguucugcgacaugcugcgccucuucgacuucugcaagcaggccauccagcggcugaagaccgaggcgcagauguccauccagcugaucaacaaggccgugaacgcccucaucaacgaccagcugaucaugaagaaccaccuccgcgacaucauggggauccccuacugcaacuacagcaaguacugcuaccugaaccacacgaccaccggcaagaccucccugcccaagugcugccuggugagcaacggcuccuaccucaacgagacgcacuucagcgacgacaucgagcagcaggccgacaacaugaucaccgagaugcugcagaaggaguacauggagcggcaggggaagacgccccugggccuggucgaccucuucguguucuccaccagcuucuaccugaucuccaucuuccugcaccucgugaagaucccgacccaccgccacaucgucggcaagagcugccccaagccccaccggcugaaccacauggggaucugcuccugcgggcuguacaagcagcccggcgugccggugcgcuggaagcggugaggacuagucccuguucccagagcccacuuuuuuuucuuuuuuugaaauaaaauagccugucuuucagaucuaaaaaaaaaaaaaaaaaaaaaaaaaaaaaaaaaaaaaaaaaaaaaaaaaaaaaaaaaaaaaaaaaaaaaaaaaaaaaaaaaaaaaaaaaaaaaaaaaaaa

SEQ ID NO: 40382 - RNA, 1724 nt, Artificial Sequence
  mRNA product Design a-1 (A100) comprising derived and/or modified sequence from LASV(G502-SLE-2009;Clade IV)__AIT17126__GPCmut12 (opt1)
aggagagucccgcagucggcguccagcggcucugcuuguucgugugugugucguugcaggccuuauucaagcuuaccaugggccagaucgugaccuucuuccaggaggucccccacgugaucgaggaggugaugaacaucguccugaucgcccucagcauccuggccgugcugaaggggcucuacaacuucgcgaccugcggccugguggggcugcucacguuccugcugcucugcggccgcuccugcaccaccgggcuguacaagggcgucuacgagcugcagacccucgagcugaacauggagacgcugaacaugugcaugccgcucagcugcaccaagaacaacucccaccacuacaucauggugggcaacgagaccgggcuggagcugacccucacgaacaccagcaucaucaaccacaaguucugcaaccuguccgacgcccacaagaagaaccuguacgaccacgcccucaugagcaucaucuccaccuuccaccugagcauccccaacuucaaccaguacgaggccauguccugcgacuucaacggcgggaagaucagcgugcaguacaaccugucccacagcuacgccggcgacgcggccgaccacugcgggaccgucgccaacggcgugcuccagacguucaugcggauggccuggggcggguccuacaucgcgcuggacagcggccgcgggcggugggacugcaucaugaccuccuaccaguaccugaucauccagaacaccaccugggaggaccacugccaguucagccgccccucccccaucggcuaccucggccugcugagccagcggacgcgcgacaucuacaucucccggcgccuccuggggaccuucaccuggacccugagcgacagcgagggcaaggacacgcccgggggcuacugccucacccgguggaugcugaucgaggccgagcugaagugcuucgggaacaccgccguggccaagugcaacgagaagcacgacgaggaguucugcgacaugcuccgccuguucgacuucugcaagcaggccauccagcggcugaaggcggaggcccagauguccauccagcucaucaacaaggccgucaacgcccugaucaacgaccagcuggugaugaagaaccaccuccgcgacaucaugggcauccccuacugcaacuacagccgguacugcuaccugaaccacaccacgaccggccgcaccucccugcccaagugcugccucgugagcaacggguccuaccugaacgagacccacuucagcgacgacaucgagcagcaggccgacaacaugaucacggagaugcugcagaaggaguacauggagcggcagggcaagaccccgcuggggcucgucgaccuguucguguucuccaccagcuucuaccugaucuccaucuuccuccaccuggugaagaucccgacccaccgccacaucgucggcaagagcugccccaagccccaccggcugaaccacauggggaucugcuccugcggccucuacaagcagcccggcgugccggugaaguggaagcgcugaggacuagucccuguucccagagcccacuuuuuuuucuuuuuuugaaauaaaauagccugucuuucagaucuaaaaaaaaaaaaaaaaaaaaaaaaaaaaaaaaaaaaaaaaaaaaaaaaaaaaaaaaaaaaaaaaaaaaaaaaaaaaaaaaaaaaaaaaaaaaaaaaaaaa

SEQ ID NO: 40383 - RNA, 1724 nt, Artificial Sequence
  mRNA product Design a-1 (A100) comprising derived and/or modified sequence from LASV(G733-SLE-2010;Clade IV)__AIT17154__GPCmut12 (opt1)
aggagagucccgcagucggcguccagcggcucugcuuguucgugugugugucguugcaggccuuauucaagcuuaccaugggccagaucgugaccuucuuccaggaggucccccacgugaucgaggaggugaugaacaucguccugaucgcccucagcauccuggccgugcugaaggggcucuacaacuucgcgaccugcggcaucguggggcuggucuccuuccugcuccugugcggccgcagcugcacgaccucccuguacaaggggguguacgagcuccagacccuggagcugaacauggagacccucaacaugugcaugccgcugagcugcacgaagaacaacucccaccacuacaucauggugggcaacgagaccggccuggagcucacccugaccaacacgagcaucaucaaccacaaguucugcaaccuguccgacgcccacaagaagaaccucuacgaccacgcccugaugagcaucaucuccaccuuccaccugagcauccccaacuucaaccaguacgaggccauguccugcgacuucaacgggggcaagaucagcguccaguacaaccucucccacagcuacgccggggacgcggccaaccacugcggcaccaucgccaacggggugcugcagaccuucaugcggauggccuggggcggcuccuacaucgcgcuggacagcgggcgcgaccggugggacugcaucaugacguccuaccaguaccucaucauccagaacaccaccugggaggaccacugccaguucagccgccccucccccaucggcuaccuggggcugcucagccagcggacccgcgacaucuacaucagccggcgccugcugggcacguucaccuggacccucuccgacagcgagggcaaggacacccccgggggcuacugccugacgcgguggaugcugaucgaggccgagcucaagugcuucgggaacaccgccguggccaagugcaacgagaagcacgacgaggaguucugcgacaugcugcgccuguucgacuucugcaagcaggccauccagcggcucaaggcggaggcccagauguccauccagcugaucaacaaggccgucaacgcccugaucaacgaccagcucaucaugaagaaccaccuccgcgacaucaugggcaucccguacugcaacuacagcaaguacugcuaccugaaccacaccaccacggggaagaccucccugcccaagugcugccuggugagcaacggcuccuaccugaacgagacccacuucagcgacgacaucgagcagcaggccgacaacaugaucaccgagaugcuccagaaggaguacauggagcggcagggcaagacgccccuggggcugguggaccuguucgucuucuccaccagcuucuaccucaucuccaucuuccugcaccuggugaagaucccgacccaccgccacguggucggcaagagcugccccaagccccaccggcucaaccacauggggaucugcuccugcggccuguacgggcagcccggcgugccggugaaguggaagcgcugaggacuagucccuguucccagagcccacuuuuuuuucuuuuuuugaaauaaaauagccugucuuucagaucuaaaaaaaaaaaaaaaaaaaaaaaaaaaaaaaaaaaaaaaaaaaaaaaaaaaaaaaaaaaaaaaaaaaaaaaaaaaaaaaaaaaaaaaaaaaaaaaaaaaa

SEQ ID NO: 40384 - RNA, 1724 nt, Artificial Sequence
  mRNA product Design a-1 (A100) comprising derived and/or modified sequence from MOPV/LASV reassortant(IGS-1;Clade IV)__AFY05576__GPCmut12 (opt1)
aggagagucccgcagucggcguccagcggcucugcuuguucgugugugugucguugcaggccuuauucaagcuuaccaugggccagaucgugaccuucuuccaggaggucccccacgugaucgaggaggugaugaacaucguccugaucgcccucagcgugcuggccgugcugaaggggcucuacaacuucgcgaccugcggccuggucgggcuggugaccuuccuccugcugugcggccgcuccugcaccaccagccucuacaaggggguguacgagcugcagacccuggagcucaacauggagacgcugaacaugugcaugccgcuguccugcaccaagaacaacagccaccacuacaucauggucggcaacgagaccggccucgagcugacccugacgaacaccuccaucaucaaccacaaguucugcaaccucagcgacgcccacaagaagaaccuguacgaccacgcccugauguccaucaucagcaccuuccaccucuccauccccaacuucaaccaguacgaggccaugagcugcgacuucaacgggggcaagaucuccgugcaguacaaccugagccacuccuacgccggggacgcggccaaccacugcggcaccguggccaacgggguccugcagacguucaugcggauggccuggggcggcagcuacaucgcgcucgacuccgggcgcggcaacugggacugcaucaugaccagcuaccaguaccugaucauccagaacaccaccugggaggaccacugccaguucucccggcccagccccaucggguaccugggccuccugucccagcgcacgcgggacaucuacaucagccgccggcugcucggcaccuucaccuggacccugagcgacuccgagggggaggacacgccgggcggguacugccugacccgcuggaugcucaucgaggccgagcugaagugcuucggcaacaccgccguggccaagugcaacgagaagcacgacgaggaguucugcgacaugcugcggcuguucgacuucugcaagcaggccauccagcgccugaaggcggaggcccagaugagcauccagcugaucaacaaggccgugaacgcccucaucaacgaccagcugaucaugaagaaccaccuccgggacaucauggggauccccuacugcaacuacuccaaguacugcuaccucaaccacaccacgaccggccgcaccagccugcccaagugcugccuggucuccaacggcagcuaccucaacgagacccacuucuccgacgacaucgagcagcaggccgacaacaugaucacggagaugcugcagaaggaguacauggagcggcaggggaagacgccccugggccugguggaccucuucguguucagcaccuccuucuaccugaucagcaucuuccugcaccucgucaagaucccgacccaccgccacaucguggggaaguccugccccaagccccaccggcugaaccacaugggcaucugcagcugcgggcuguacaagcagcccggcgugccggucaaguggaagcgcugaggacuagucccuguucccagagcccacuuuuuuuucuuuuuuugaaauaaaauagccugucuuucagaucuaaaaaaaaaaaaaaaaaaaaaaaaaaaaaaaaaaaaaaaaaaaaaaaaaaaaaaaaaaaaaaaaaaaaaaaaaaaaaaaaaaaaaaaaaaaaaaaaaaaa

SEQ ID NO: 40385 - RNA, 1724 nt, Artificial Sequence
  mRNA product Design a-1 (A100) comprising derived and/or modified sequence from LASV(LM765-SLE-2012;Clade IV)__AIT17814__GPCmut12 (opt1)
aggagagucccgcagucggcguccagcggcucugcuuguucgugugugugucguugcaggccuuauucaagcuuaccaugggccagaucgugaccuucuuccaggaggucccccacgugaucgaggaggugaugaacaucguccugaucgcccucagcauccuggccgugcugaaggggcucuacaacuucgcgaccugcggccugguggggcuggucacguuccuccugcugugcggccgcuccugcaccaccagccucuacaaggggguguacgagcugcagacccuggagcucaacauggagacgcugaacaugugcaugccgcuguccugcaccaagaacaacagccaccacuacaucauggugggcaacgagaccggccucgagcugacccugacgaacaccuccaucaucgaccacaaguucugcaaccucagcgacgcccaccggaagaaccuguacgaccacgcccugauguccaucaucagcaccuuccaccucuccauccccaacuucaaccaguacgaggccaugagcugcgacuucaacgggggcaagaucuccguccaguacaaccugagccacuccuacgccaaggacgcggccgaccacugcgggaccguggccaacggcgugcugcagacguucaugcgcauggccuggggcgggagcuacaucgcgcucgacuccggccgggggcgcugggacugcaucaugaccagcuaccaguaccugaucauccagaacaccaccugggaggaccacugccaguucucccggcccagccccaucggcuaccuggggcuccugucccagcgcacgcgggacaucuacaucagccgccggcugcucggcaccuucaccuggacccugagcgacuccgagggcaaggacacgcccgggggcuacugccugacccgcuggaugcucaucgaggccgagcugaagugcuucgggaacaccgccgucgccaagugcaacgagaagcacgacgaggaguucugcgacaugcugcggcuguucgacuucugcaagcaggccauccagcgccugaaggcggaggcccagaugagcauccagcugaucaacaaggccgugaacgcccucaucaacgaccagcugaucaugaagaaccaccuccgggacaucaugggcauccccuacugcaacuacuccaaguacugcuaccucaaccacaccacgaccgggaagaccagccugcccaagugcugccugguguccaacggcagcuaccucaacgagacccacuucuccgacgacaucgagcagcaggccgacaacaugaucacggagaugcugcagaaggaguacauggagcgccagggcaagaccccgcuggggcuggucgaccucuucguguucagcaccuccuucuaccugaucagcaucuuccugcaccucgugaagaucccgacccaccggcacaucgucggcaagcccugccccaagccccaccgccugaaccacauggggaucugcuccugcggccuguacaagcagccgggggugcccgugaaguggaagcggugaggacuagucccuguucccagagcccacuuuuuuuucuuuuuuugaaauaaaauagccugucuuucagaucuaaaaaaaaaaaaaaaaaaaaaaaaaaaaaaaaaaaaaaaaaaaaaaaaaaaaaaaaaaaaaaaaaaaaaaaaaaaaaaaaaaaaaaaaaaaaaaaaaaaa

SEQ ID NO: 40386 - RNA, 1724 nt, Artificial Sequence
  mRNA product Design a-1 (A100) comprising derived and/or modified sequence from LASV(LM776-SLE-2012;Clade IV)__AIT17824__GPCmut12 (opt1)
aggagagucccgcagucggcguccagcggcucugcuuguucgugugugugucguugcaggccuuauucaagcuuaccaugggccagaucgugaccuucuuccaggaggucccccacgugaucgaggaggugaugaacaucguccugaucgcccucagcauccuggccgugcugaaggggcucuacaacuucgcgaccugcggccugguggggcuggucaccuuccuccugcugugcggccgcuccugcaccaccagcguguacaaggggguguacgagcuccagacccuggagcugaacauggagacgcucaacaugugcaugccgcuguccugcaccaagaacaacagccaccacuacaucauggucggcaacgagaccggccuggagcucacccugacgaacaccuccaucaucaaccacaaguucugcaaccugagcgacgcccacaagaagaaccucuacgaccacgcccugauguccaucaucagcaccuuccaccuguccauccccaacuucaaccaguacgaggccaugagcugcgacuucaacgggggcaagaucuccgugcaguacaaccucagccacuccuacgccggggacgcggccaaccacugcggcaccguggccaacgggguccugcagacguucaugcggauggccuggggcggcagcuacaucgcgcuggacuccgggcacggcaagugggacugcaucaugaccagcuaccaguaccucaucauccagaacaccaccugggaggaccacugccaguucucccgccccagccccaucggguaccugggccugcucucccagcggacgcgcgacaucuacaucagccggcgccugcugggcaccuucaccuggacccucagcgacuccgaggggaaggacacgccgggcggguacugccugacccgguggaugcugaucgaggccgagcucaagugcuucggcaacaccgccguggccaagugcaacgagaagcacgacgaggaguucugcgacaugcugcgccuguucgacuucugcaagcaggccauccagcggcucaaggcggaggcccagaugagcauccagcugaucaacaaggccgugaacgcccugaucaacgaccagcucaucaugaagaaccaccuccgcgacaucauggggauccccuacugcaacuacuccaaguacugcuaccugaaccacaccacgaccggcaagaccagccugcccaagugcugccuggucuccaacggcagcuaccugaacgagacccacuucuccgacgacaucgagcagcaggccgacaacaugaucacggagaugcuccagaaggaguacauggagcggcaggggaagacgccccugggccugguggaccuguucguguucagcaccuccuucuaccucaucagcaucuuccugcaccuggucaagaucccgacccaccgccacaucguggggaaguccugccccaagccccaccggcucaaccacaugggcaucugcagcugcgggcuguacaagcagcccggcgugccgguccgcuggaagcggugaggacuagucccuguucccagagcccacuuuuuuuucuuuuuuugaaauaaaauagccugucuuucagaucuaaaaaaaaaaaaaaaaaaaaaaaaaaaaaaaaaaaaaaaaaaaaaaaaaaaaaaaaaaaaaaaaaaaaaaaaaaaaaaaaaaaaaaaaaaaaaaaaaaaa

SEQ ID NO: 40387 - RNA, 1724 nt, Artificial Sequence
  mRNA product Design a-1 (A100) comprising derived and/or modified sequence from LASV(Mad39;Clade IV)__ANH09722__GPCmut12 (opt1)
aggagagucccgcagucggcguccagcggcucugcuuguucgugugugugucguugcaggccuuauucaagcuuaccaugggccagaucgugaccuucuuccaggaggucccccacgugaucgaggaggugaugaacaucguccugaucgcccucagcauccuggccgugcugaaggggcucuacaacguggcgaccugcggccugaucgggcuggucacguuccuccugcugugcggccgcuccugcaccaccacccucuacaaggggguguacgagcugcaggcccuggagcucaacauggagacgcugaacaugugcaugccgcugagcugcaccaagaacaacucccaccacuacauccgggugggcaacgagaccggccucgagcugacccugacgaacaccagccucaucaaccacaaguucugcaaccuguccgacgcccacaagaagaaccuguacgaccacgcccucaugagcaucaucuccaccuuccaccugagcauccccaacuucaaccaguacgaggccauguccugcgacuucaacgacgggaagaucagcguccaguacaaccugucccacaccuacgcgggcgacacggccaaccacugcgggaccguggccaacggcgugcuccagaccuucaugcgcauggccuggggcgggagcuacaucgcgcuggacuccggccgcgggggcugggacugcaucaugaccagcuaccaguaccugaucauccagaacacgaccugggaggaccacugccaguucucccggcccagccccaucggguaccucggccugcugucccagcggacccgcgacaucuacaucagccggcgccuccugggcaccuucacguggacccuguccgacagcgaggggaaggacaccccgggcggguacugccucacccgguggaugcugaucgaggccgagcugaagugcuucggcaacacggccgucgccaagugcaacgagaagcacgacgaggaguucugcgacaugcuccgccuguucgacuucugcaagcaggccauccagcggcugaaggcggaggcccagaugagcauccagcucaucaacaaggccgugaacgcccugaucaacgaccagcugaucaugaagaaccaccuccgcgacaucauggggauccccuacugcaacuacuccaaguacugcuaccugaaccacaccgugaccggcaagaccagccugcccaagugcugccucgucuccaacggcagcuaccugaacgagacgcacuucuccgacgacaucgagcagcaggccgacaacaugaucaccgagaugcugcagaaggaguacauggagcggcaggggaagacgccccugggccucguggaccuguucguguucagcaccuccuucuaccugaucagcaucuuccuccaccuggucaagaucccgacccaccgccacgugguggggaagcccugccccaagccccaccggcugaaccacaugggcaucugcuccugcggguucuacaagcagccgggcguccccgugcgcuggaagcggugaggacuagucccuguucccagagcccacuuuuuuuucuuuuuuugaaauaaaauagccugucuuucagaucuaaaaaaaaaaaaaaaaaaaaaaaaaaaaaaaaaaaaaaaaaaaaaaaaaaaaaaaaaaaaaaaaaaaaaaaaaaaaaaaaaaaaaaaaaaaaaaaaaaaa

SEQ ID NO: 40388 - RNA, 1724 nt, Artificial Sequence
  mRNA product Design a-1 (A100) comprising derived and/or modified sequence from LASV(Z0947-SLE-2011;Clade IV)__AIT17840__GPCmut12 (opt1)
aggagagucccgcagucggcguccagcggcucugcuuguucgugugugugucguugcaggccuuauucaagcuuaccaugggccagaucgugaccuucuuccaggaggucccccacgugaucgaggaggugaugaacaucguccugaucgcccucagcauccuggccgugcugaaggggcucuacaacuucgcgaccugcggccugguggggcuggucacguuccuccugcugugcggccgcuccugcaccaucagccucuacaaggggguguacgagcugcagacccuggagcucaacauggagacccugaacaugugcaugccgcuguccugcacgaagaacaacagccaccacuacaucauggugggcaacgagaccggccucgagcugacccugaccaacacguccaucaucaaccacaaguucugcaaccucagcgacgcccacaagaagaaccuguacgaccacgcccugauguccaucaucagcaccuuccaccucuccauccccaacuucaaccaguacgaggccaugagcugcgacuucaacgggggcaagaucuccguccaguacaaccugagccacuccuacgccggggacgcggccaaccacugcggcaccguggccaacggggugcugcagaccuucaugcggauggccuggggcggcagcuacaucgcgcucgacuccgggcgcgaccggugggacugcaucaugacgagcuaccaguaccugaucauccagaacaccaccugggaggaccacugccaguucucccgccccagccccaucggcuaccuggggcuccugucccagcggacccgcgacaucuacaucagccggcgccugcucggcacguucaccuggacccugagcgacuccgagggcaaggacacccccgggggcuacugccugacgcgguggaugcucaucgaggccgagcugaagugcuucgggaacaccgccgucgccaagugcaacgagaagcacgacgaggaguucugcgacaugcugcgccucuucgacuucugcaagcaggccauccagcggcugaaggcggaggcccagaugagcauccagcugaucaacaaggccgugaacgcccucaucaacgaccagcugaucaugaagaaccaccuccgcgacaucaugggcaucccguacugcaacuacuccaaguacugcuaccugaaccacaccaccacggggaagaccagccugcccaagugcugccugguguccaacggcagcuaccucaacgagacccacuucuccgacgacaucgagcagcaggccgacaacaugaucaccgagaugcugcagaaggaguacauggagcggcagggcaagacgccccuggggcuggucgaccucuucguguucagcaccuccuucuaccugaucagcaucuuccugcaccucgugaagaucccgacccaccgccacaucgucggcaagcccugccccaagccccaccggcugaaccacauggggaucugcuccugcggccuguacaagcagccgggggugcccgugaaguggaagcgcugaggacuagucccuguucccagagcccacuuuuuuuucuuuuuuugaaauaaaauagccugucuuucagaucuaaaaaaaaaaaaaaaaaaaaaaaaaaaaaaaaaaaaaaaaaaaaaaaaaaaaaaaaaaaaaaaaaaaaaaaaaaaaaaaaaaaaaaaaaaaaaaaaaaaa

SEQ ID NO: 40389 - RNA, 1724 nt, Artificial Sequence
  mRNA product Design a-1 (A100) comprising derived and/or modified sequence from LASV(Josiah;Clade IV)__NP_694870__GPCmut12 (opt4)
aggagagucccgcagucggcguccagcggcucugcuuguucgugugugugucguugcaggccuuauucaagcuuaccaugggccagaucgugaccuucuuccaggaggugccccacgugaucgaggaggugaugaacaucgugcugaucgcccugagcgugcuggccgugcugaagggccuguacaacuucgccaccugcggccuggugggccuggugaccuuccugcugcugugcggcagaagcugcaccaccagccuguacaagggcguguacgagcugcagacccuggagcugaacauggagacccugaacaugugcaugccccugagcugcaccaagaacaacagccaccacuacaucauggugggcaacgagaccggccuggagcugacccugaccaacaccagcaucaucaaccacaaguucugcaaccugagcgacgcccacaagaagaaccuguacgaccacgcccugaugagcaucaucagcaccuuccaccugagcauccccaacuucaaccaguacgaggccaugagcugcgacuucaacggcggcaagaucagcgugcaguacaaccugagccacagcuacgccggcgacgccgccaaccacugcggcaccguggccaacggcgugcugcagaccuucaugagaauggccuggggcggcagcuacaucgcccuggacagcggcagaggcaacugggacugcaucaugaccagcuaccaguaccugaucauccagaacaccaccugggaggaccacugccaguucagcagacccagccccaucggcuaccugggccugcugagccagagaaccagagacaucuacaucagcagaagacugcugggcaccuucaccuggacccugagcgacagcgagggcaaggacacccccggcggcuacugccugaccagauggaugcugaucgaggccgagcugaagugcuucggcaacaccgccguggccaagugcaacgagaagcacgacgaggaguucugcgacaugcugagacuguucgacuucugcaagcaggccauccagagacugaaggccgaggcccagaugagcauccagcugaucaacaaggccgugaacgcccugaucaacgaccagcugaucaugaagaaccaccugagagacaucaugggcauccccuacugcaacuacagcaaguacugcuaccugaaccacaccaccaccggcagaaccagccugcccaagugcugccuggugagcaacggcagcuaccugaacgagacccacuucagcgacgacaucgagcagcaggccgacaacaugaucaccgagaugcugcagaaggaguacauggagagacagggcaagaccccccugggccugguggaccuguucguguucagcaccagcuucuaccugaucagcaucuuccugcaccuggugaagauccccacccacagacacaucgugggcaagagcugccccaagccccacagacugaaccacaugggcaucugcagcugcggccuguacaagcagcccggcgugcccgugaaguggaagagaugaggacuagucccuguucccagagcccacuuuuuuuucuuuuuuugaaauaaaauagccugucuuucagaucuaaaaaaaaaaaaaaaaaaaaaaaaaaaaaaaaaaaaaaaaaaaaaaaaaaaaaaaaaaaaaaaaaaaaaaaaaaaaaaaaaaaaaaaaaaaaaaaaaaaa

SEQ ID NO: 40390 - RNA, 1721 nt, Artificial Sequence
  mRNA product Design a-1 (A100) comprising derived and/or modified sequence from LASV(LP;Clade I)__AAF86701__GPCmut12 (opt4)
aggagagucccgcagucggcguccagcggcucugcuuguucgugugugugucguugcaggccuuauucaagcuuaccaugggccagaucaucaccuucuuccaggaggugccccacgugaucgaggaggugaugaacaucgugcugaucgcccugagccugcuggccauccugaagggccuguacaacaucgccaccugcggcaucaucggccugguggccuuccuguuccugugcggcaagagcugcagccugacccugaagggcggcuacgagcugcagacccuggagcugaacauggagacccugaacaugugcaugccccugagcugcaccaagaacagcagccaccacuacaucagagugggcaacgagaccggccuggagcugacccugaccaacaccagcaucaucaaccacaaguucugcaaccugagcgacgcccacaagaagaaccuguacgaccacgcccugaugagcaucaucagcaccuuccaccugagcauccccaacuucaaccaguacgaggccaugagcugcgacuucaacggcggcaagaucagcgugcaguacaaccugagccacagcuacgccggcgacgccgccgagcacugcggcaccguggccaacggcgugcugcagaccuucaugagaauggccuggggcggcagauacaucgcccuggacagcggcaagggcaacugggacugcaucaugaccagcuaccaguaccugaucauccagaacaccaccugggaggaccacugccaguucagcagacccagccccaucggcuaccugggccugcugagccagagaaccagagacaucuacaucagcagaagacugcugggcaccuucaccuggacccugagcgacagcgagggcaacgagacccccggcggcuacugccugaccagauggaugcugaucgaggccgagcugaagugcuucggcaacaccgccguggccaagugcaacgagaagcacgacgaggaguucugcgacaugcugagacuguucgacuucugcaagcaggccaucagaagacugaaggccgaggcccagaugagcauccagcugaucaacaaggccgugaacgcccugaucaacgaccagcugaucaugaagaaccaccugagagacaucaugggcauccccuacugcaacuacagcaaguacugcuaccugaaccacaccagcagcggcagaaccagccugcccaagugcugccugaucagcaacggcagcuaccugaacgagacccaguucagcgacgacaucgagcagcaggccgacaacaugaucaccgagaugcugcagaaggaguacaucgagagacagggcaagaccccccugggccugguggacaucuucaucuucagcaccagcuucuaccugaucagcaucuuccugcaccugaucaagauccccacccacagacacaucgugggcaagcccugccccaagccccacagacugaaccacaugggcgugugcagcugcggccuguacaagcaccccggcgugcccaccaaguggaagagaugaggacuagucccuguucccagagcccacuuuuuuuucuuuuuuugaaauaaaauagccugucuuucagaucuaaaaaaaaaaaaaaaaaaaaaaaaaaaaaaaaaaaaaaaaaaaaaaaaaaaaaaaaaaaaaaaaaaaaaaaaaaaaaaaaaaaaaaaaaaaaaaaaaaaa

SEQ ID NO: 40391 - RNA, 1721 nt, Artificial Sequence
  mRNA product Design a-1 (A100) comprising derived and/or modified sequence from LASV(803213;Clade II)__AAF86703__GPCmut12 (opt4)
aggagagucccgcagucggcguccagcggcucugcuuguucgugugugugucguugcaggccuuauucaagcuuaccaugggccagaucaucaccuucuuccaggaggugccccacgugaucgaggaggugaugaacaucgugcugaucgcccugagccugcuggccauccugaagggcaucuacaacguggccaccugcggccuguucggccugaucagcuuccugcugcugugcggcagaagcugcagcgugaccuacaagggcguguacgagcugcagacccuggagcugaacauggccaaccugaacaugugcaugccccugagcugcaccaagaacaacagccaccacuacaucauggugggcaacgagaccggccuggagcugacccugaccaacaccagcaucaucaaccacaaguucugcaaccugagcgacgcccacaagaagaaccuguacgaccacgcccugaugagcaucaucagcaccuuccaccugagcauccccaacuucaaccaguacgaggccaugagcugcgacuucaacggcggcaagaucagcgugcaguacaaccugagccacagcuucgccguggacgccgccaaccacugcggcaccaucgccaacggcgugcugcagaccuucaugagaauggccuggggcggcagcuacaucgcccuggacagcggcaagggcaacugggacugcaucaugaccagcuaccaguaccugaucauccagaacaccaccugggaggaccacugccaguucagcagacccagccccaucggcuaccugggccugcugagccagagaaccagagacaucuacaucagcagaagacugcugggcaccuucaccuggacccugagcgacagcgagggcaacgaggcccccggcggcuacugccugaccagauggaugcugaucgaggccgagcugaagugcuucggcaacaccgccguggccaagugcaacgagaagcacgacgaggaguucugcgacaugcugagacuguucgacuucugcaagcaggccaucaagagacugaagaccgaggcccagaugagcauccagcugaucaacaaggccgugaacgcccugaucaacgaccagcugaucaugaagaaccaccugagagacaucaugggcauccccuacugcaacuacagcagauacugcuaccugaaccacaccgugaccggcaagaccagccugcccagaugcugccuggugagcaacggcagcuaccugaacgagacccacuucagcgacgacaucgagcagcaggccgacaacaugaucaccgagaugcugcagaaggaguacauggacagacagggcaagaccccccugggccugguggaccuguucguguucagcaccagcuucuaccugaucagcaucuuccugcaccuggugaagauccccacccacagacacaucgugggcaagcccugccccaagccccacagacugaaccacaugggcaucugcagcugcggccuguacaagcaccccggcgugcccgugaaguggaagagaugaggacuagucccuguucccagagcccacuuuuuuuucuuuuuuugaaauaaaauagccugucuuucagaucuaaaaaaaaaaaaaaaaaaaaaaaaaaaaaaaaaaaaaaaaaaaaaaaaaaaaaaaaaaaaaaaaaaaaaaaaaaaaaaaaaaaaaaaaaaaaaaaaaaaa

SEQ ID NO: 40392 - RNA, 1721 nt, Artificial Sequence
  mRNA product Design a-1 (A100) comprising derived and/or modified sequence from LASV(GA391;Clade III)__CAA36645__GPCmut12 (opt4)
aggagagucccgcagucggcguccagcggcucugcuuguucgugugugugucguugcaggccuuauucaagcuuaccaugggccagaucgugaccuucuuccaggaggugccccacgugaucgaggaggugaugaacaucgugcugaucgcccugagcauccuggccauccugaagggccuguacaacguggccaccugcggccugaucggccuggugaccuuccugcugcugagcggcagaagcugcagccugaucuacaagggcaccuacgagcugcagacccuggagcugaacauggagacccugaacaugugcaugccccugagcugcaccaagaacaacagccaccacuacaucagagugggcaacgagaccggccuggagcugacccugaccaacaccagcauccugaaccacaaguucugcaaccugagcgacgcccacaagagaaaccuguacgaccacagccugaugagcaucaucagcaccuuccaccugagcauccccaacuucaaccaguacgaggccaugagcugcgacuucaacggcggcaagaucaccgugcaguacaaccugagccacagcuucgccguggacgccgccggccacugcggcacccuggccaacggcgugcugcagaccuucaugagaauggccuggggcggcagcuacaucgcccuggacagcggcagaggcaacugggacugcaucaugaccagcuaccaguaccugaucauccagaacaccaccugggacgaccacugccaguucagcagacccagccccaucggcuaccugggccugcugagccagagaaccagagacaucuacaucagcagaagacugcugggcaccuucaccuggacccugagcgacagcgagggcaacgagacccccggcggcuacugccugaccagauggaugcugaucgaggccgagcugaagugcuucggcaacaccgccguggccaagugcaacgagaagcacgacgaggaguucugcgacaugcugagacuguucgacuucugcaagcaggccaucagaagacugaagaccgaggcccagaugagcauccagcugaucaacaaggccgugaacgcccugaucaacgaccagcugaucaugaagaaccaccugagagacaucaugggcauccccuacugcaacuacagcagauacugcuaccugaaccacaccagcaccggcaagaccagccugcccagaugcugccugaucagcaacggcagcuaccugaacgagaccaaguucagcgacgacaucgagcagcaggccgacaacaugaucaccgagaugcugcagaaggaguacaucgacagacagggcaagaccccccugggccugguggaccuguucguguucagcaccagcuucuaccugaucagcaucuuccugcaccuggugaagauccccacccacagacacaucgugggcaagcccugccccaagccccacagacugaaccacaugggcaucugcagcugcggccuguacaagcagcccggcgugcccgugagauggaagagaugaggacuagucccuguucccagagcccacuuuuuuuucuuuuuuugaaauaaaauagccugucuuucagaucuaaaaaaaaaaaaaaaaaaaaaaaaaaaaaaaaaaaaaaaaaaaaaaaaaaaaaaaaaaaaaaaaaaaaaaaaaaaaaaaaaaaaaaaaaaaaaaaaaaaa

SEQ ID NO: 40393 - RNA, 1724 nt, Artificial Sequence
  mRNA product Design a-1 (A100) comprising derived and/or modified sequence from LASV(AV;Clade V)__CCA30314__GPCmut12 (opt4)
aggagagucccgcagucggcguccagcggcucugcuuguucgugugugugucguugcaggccuuauucaagcuuaccaugggccagaucgugaccuucuuccaggaggugccccacgugaucgaggaggugaugaacaucgugcugaucgcccugagcauccuggccgugcugaagggccuguacaacaucgccaccugcggccugaucggccugaucaccuuccugcugcugugcggcagaagcugcagcagcaaccuguacaagggcguguacgagcugcagagccuggaccugaacauggagacccugaacaugugcaugccccugagcugcaccaagaacaacagccaccacuacaucagagugggcaacgacaccggccuggagcugacccugaccaacaccagcauccugaaccacaaguucugcaaccugagcgacgcccacaagaaggaccuguacgaccacgcccugaugagcaucaucagcaccuuccaccugagcauccccaacuucaaccaguacgaggccaugagcugcgacuucaacggcggcaagaucagcgugcaguacaaccugagccacagcuacgccaucgacgccgccaaccacugcggcaccguggccaacggcauccugcagaccuucaugagaauggccuggggcggcagcuacaucgcccuggacagcggcagaggcaacugggacugcaucaugaccagcuaccaguaccugaucauccagaacaccaccugggagaaccacugccaguucagcagacccagccccaucggcuaccugggccugcugagccagagaaccagagacaucuacaucagcagaagacugcugggcaccuucaccuggacccugagcgacagcgagggcaacgccacccccggcggcuacugccugaccagauggaugcugaucgaggccgagcugaagugcuucggcaacaccgccguggccaagugcaacgagaagcacgacgaggaguucugcgacaugcugagacuguucgacuucugcaagcaggccaucagcagacugaagagcgaggcccagaugagcauccagcugaucaacaaggccgugaacgcccugaucaacgaccagcugaucaugaagaaccaccugagagacaucaugggcauccccuacugcaacuacagcaaguacugcuaccugaaccacaccaucaccggcaagaccagccugcccaagugcugccuggugagcaacggcagcuaccugaacgagacccacuucagcgacgacaucgagcagcaggccgacaacaugaucaccgagaugcugcagaaggaguacauggagagacagggcaagaccccccugggccugguggaccuguucguguucagcaccagcuucuaccugaucagcaucuuccugagacuggugaagauccccacccacagacacaucgugggcaagcccugccccaagccccacagacugaaccacaugggcaucugcagcugcggccuguacaagcagcccggcgugcccgugagauggaagagaugaggacuagucccuguucccagagcccacuuuuuuuucuuuuuuugaaauaaaauagccugucuuucagaucuaaaaaaaaaaaaaaaaaaaaaaaaaaaaaaaaaaaaaaaaaaaaaaaaaaaaaaaaaaaaaaaaaaaaaaaaaaaaaaaaaaaaaaaaaaaaaaaaaaaa

SEQ ID NO: 40394 - RNA, 1721 nt, Artificial Sequence
  mRNA product Design a-1 (A100) comprising derived and/or modified sequence from LASV(Togo/2016/7082;Clade VI)__AMR44577__GPCmut12 (opt4)
aggagagucccgcagucggcguccagcggcucugcuuguucgugugugugucguugcaggccuuauucaagcuuaccaugggccagaucaucaccuucuuccaggaggugccccacgugaucgaggaggugaugaacaucgugcugaucgcccugagccugcuggccauccugaagggcguguacaacguggccaccugcggcaucaucggccuggugaccuuccuguuccugugcggcagaagcugcagccugaucuacaagggcagcuacgagcugcagacccuggagcugaacauggagacccugaacaugugcaugccccugagcugcaccaagaacagcagccaccacuacaucagagugggcaacgagaccggccuggagcugacccugaccaacaccagcaucaucaaccacaaguucugcaaccugagcgacgcccacaagagaaaccuguacgaccacgcccugaugagcauccugagcaccuuccaccugagcauccccaacuucaaccaguacgaggccaugagcugcgacuucaacggcggcaagaucagcgugcaguacaaccugagccacgccuacgccguggacgccgccgagcacugcggcaccguggccaacggcgugcugcagaccuucaugagaauggccuggggcggcagcuacaucgcccuggacagcggcagaggcaacugggacugcaucaugaccagcuaccaguaccugaucauccagaacaccaccugggaggaccacugccaguucagcagacccagccccaucggcuaccugggccugcugagccagagaaccagagacaucuacaucagcagaagacugcugggcaccuucaccuggacccugagcgacagcgagggcaacgagacccccggcggcuacugccugaccagauggaugcugaucgaggccgagcugaagugcuucggcaacaccgccguggccaagugcaacgagaagcacgacgaggaguucugcgacaugcugagacuguucgacuucugcaagcaggccauccagagacugaagagcgaggcccagaugagcauccagcugaucaacaaggccgugaacgcccugaucaacgaccagcugaucaugaagaaccaccugagagacaugaugggcauccccuacugcaacuacagcaaguacugcuaccugaaccacaccagcagcggcagaaccagccugcccaagugcugccuggugagcaacggcagcuaccugaacgagacccacuucagcgacgacaucgagcagcaggccgacaacaugaucaccgagaugcugcagaaggaguacaucgacagacagggcaagaccccccugggccugguggaccuguucguguucagcaccagcuucuaccugaucagcaucuuccugcaccugaucaagauccccacccacagacacaucgugggcaagcccugccccaagccccacagacugaaccacaugggcaucugcagcugcggccuguacaagcagcccggcgugcccaccagauggaagagaugaggacuagucccuguucccagagcccacuuuuuuuucuuuuuuugaaauaaaauagccugucuuucagaucuaaaaaaaaaaaaaaaaaaaaaaaaaaaaaaaaaaaaaaaaaaaaaaaaaaaaaaaaaaaaaaaaaaaaaaaaaaaaaaaaaaaaaaaaaaaaaaaaaaaa

SEQ ID NO: 40395 - RNA, 1721 nt, Artificial Sequence
  mRNA product Design a-1 (A100) comprising derived and/or modified sequence from LASV(KAK-428;Clade n.d. (VII))__ANH09740__GPCmut12 (opt4)
aggagagucccgcagucggcguccagcggcucugcuuguucgugugugugucguugcaggccuuauucaagcuuaccaugggccagaucgugaccuucuuccaggaggugccccacgugaucgaggaggugaugaacaucgugcugaucgcccugagccugcuggccauccugaagggccuguacaacuucgccaccugcggcgugaucggccugaucaccuuccugcugcugugcggcagaagcugcagcgccaccuacaagggccaguacgagcugcagacccuggagcugaacauggagagccugaacaugugcaugccccugagcugcaccaagaacaacagccaccacuacaucagagccggcaacaacaccggccuggagcugacccugaccaacaccagcaucaucagccacaaguucugcaaccugagcgacgcccacaagaagaaccuguacgaccacacccugaugagcaucaucaccaccuuccaccugagcauccccaacuucaaccaguacgaggccaugagcugcgacuucaacggcggcaagaucagcauccaguacaaccugagccacagcuacgccggcgacgccgcccagcacugcggcaccguggccaacggcgugcugcagaccuucaugagaauggccuggggcggcagcuaccuggcccuggacagcggcagaagaggcugggacugcaucaucagcagcuaccaguaccugaucauccagaacaccaccugggacgaccacugccaguucagcagacccagccccaucggcuaccugggcuucgugagccagaagaccagagacaucuacaucagcagaagacugcugggcaccuucaccuggacccugagcgacagcgagggccacgacaugcccggcggcuacugccugaccagauggaugcugaucgaggccgaccugaagugcuucggcaacaccgccguggccaagugcaacgagaagcacgacgaggaguucugcgacauguggagacuguucgacuucugcaagcaggccauccagagacugaaggccgaggcccagaugaacauccagcugaucaacaaggccgugaacgcccugaucaacgaccagcugaugaugaagaaccaccugagagacaucaugggcauccccuacugcaacuacagcaaguucugcuaccugaacaacaccaccaccggcagaaccagccugcccagaugcugccugaucagcaacggcagcuaccugaacgagacccacuucagcgacgacaucgagcagcaggccgacaacaugaucaccgagaugcugcagaaggaguacauggacagacagggcaagaccccccugggccugguggaccuguucguguucagcaccagcuucuaccugaucaccaucuuccugcaccuggugaagauccccacccacagacacaucgugggcaagcccugccccaagccccacagacugaaccacaugggcaucugcagcugcggccuguacaagcagcccggcgugcccgugagauggaagagaugaggacuagucccuguucccagagcccacuuuuuuuucuuuuuuugaaauaaaauagccugucuuucagaucuaaaaaaaaaaaaaaaaaaaaaaaaaaaaaaaaaaaaaaaaaaaaaaaaaaaaaaaaaaaaaaaaaaaaaaaaaaaaaaaaaaaaaaaaaaaaaaaaaaaa

SEQ ID NO: 40396 - RNA, 1721 nt, Artificial Sequence; identical to SEQ ID NO: 40390
  mRNA product Design a-1 (A100) comprising derived and/or modified sequence from LASV(Pinneo-NIG-1969;Clade I)__AIT17836__GPCmut12 (opt4)

SEQ ID NO: 40397 - RNA, 1721 nt, Artificial Sequence
  mRNA product Design a-1 (A100) comprising derived and/or modified sequence from LASV(ISTH0009-NIG-2011;Clade II)__AIT17404__GPCmut12 (opt4)
aggagagucccgcagucggcguccagcggcucugcuuguucgugugugugucguugcaggccuuauucaagcuuaccaugggccagaucaucaccuucuuccaggaggugccccacgugaucgaggaggugaugaacaucgugcugaucgcccugagccugcuggccauccugaagggcaucuacaacguggccaccugcggccuguucggccuggugagcuuccugcugcugugcggcagaagcugcagcaccaccuacaagggcguguacgagcugcagacccuggagcuggacauggccagccugaacaugugcaugccccugagcugcaccaagaacaacagccaccacuacaucauggugggcaacgagaccggccuggagcugacccugaccaacaccagcaucaucaaccacaaguucugcaaccugagcgacgcccacaagaagaaccuguacgaccacgcccugaugagcaucaucagcaccuuccaccugagcauccccaacuucaaccaguacgaggccaugagcugcgacuucaacggcggcaagaucagcgugcaguacaaccugagccacgccuacgccguggacgccgccaaccacugcggcaccaucgccaacggcgugcugcagaccuucaugagaauggccuggggcggcagcuacaucgcccuggacagcggcaagggcagcugggacugcaucaugaccagcuaccaguaccugaucauccagaacaccaccugggaggaccacugccaguucagcagacccagccccaucggcuaccugggccugcugagccagagaaccagagacaucuacaucagcagaagacugcugggcaccuucaccuggacccugagcgacagcgagggcaacgagacccccggcggcuacugccugaccagauggaugcugaucgaggccgagcugaagugcuucggcaacaccgccguggccaagugcaacgagaagcacgacgaggaguucugcgacaugcugagacuguucgacuucugcaagcaggccaucagaagacugaagaccgaggcccagaugagcauccagcugaucaacaaggccgugaacgcccugaucaacgaccagcugaucaugaagaaccaccugagagacaucaugggcauccccuacugcaacuacagcaaguacugcuaccugaaccacaccgugaccggcaagaccagccugcccagaugcugccuggugagcaacggcagcuaccugaacgagacccacuucagcgacgacaucgagcagcaggccgacaacaugaucaccgagcugcugcagaaggaguacauggacagacagggcaagaccccccugggccugguggaccuguucguguucagcaccagcuucuaccugaucagcaucuuccugcaccugaucaagauccccacccacagacacaucaccggcaagcccugccccaagccccacagacugaaccacaugggcaucugcagcugcggccuguacaagcaccccggcgugcccgugaaguggaagagaugaggacuagucccuguucccagagcccacuuuuuuuucuuuuuuugaaauaaaauagccugucuuucagaucuaaaaaaaaaaaaaaaaaaaaaaaaaaaaaaaaaaaaaaaaaaaaaaaaaaaaaaaaaaaaaaaaaaaaaaaaaaaaaaaaaaaaaaaaaaaaaaaaaaaa

SEQ ID NO: 40398 - RNA, 1721 nt, Artificial Sequence
  mRNA product Design a-1 (A100) comprising derived and/or modified sequence from LASV(ISTH2010-NIG-2012;Clade II)__AIT17482__GPCmut12 (opt4)
aggagagucccgcagucggcguccagcggcucugcuuguucgugugugugucguugcaggccuuauucaagcuuaccaugggccagaucaucaccuucuuccaggaggugccccacgugaucgaggaggugaugaacaucgugcugaucgcccugagccugcuggccauccugaagggcaucuacaacguggccaccugcggccuguucggccuggugagcuuccugcugcugugcggcagaagcugcagcaccaccuacaagggcguguacgagcugcagacccuggagcuggacauggccagccugaacaugugcaugccccugagcugcaccaagaacaacagccaccacuacaucauggugggcaacgagaccggccuggagcugacccugaccaacaccagcaucaucaaccacaaguucugcaaccugagcgacgcccacaagaagaaccuguacgaccacgcccugaugagcaucaucagcaccuuccaccugagcauccccaacuucaaccaguacgaggccaugagcugcgacuucaacggcggcaagaucagcgugcaguacaaccugagccacgccuacgccguggacgccgccaaccacugcggcaccaucgccaacggcgugcugcagaccuucaugagaauggccuggggcggcagcuacaucgcccuggacagcggcaagggcagcugggacugcaucaugaccagcuaccaguaccugaucauccagaacaucaccugggaggaccacugccaguucagcagacccagccccaucggcuaccugggccugcugagccagagaaccagagacaucuacaucagcagaagacugcugggcaccuucaccuggacccugagcgacagcgagggcaacgagacccccggcggcuacugccugaccagauggaugcugaucgaggccgagcugaagugcuucggcaacaccgccguggccaagugcaacgagaagcacgacgaggaguucugcgacaugcugagacuguucgacuucugcaagcaggccaucagaagacugaagaccgaggcccagaugagcauccagcugaucaacaaggccgugaacgcccugaucaacgaccagcugaucaugaagaaccaccugagagacaucaugggcauccccuacugcaacuacagcaaguacugcuaccugaaccacaccgugaccggcaagaccagccugcccagaugcugccuggugagcaacggcagcuaccugaacgagacccacuucagcgacgacaucgagcagcaggccgacaacaugaucaccgagcugcugcagaaggaguacaucgacagacagggcaagaccccccugggccugguggaccuguucguguucagcaccagcuucuaccugaucagcaucuuccugcaccuggugaagauccccacccacagacacguggugggcaagcccugccccaagccccacagacugaaccacaugggcaucugcagcugcggccuguacaagcaccccggcgugcccgugaaguggaagagaugaggacuagucccuguucccagagcccacuuuuuuuucuuuuuuugaaauaaaauagccugucuuucagaucuaaaaaaaaaaaaaaaaaaaaaaaaaaaaaaaaaaaaaaaaaaaaaaaaaaaaaaaaaaaaaaaaaaaaaaaaaaaaaaaaaaaaaaaaaaaaaaaaaaaa

SEQ ID NO: 40399 - RNA, 1721 nt, Artificial Sequence
  mRNA product Design a-1 (A100) comprising derived and/or modified sequence from LASV(Lassa virus/H.sapiens-wt/NGA/2015/ISTH_0543;Clade II)__AVO03639__GPCmut12 (opt4)
aggagagucccgcagucggcguccagcggcucugcuuguucgugugugugucguugcaggccuuauucaagcuuaccaugggccagaucaucaccuucuuccaggaggugccccacgugaucgaggaggugaugaacaucgugcugaucgcccugagccugcuggccauccugaagggcaucuacaacguggccaccugcggccuguucggccuggugagcuuccugcugcugugcggcagaagcugcagcaccaccuacaagggcguguacgagcugcagacccuggagcuggacauggccaaccugaacaugugcaugccccugagcugcaccaagaacaacagccaccacuacaucauggugggcaacgagaccggccuggagcugacccugaccaacaccagcaucaucaaccacaaguucugcaaccugagcgacgcccacaagaagaaccuguacgaccacgcccugaugagcaucaucagcaccuuccaccugagcauccccaacuucaaccaguacgaggccaugagcugcgacuucaacggcggcaagaucagcgugcaguacaaccugagccacaccuacgccguggacgccgccaaccacugcggcaccaucgccaacggcgugcugcagaccuucaugagaauggccuggggcggcagcuacaucgcccuggacagcggcaagggcagcugggacugcaucaugaccagcuaccaguaccuggugauccagaacaccaccugggaggaccacugccaguucagcagacccagccccaucggcuaccugggccugcugagccagagaaccagagacaucuacaucagcagaagacugcugggcaccuucaccuggacccugagcgacagcgagggcaacgagacccccggcggcuacugccugaccagauggaugcugaucgaggccgagcugaagugcuucggcaacaccgccguggccaagugcaacgagaagcacgacgaggaguucugcgacaugcugagacuguucgacuucugcaagcaggccaucagaagacugaagaccgaggcccagaugagcauccagcugaucaacaaggccgugaacgcccugaucaacgaccagcugaucaugaagaaccaccugagagacaucaugggcauccccuacugcaacuacagcaaguacugcuaccugaaccacaccgugaccggcaagaccagccugcccagaugcugccuggugagcaacggcagcuaccugaacgagacccacuucagcgacgacaucgagcagcaggccgacaacaugaucaccgagcugcugcagaaggaguacaucgacagacagggcaagaccccccugggccugguggaccuguucguguucagcaccagcuucuaccugaucagcaucuuccugcaccuggugaagauccccacccacagacacaucaccggcaagcccugccccaagccccacagacugaaccacaugggcaucugcagcugcggccuguacaagcaccccggcgugcccgugaaguggaagagaugaggacuagucccuguucccagagcccacuuuuuuuucuuuuuuugaaauaaaauagccugucuuucagaucuaaaaaaaaaaaaaaaaaaaaaaaaaaaaaaaaaaaaaaaaaaaaaaaaaaaaaaaaaaaaaaaaaaaaaaaaaaaaaaaaaaaaaaaaaaaaaaaaaaaa

SEQ ID NO: 40400 - RNA, 1721 nt, Artificial Sequence
  mRNA product Design a-1 (A100) comprising derived and/or modified sequence from LASV(Lassa virus/H.sapiens-wt/NGA/2016/ISTH_0009;Clade II)__AVO03571__GPCmut12 (opt4)
aggagagucccgcagucggcguccagcggcucugcuuguucgugugugugucguugcaggccuuauucaagcuuaccaugggccagaucaucaccuucuuccaggaggugccccacgugaucgaggaggugaugaacaucgugcugaucgcccugagccugcuggccauccugaagggcaucuacaacguggccaccugcggccugcugggccuggugagcuuccugcugcugugcggcagaagcugcagcaccaccuacaagggcguguacgagcugcagacccuggagcuggacauggccagccugaacaugugcaugccccugagcugcaccaagaacaacagccaccacuacaucauggugggcaacgagaccggccuggagcugacccugaccaacaccagcaucaucaaccacaaguucugcaaccugagcgacgcccacaagaagaaccuguacgaccacgcccugaugagcaucaucagcaccuuccaccugagcauccccaacuucaaccaguacgaggccaugagcugcgacuucaacggcggcagaaucagcgugcaguacaaccugagccacagcuacgccguggacgccgccaaccacugcggcaccaucgccaacggcgugcugcagaccuucaugagaauggccuggggcggcagcuacaucgcccuggacagcggcaagggcagcugggacugcaucaugaccagcuaccaguaccugaucauccagaacaccaccugggaggaccacugccaguucagcagacccagccccaucggcuaccugggccugcugagccagagaaccagagacaucuacaucagcagaagacugcugggcaccuucaccuggacccugagcgacagcgagggcaacgagacccccggcggcuacugccugaccagauggaugcugaucgaggccgagcugaagugcuucggcaacaccgccguggccaagugcaacgagaagcacgacgaggaguucugcgacaugcugagacuguucgacuucugcaagcaggccaucagaagacugaagaccgaggcccagaugagcauccagcugaucaacaaggccgugaacgcccugaucaacgaccagcugaucaugaagaaccaccugagagacaucaugggcauccccuacugcaacuacagcaaguacugcuaccugaaccacaccgugaccggcaagaccagccugcccagaugcugccuggugagcaacggcagcuaccugaacgagacccacuucagcgacgacaucgagcagcaggccgacaacaugaucaccgagcugcugcagaaggaguacaucgacagacagggcaagaccccccugggccugguggaccuguucguguucagcaccagcuucuaccugaucagcaucuuccugcaccuggugaagauccccacccacagacacaucaccggcaagcccugccccaagccccacagacugaaccacaugggcaucugcagcugcggccuguacaaccaccccggcgugcccgugaaguggaagagaugaggacuagucccuguucccagagcccacuuuuuuuucuuuuuuugaaauaaaauagccugucuuucagaucuaaaaaaaaaaaaaaaaaaaaaaaaaaaaaaaaaaaaaaaaaaaaaaaaaaaaaaaaaaaaaaaaaaaaaaaaaaaaaaaaaaaaaaaaaaaaaaaaaaaa

SEQ ID NO: 40401 - RNA, 1721 nt, Artificial Sequence
  mRNA product Design a-1 (A100) comprising derived and/or modified sequence from LASV(Lassa virus/H.sapiens-wt/NGA/2016/ISTH_0017;Clade II)__AVO03567__GPCmut12 (opt4)
aggagagucccgcagucggcguccagcggcucugcuuguucgugugugugucguugcaggccuuauucaagcuuaccaugggccagaucaucaccuucuuccaggaggugccccacgugaucgaggaggugaugaacaucgugcugaucgcccugagccugcuggccauccugaagggcaucuacaacguggccaccugcggccuguucggccuggugagcuuccugcugcugugcggcagaagcugcagcaccaccuacaagggcguguacgagcugcagacccuggagcuggacauggccagccugaacaugugcaugccccugagcugcaccaagaacaacagccaccacuacaucauggugggcaacgagaccggccuggagcugacccugaccaacaccagcaucaucaaccacaaguucugcaaccugagcgacgcccacaagaagaaccuguacgaccacgcccugaugagcaucaucagcaccuuccaccugagcauccccaacuucaaccaguacgaggccaugagcugcgacuucaacggcggcaagaucagcgugcaguacaaccugagccacaccuacgccaucgacgccgccaaccacugcggcaccaucgccaacggcgugcugcagaccuucaugagaauggccuggggcggcagcuacaucgcccuggacagcggcaagggcagcugggacugcaucaugaccagcuaccaguaccugaucauccagaacaccaccugggaggaccacugccaguucagcagacccagccccaucggcuaccugggccugcugagccagagaaccagagacaucuacaucagcagaagacugcugggcaccuucaccuggacccugagcgacagcgagggcaacgagacccccggcggcuacugccugaccagauggaugcugaucgaggccgagcugaagugcuucggcaacaccgccguggccaagugcaacgagaagcacgacgaggaguucugcgacaugcugagacuguucgacuucugcaagcaggccaucagaagacugaagaccgaggcccagaugagcauccagcugaucaacaaggccgugaacgcccugaucaacgaccagcugaucaugaagaaccaccugagagacaucaugggcauccccuacugcaacuacagcaaguacugcuaccugaaccacaccgugaccggcaagaccagccugcccagaugcugccuggugagcaacggcagcuaccugaacgagacccacuucagcgacgacaucgagcagcaggccgacaacaugaucaccgagcugcugcagaaggaguacauggacagacagggcaagaccccccugggccugguggaccuguucguguucagcaccagcuucuaccugaucagcaucuuccugcaccuggugagaauccccacccacagacacgugaucggcaagcccugccccaagccccacagacugaaccacaugggcaucugcagcugcggccuguacaagcaccccggcgugcccgugaaguggaagagaugaggacuagucccuguucccagagcccacuuuuuuuucuuuuuuugaaauaaaauagccugucuuucagaucuaaaaaaaaaaaaaaaaaaaaaaaaaaaaaaaaaaaaaaaaaaaaaaaaaaaaaaaaaaaaaaaaaaaaaaaaaaaaaaaaaaaaaaaaaaaaaaaaaaaa

SEQ ID NO: 40402 - RNA, 1721 nt, Artificial Sequence
  mRNA product Design a-1 (A100) comprising derived and/or modified sequence from LASV(Lassa virus/H.sapiens-wt/NGA/2018/ISTH_0959;Clade II)__AVV65099__GPCmut12 (opt4)
aggagagucccgcagucggcguccagcggcucugcuuguucgugugugugucguugcaggccuuauucaagcuuaccaugggccagaucaucaccuucuuccaggaggugccccacgugaucgaggaggugaugaacaucgugcugaucgcccugagccugcuggccauccugaagggcaucuacaacguggugaccugcggccuguucggccuggugagcuuccugcugcugugcggcagaagcugcagcaccaccuacaagggcguguacgagcugcagacccuggagcuggacauggccagccugaacaugugcaugccccugagcugcaccaagaacaacagccaccacuacaucauggugggcaacgagaccggccuggagcugacccugaccaacaccagcaucaucaaccacaaguucugcaaccugagcgacgcccacaagaagaaccuguacgaccacgcccugaugagcaucaucagcaccuuccaccugagcauccccaacuucaaccaguacgaggccaugagcugcgacuucaacggcggcaagaucagcgugcaguacaaccugagccacgccuacgccaucgacgccgccaaccacugcggcaccaucgccaacggcgugcugcagaccuucaugagaauggccuggggcggcagcuacaucgcccuggacagcggcaagggcagcugggacugcaucaugaccagcuaccaguaccugaucauccagaacaccaccugggaggaccacugccaguucagcagacccagccccaucggcuaccugggccugcugagccagagaaccagagacaucuacaucagcagaagacugcugggcaccuucaccuggacccugagcgacagcgagggcaacgagacccccggcggcuacugccugaccagauggaugcugaucgaggccgagcugaagugcuucggcaacaccgccguggccaagugcaacgagaagcacgacgaggaguucugcgacaugcugagacuguucgacuucugcaagcaggccaucagaagacugaagaccgaggcccagaugagcauccagcugaucaacaaggccgugaacgcccugaucaacgaccagcugaucaugaagaaccaccugagagacaucaugggcauccccuacugcaacuacagcaaguacugcuaccugaaccacaccgugaccggcaagaccagccugcccagaugcugccuggugagcaacggcagcuaccugaacgagacccacuucagcgacgacaucgagcagcaggccgacaacaugaucaccgagcugcugcagaaggaguacaucgacagacagggcaagaccccccugggccugguggaccuguucguguucagcaccagcuucuaccugaucagcaucuuccugcaccuggugaagauccccacccacagacacgugaucggcaagcccugccccaagccccacagacugaaccacaugggcaucugcagcugcggccuguacaagcaccccggcgugcccgugaaguggaagagaugaggacuagucccuguucccagagcccacuuuuuuuucuuuuuuugaaauaaaauagccugucuuucagaucuaaaaaaaaaaaaaaaaaaaaaaaaaaaaaaaaaaaaaaaaaaaaaaaaaaaaaaaaaaaaaaaaaaaaaaaaaaaaaaaaaaaaaaaaaaaaaaaaaaaa

SEQ ID NO: 40403 - RNA, 1721 nt, Artificial Sequence
  mRNA product Design a-1 (A100) comprising derived and/or modified sequence from LASV(LASV003-NIG-2008;Clade II)__AIT17580__GPCmut12 (opt4)
aggagagucccgcagucggcguccagcggcucugcuuguucgugugugugucguugcaggccuuauucaagcuuaccaugggccagaucaucaccuucuuccaggaggugccccacgugaucgaggaggugaugaacaucgugcugaucgcccugagccugcuggccauccugaagggcaucuacaacguggccaccugcggccuguucggccuggugagcuuccugcugcugugcggcagaagcugcagcaccaccuacaagggcguguacgagcugcagacccuggagcuggacauggccagccugaacaugugcaugccccugagcugcaccaagaacaacagccaccacuacaucauggugggcaacgagaccggccuggagcugacccugaccaacaccagcaucaucaaccacaaguucugcaaccugagcgacgcccacaagaagaaccuguacgaccacgcccugaugagcaucaucagcaccuuccaccugagcauccccaacuucaaccaguacgaggccaugagcugcgacuucaacggcggcaagaucagcgugcaguacaaccugagccacaccuacgccguggacgccgccaaccacugcggcaccaucgccaacggcgugcugcagaccuucaugagaauggccuggggcggcagcuacaucgcccuggacagcggcaagggcagcugggacugcaucaugaccagcuaccaguaccugaucauccagaacaccaccugggaggaccacugccaguucagcagacccagccccaucggcuaccugggccugcugagccagagaaccagagacaucuacaucagcagaagacugcugggcaccuucaccuggacccugagcgacagcgagagcaacgagacccccggcggcuacugccugaccagauggaugcugaucgaggccgagcugaagugcuucggcaacaccgccguggccaagugcaacgagaagcacgacgaggaguucugcgacaugcugagacuguucgacuucugcaagcaggccaucagaagacugaaggccgaggcccagaugagcauccagcugaucaacaaggccgugaacgcccugaucaacgaccagcugaucaugaagaaccaccugagagacaucaugggcauccccuacugcaacuacagcaaguacugcuaccugaaccacaccgugaccggcagaaccagccugcccagaugcugccuggugagcaacggcagcuaccugaacgagacccacuucagcgacgacaucgagcagcaggccgacaacaugaucaccgagcugcugcagaaggaguacauggacagacagggcaagaccccccugggccugguggaccuguucguguucagcaccagcuucuaccugaucagcaucuuccugcaccuggugaagauccccacccacagacacgugaucggcaagcccugccccaagccccacagacugaaccacaugggcaucugcagcugcggccuguacaagcaccccggcgugcccgugaaguggaagagaugaggacuagucccuguucccagagcccacuuuuuuuucuuuuuuugaaauaaaauagccugucuuucagaucuaaaaaaaaaaaaaaaaaaaaaaaaaaaaaaaaaaaaaaaaaaaaaaaaaaaaaaaaaaaaaaaaaaaaaaaaaaaaaaaaaaaaaaaaaaaaaaaaaaaa

SEQ ID NO: 40404 - RNA, 1721 nt, Artificial Sequence
  mRNA product Design a-1 (A100) comprising derived and/or modified sequence from LASV(LASV035-NIG-2009;Clade II)__AIT17588__GPCmut12 (opt4)
aggagagucccgcagucggcguccagcggcucugcuuguucgugugugugucguugcaggccuuauucaagcuuaccaugggccagaucaucaccuucuuccaggaggugccccacgugaucgaggaggugaugaacaucgugcugaucgcccugagccugcuggccauccugaagggcaucuacaacguggccaccugcggccuguucggccuggugagcuuccugcugcugugcggcagaagcugcagcaccaccuacaagggcguguacgagcugcagacccuggagcuggacauggccagccugaacaugugcaugccccugagcugcaccaagaacaacagccaccacuacaucauggugggcaacgagaccggccuggagcugacccugaccaacaccagcaucaucaaccacaaguucugcaaccugagcgacgcccacaagaagaaccuguacgaccacgcccugaugagcaucaucagcaccuuccaccugagcauccccaacuucaaccaguacgaggccaugagcugcgacuucaacggcggcaagaucagcgugcaguacaaccugagccacgccuacgccguggacgccgccaaccacugcggcaccaucgccaacggcgugcugcagaccuucaugagaauggccuggggcggcagcuacaucgcccuggacagcggcaagggcagcugggacugcaucaugaccagcuaccaguaccugaucauccagaacaccaccugggaggaccacugccaguucagcagacccagccccaucggcuaccugggccugcugagccagagaaccagagacaucuacaucagcagaagacugcugggcaccuucaccuggacccugagcgacagcgagggcaacgagacccccggcggcuacugccugaccagauggaugcugaucgaggccgagcugaagugcuucggcaacaccgccguggccaagugcaacgagaagcacgacgaggaguucugcgacaugcugagacuguucgacuucugcaagcaggccaucagaagacugaaggccgaggcccagaugagcauccagcugaucaacaaggccgugaacgcccugaucaacgaccagcugaucaugaagaaccaccugagagacaucaugggcauccccuacugcaacuacagcaaguacugcuaccugaaccacaccgugaccggcaagaccagccugcccagaugcugccuggugagcaacggcagcuaccugaacgagacccacuucagcgacgacaucgagcagcaggccgacaacaugaucaccgagcugcugcagaaggaguacaucgacagacagggcaagaccccccugggccugguggaccuguucguguucagcaccagcuucuaccugaucagcaucuuccugcaccuggugaagauccccacccacagacacgugaucggcaagcccugccccaagccccacagacugaaccacaugggcaucugcagcugcggccuguacaagcaccccggcgugcccgugaaguggaagagaugaggacuagucccuguucccagagcccacuuuuuuuucuuuuuuugaaauaaaauagccugucuuucagaucuaaaaaaaaaaaaaaaaaaaaaaaaaaaaaaaaaaaaaaaaaaaaaaaaaaaaaaaaaaaaaaaaaaaaaaaaaaaaaaaaaaaaaaaaaaaaaaaaaaaa

SEQ ID NO: 40405 - RNA, 1721 nt, Artificial Sequence
  mRNA product Design a-1 (A100) comprising derived and/or modified sequence from LASV(LASV1000-NIG-2009;Clade II)__AIT17782__GPCmut12 (opt4)
aggagagucccgcagucggcguccagcggcucugcuuguucgugugugugucguugcaggccuuauucaagcuuaccaugggccagaucaucaccuucuuccaggaggugccccacgugaucgaggaggugaugaacaucgugcugaucgcccugagccugcuggccauccugaagggcaucuacaacguggccaccugcggccuguucggccuggugagcuuccugcugcugugcggcagaagcugcagcaccaccuacaagggcguguacgagcugcagacccuggagcuggacauggccagccugaacaugugcaugccccugagcugcaccaagaacaacagccaccacuacaucauggugggcaacgagaccggccuggagcugacccugaccaacaccagcaucaucaaccacaaguucugcaaccugagcgacgcccacaagaagaaccuguacgaccacgcccugaugagcaucaucagcaccuuccaccugagcauccccaacuucaaccaguacgaggccaugagcugcgacuucaacggcggcaagaucagcgugcaguacaaccugagccacaccuacgccguggacgccgccaaccacugcggcaccaucgccaacggcgugcugcagaccuucaugagaauggccuggggcggcagcuacaucgcccuggacagcggcaagggcagcugggacugcaucaugaccagcuaccaguaccugaucauccagaacaccaccugggaggaccacugccaguucagcagacccagccccaucggcuaccugggccugcugagccagagaaccagagacaucuacaucagcagaagacugcugggcaccuucaccuggacccugagcgacagcgagggcaacgagacccccggcggcuacugccugaccagauggaugcugaucgaggccgagcugaagugcuucggcaacaccgccguggccaagugcaacgagaagcacgacgaggaguucugcgacaugcugagacuguucgacuucugcaagcaggccaucaagagacugaagaccgaggcccagaugagcauccagcugaucaacaaggccgugaacgcccugaucaacgaccagcugaucaugaagaaccaccugagagacaucaugggcauccccuacugcaacuacagcaaguacugcuaccugaaccacaccgugaccggcaagaccagccugcccagaugcugccuggugagcaacggcagcuaccugaacgagacccacuucagcgacgacaucgagcagcaggccgacaacaugaucaccgagcugcugcagaaggaguacaucgacagacagggcaagaccccccugggccugguggaccuguucguguucagcaccagcuucuaccugaucagcaucuuccugcaccuggugaagauccccacccacagacacguggugggcaagcccugccccaagccccacagacugaaccacaugggcaucugcagcugcggccuguacaagcaccccggcgugcccgugaaguggaagagaugaggacuagucccuguucccagagcccacuuuuuuuucuuuuuuugaaauaaaauagccugucuuucagaucuaaaaaaaaaaaaaaaaaaaaaaaaaaaaaaaaaaaaaaaaaaaaaaaaaaaaaaaaaaaaaaaaaaaaaaaaaaaaaaaaaaaaaaaaaaaaaaaaaaaa

SEQ ID NO: 40406 - RNA, 1721 nt, Artificial Sequence
  mRNA product Design a-1 (A100) comprising derived and/or modified sequence from LASV(LASV221-NIG-2010;Clade II)__AIT17624__GPCmut12 (opt4)
aggagagucccgcagucggcguccagcggcucugcuuguucgugugugugucguugcaggccuuauucaagcuuaccaugggccagaucaucaccuucuuccaggaggugccccacgugaucgaggaggugaugaacaucgugcugaucgcccugagccugcuggccauccugaagggcaucuacaacguggccaccugcggccuguucggccuggugagcuuccugcugcugugcggcagaagcugcagcaccaccuacaagggcguguacgagcugcagacccuggagcuggacauggccagccugaacaugugcaugccccugagcugcaccaagaacaacagccaccacuacaucauggugggcaacgagaccggccuggagcugacccugaccaacaccagcaucaucaaccacaaguucugcaaccugagcgacgcccacaagaagaaccuguacgaccacgcccugaugagcaucaucagcaccuuccaccugagcauccccaacuucaaccaguacgaggccaugagcugcgacuucaacggcggcaagaucagcgugcaguacaaccugagccacaccuacgccaucgacgccgccaaccacugcggcaccaucgccaacggcgugcugcagaccuucaugagaauggccuggggcggcagcuacaucgcccuggacagcggcaagggcagcugggacugcaucaugaccagcuaccaguaccugaucauccagaacaccaccugggaggaccacugccaguucagcagacccagccccaucggcuaccugggccugcugagccagagaaccagagacaucuacaucagcagaagacugcugggcaccuucaccuggacccugagcgacagcgagggcaacgagacccccggcggcuacugccugaccagauggaugcugaucgaggccgagcugaagugcuucggcaacaccgccguggccaagugcaacgagaagcacgacgaggaguucugcgacaugcugagacuguucgacuucugcaagcaggccaucagaagacugaagaccgaggcccagaugagcauccagcugaucaacaaggccgugaacgcccugaucaacgaccagcugaucaugaagaaccaccugagagacaucaugggcauccccuacugcaacuacagcaaguacugcuaccugaaccacaccgugaccggcaagaccagccugcccagaugcugccuggugagcaacggcagcuaccugaacgagacccacuucagcgacgacaucgagcagcaggccgacaacaugaucaccgagaugcugcagaaggaguacauggacagacagggcaagaccccccugggccugguggaccuguucguguucagcaccagcuucuaccugaucagcaucuuccugcaccuggugaagauccccacccacagacacgugaucggcaagcccugccccaagccccacagacugaaccacaugggcaucugcagcugcggccuguacaagcaccccggcgugcccgugaaguggaagagaugaggacuagucccuguucccagagcccacuuuuuuuucuuuuuuugaaauaaaauagccugucuuucagaucuaaaaaaaaaaaaaaaaaaaaaaaaaaaaaaaaaaaaaaaaaaaaaaaaaaaaaaaaaaaaaaaaaaaaaaaaaaaaaaaaaaaaaaaaaaaaaaaaaaaa

SEQ ID NO: 40407 - RNA, 1721 nt, Artificial Sequence
  mRNA product Design a-1 (A100) comprising derived and/or modified sequence from LASV(LASV237-NIG-2010;Clade II)__AIT17638__GPCmut12 (opt4)
aggagagucccgcagucggcguccagcggcucugcuuguucgugugugugucguugcaggccuuauucaagcuuaccaugggccagaucaucaccuucuuccaggaggugccccacgugaucgaggaggugaugaacaucgugcugaucgcccugagccugcuggccauccugaagggcaucuacaacguggccaccugcggccuguucggccuggugagcuuccugcugcugugcggcagaagcugcagcaccaccuacaagggcguguacgagcugcagacccuggagcuggacauggccagccugaacaugugcaugccccugagcugcaccaagaacaacagccaccacuacaucauggugggcaacgagaccggccuggagcugacccugaccaacaccagcaucaucaaccacaaguucugcaaccugagcgacgcccacaagaaggaccuguacgaccacgcccugaugagcaucaucagcaccuuccaccugagcauccccaacuucaaccaguacgaggccaugagcugcgacuucaacggcggcaagaucagcgugcaguacaaccugagccacaccuacgccguggacgccgccaaccacugcggcaccaucgccaacggcgugcugcagaccuucaugagaauggccuggggcggcagcuacaucgcccuggacagcggcaagggcagcugggacugcaucaugaccagcuaccaguaccugaucauccagaacaccaccugggaggaccacugccaguucagcagacccagccccaucggcuaccugggccugcugagccagagaaccagagacaucuacaucagcagaagacugcugggcaccuucaccuggacccugagcgacagcgagggcaacgagacccccggcggcuacugccugaccagauggaugcugaucgaggccgagcugaagugcuucggcaacaccgccguggccaagugcaacgagaagcacgacgaggaguucugcgacaugcugagacuguucgacuucugcaagcaggccaucagaagacugaagaccgaggcccagaugagcauccagcugaucaacaaggccgugaacgcccugaucaacgaccagcugaucaugaagaaccaccugagagacaucaugggcauccccuacugcaacuacagcaaguacugcuaccugaaccacaccgugaccggcaagaccagccugcccagaugcugccuggugagcaacggcagcuaccugaacgagacccacuucagcgacgacaucgagcagcaggccgacaacaugaucaccgagcugcugcagaaggaguacauggacagacagggcaagaccccccugggccugguggaccuguucguguucagcaccagcuucuaccugaucagcaucuuccugcaccugaucaagauccccacccacagacacaucaccggcaagcccugccccaagccccacagacugaaccacaugggcaucugcagcugcggccuguacaagcaccccggcgugcccgugaaguggaagagaugaggacuagucccuguucccagagcccacuuuuuuuucuuuuuuugaaauaaaauagccugucuuucagaucuaaaaaaaaaaaaaaaaaaaaaaaaaaaaaaaaaaaaaaaaaaaaaaaaaaaaaaaaaaaaaaaaaaaaaaaaaaaaaaaaaaaaaaaaaaaaaaaaaaaa

SEQ ID NO: 40408 - RNA, 1721 nt, Artificial Sequence
  mRNA product Design a-1 (A100) comprising derived and/or modified sequence from LASV(LASV253-NIG-2011;Clade II)__AIT17670__GPCmut12 (opt4)
aggagagucccgcagucggcguccagcggcucugcuuguucgugugugugucguugcaggccuuauucaagcuuaccaugggccagaucaucaccuucuuccaggaggugccccacgugaucgaggaggugaugaacaucgugcugaucgcccugagccugcuggccauccugaagggcaucuacaacguggccaccugcggccuguucggccuggugagcuuccugcugcugugcggcagaagcugcagcaccaccuacaagggcguguacgagcugcagacccuggagcuggacauggccagccugaacaugugcaugccccugagcugcaccaagaacaacagccaccacuacaucauggugggcaacgagaccggccuggagcugacccugaccaacaccagcaucaucaaccacaaguucugcaaccugagcgacgcccacaagaagaaccuguacgaccacgcccugaugagcaucaucagcaccuuccaccugagcauccccaacuucaaccaguacgaggccaugagcugcgacuucaacggcggcaagaucagcgugcaguacaaccugagccacaccuacgccguggacgccgccaaccacugcggcaccaucgccaacggcgugcugcagaccuucaugagaauggccuggggcggcagcuacaucgcccuggacagcggcaagggcagcugggacugcaucaugaccagcuaccaguaccugaucauccagaacaccaccugggaggaccacugccaguucagcagacccagccccaucggcuaccugggccugcugagccagagaaccagagacaucuacaucagcagaagacugcugggcaccuucaccuggacccugagcgacagcgagggcaacgagacccccggcggcuacugccugaccagauggaugcugaucgaggccgagcugaagugcuucggcaacaccgccguggccaagugcaacgagaagcacgacgaggaguucugcgacaugcugagacuguucgacuucugcaagcaggccaucagaagacugaaggccgaggcccagaugagcauccagcugaucaacaaggccgugaacgcccugaucaacgaccagcugaucaugaagaaccaccugagagacaucaugggcauccccuacugcaacuacagcaaguacugcuaccugaaccacaccgugaccggcagaaccagccugcccagaugcugccuggugagcaacggcagcuaccugaacgagacccacuucagcgacgacaucgagcagcaggccgacaacaugaucaccgagcugcugcagaaggaguacaucgacagacagggcaagaccccccugggccugguggaccuguucguguucagcaccagcuucuaccugaucagcaucuuccugcaccuggugaagauccccacccacagacacaucaucggcaagcccugccccaagccccacagacugaaccacaugggcaucugcagcugcggccuguacaagcaccccggcgugcccgugaaguggaagagaugaggacuagucccuguucccagagcccacuuuuuuuucuuuuuuugaaauaaaauagccugucuuucagaucuaaaaaaaaaaaaaaaaaaaaaaaaaaaaaaaaaaaaaaaaaaaaaaaaaaaaaaaaaaaaaaaaaaaaaaaaaaaaaaaaaaaaaaaaaaaaaaaaaaaa

SEQ ID NO: 40409 - RNA, 1721 nt, Artificial Sequence
  mRNA product Design a-1 (A100) comprising derived and/or modified sequence from LASV(LASV254-NIG-2011;Clade II)__AIT17674__GPCmut12 (opt4)
aggagagucccgcagucggcguccagcggcucugcuuguucgugugugugucguugcaggccuuauucaagcuuaccaugggccagaucaucaccuucuuccaggaggugccccacgugaucgaggaggugaugaacaucgugcugaucgcccugagccugcuggccauccugaagggcaucuacaacguggccaccugcggccuguucggccuggugagcuuccugcugcugugcggcagaagcugcagcaccaccuacaagggcguguacgagcugcagacccuggagcuggacaugaccaaccugaacaugugcaugccccugagcugcaccaagaacaacagccaccacuacaucauggugggcaacgagaccggccuggagcugacccugaccaacaccagcaucaucaaccacaaguucugcaaccugagcgacgcccacaagaagaaccuguacaaccacgcccugaugagcaucaucagcaccuuccaccugagcauccccaacuucaaccaguacgaggccaugagcugcgacuucaacggcggcaagaucagcgugcaguacaaccugagccacagcuacgccguggacgccgccaaccacugcggcaccaucgccaacggcgugcugcagaccuucaugagaauggccuggggcggcagcuacaucgcccuggacagcggcaagggcaacugggacugcaucaugaccagcuaccaguaccugaucauccagaacaccaccugggaggaccacugccaguucagcagacccagccccaucggcuaccugggccugcugagccagagaaccagagacaucuacaucagcagaagacugcugggcaccuucaccuggacccugagcgacagcgagggcaacgagacccccggcggcuacugccugaccagauggaugcugaucgaggccgagcugaagugcuucggcaacaccgccguggccaagugcaacgagaagcacgacgaggaguucugcgacaugcugagacuguucgacuucugcaagcaggccaucagaagacugaagaccgaggcccaggccaacauccagcugaucaacaaggccgugaacgcccugaucaacgaccagcugaucaugaagaaccaccugagagacaucaugggcauccccuacugcaacuacagcaaguacugcuaccugaaccacaccgugaccggcaagaccagccugcccagaugcugccuggugagcaacggcagcuaccugaacgagacccacuucagcgacgacaucgagcagcaggccgacaacaugaucaccgagcugcugcagaaggaguacauggacagacagggcaagaccccccugggccugguggaccuguucguguucagcaccagcuucuaccugaucagcaucuuccugcaccuggugaagauccccacccacagacacgugaucggcaagcccugccccaagccccacagacugaaccacaugggcaucugcagcugcggccuguacaagcaccccggcgugcccgugaaguggaagagaugaggacuagucccuguucccagagcccacuuuuuuuucuuuuuuugaaauaaaauagccugucuuucagaucuaaaaaaaaaaaaaaaaaaaaaaaaaaaaaaaaaaaaaaaaaaaaaaaaaaaaaaaaaaaaaaaaaaaaaaaaaaaaaaaaaaaaaaaaaaaaaaaaaaaa

SEQ ID NO: 40410 - RNA, 1721 nt, Artificial Sequence
  mRNA product Design a-1 (A100) comprising derived and/or modified sequence from LASV(Nig08-A19;Clade III)__ADU56618__GPCmut12 (opt4)
aggagagucccgcagucggcguccagcggcucugcuuguucgugugugugucguugcaggccuuauucaagcuuaccaugggccagaucgugaccuucuuccaggaggugccccacgugaucgaggaggugaugaacaucgugcugaucgcccugagcauccuggccauccugaagggccuguacaacaucgccaccugcggccugaucggccuggugaccuuccugcugcugagcggcagaagcugcagcaugaccuacaagggcguguacgagcugcagacccuggagcugaacaugaacacccugaacaugugcaugccccugagcugcaccaagaacaacagccaccacuacaucauggugggcaacgagaccggccuggagcugacccugaccaacaccagccugcugcaccacaaguucugcaaccugagcgacgcccacaagaagaaccuguacgaccacacccugaugagcaucaucagcaccuuccaccugagcauccccaacuucaaccaguacgaggccaugagcugcgacuucaacggcggcaagaucaccgugcaguacaaccugagccacagcuacgccaucgacgccgccaaccacugcggcaccguggccaacggcgugcugcagaccuucaugagaauggccuggggcggcagcuacaucgcccuggacagcggcagaggcaagugggacugcaucaugaccagcuaccaguaccugaucauccagaacaccaccugggaggaccacugccaguucagcagacccagccccaucggcuaccugggccugcugagccagagaaccagagacaucuacaucagcagaagacugcugggcaccuucaccuggacccugagcgacagcgagggcaacgagacccccggcggcuacugccugaccagauggaugcugaucgaggccgagcugaagugcuucggcaacaccgccguggccaagugcaacgagaagcacgacgaggaguucugcgacaugcugagacuguucgacuucugcaagcaggccaucagaagacugaaggccgaggcccagaugagcauccagcugaucaacaaggccgugaacgcccugaucaacgaccagcugaucaugaagaaccaccugagagacaucaugggcauccccuacugcaacuacagcaaguacugcuaccugaaccacaccagcaccggcagaaccagccugcccagaugcugccuggugagcaacggcagcuaccugaacgagacccacuucagcgacgacaucgagcagcaggccgacaacaugaucaccgagaugcugcagaaggaguaccuggacagacagggcaagaccccccugggccugguggaccuguucguguucagcaccagcuucuaccugaucagcaucuuccugcaccuggugaagauccccacccacagacacaucgugggcaagcccugccccaagccccacagacugaaccacaugggcaucugcagcugcggccuguacaagcagcccggcgugcccgugagauggaagagaugaggacuagucccuguucccagagcccacuuuuuuuucuuuuuuugaaauaaaauagccugucuuucagaucuaaaaaaaaaaaaaaaaaaaaaaaaaaaaaaaaaaaaaaaaaaaaaaaaaaaaaaaaaaaaaaaaaaaaaaaaaaaaaaaaaaaaaaaaaaaaaaaaaaaa

SEQ ID NO: 40411 - RNA, 1724 nt, Artificial Sequence
  mRNA product Design a-1 (A100) comprising derived and/or modified sequence from LASV(G1180-SLE-2010;Clade IV)__AIT17168__GPCmut12 (opt4)
aggagagucccgcagucggcguccagcggcucugcuuguucgugugugugucguugcaggccuuauucaagcuuaccaugggccagaucgugaccuucuuccaggaggugccccacgugaucgaggaggugaugaacaucgugcugaucgcccugagcauccuggccgugcugaagggccuguacaacuucgccaccugcggccuggugggccugcugaccuuccugcugcugugcggcagaagcugcaccgccagcagauacaagggcguguacgagcugcagacccuggagcugaacauggagacccugaacaugugcaugccccugagcugcaccaagaacaacagccaccacuacaucauggugggcaacgagaccggccuggagcugacccugaccaacaccagcaucaucaaccacaaguucugcaaccugagcgacgcccacaagaagaaccuguacgaccacgcccugaugagcaucaucagcaccuuccaccugagcauccccaacuucaaccaguacgaggccaugagcugcgacuucaacggcggcaagaucagcgugcaguacaaccugagccacagcuacgccggcgacgccgccaaccacugcggcaccguggccaacggcgugcugcagaccuucaugagaauggccuggggcggcagcuacaucgcccuggacagcggccacggcagcugggacugcaucaugaccagcuaccaguaccugaucauccagaacaccaccugggaggaccacugccaguucagcagacccagccccaucggcuaccugggccugcugagccagagaaccagagacaucuacaucagcagaagacugcugggcaccuucaccuggacccugagcgacagcgagggcaaggacacccccggcggcuacugccugaccagauggaugcugaucgaggccgagcugaagugcuucggcaacaccgccguggccaagugcaacgagaagcacgacgaggaguucugcgacaugcugagacuguucgacuucugcaagcaggccauccagagacugaaggccgaggcccagaugagcauccagcugaucaacaaggccgugaacgcccugaucaacgaccagcugaucaugaagaaccaccugagagacaucaugggcauccccuacugcaacuacagcaaguacugcuaccugaaccacaccaccaccggcaagaccagccugcccaagugcugccuggugagcaacggcagcuaccugaacgagacccacuucagcgacgacaucgagcagcaggccgacaacaugaucaccgagaugcugcagaaggaguacauggagagacagggcaagaccccccugggccugguggaccuguucguguucagcaccagcuucuaccugaucagcaucuuccugcaccuggugaagauccccacccacagacacaucgugggcaagagcugccccaagccccacagacugaaccacaugggcaucugcagcugcggccuguacaagcagcccggcgugcccgugaaguggaagagaugaggacuagucccuguucccagagcccacuuuuuuuucuuuuuuugaaauaaaauagccugucuuucagaucuaaaaaaaaaaaaaaaaaaaaaaaaaaaaaaaaaaaaaaaaaaaaaaaaaaaaaaaaaaaaaaaaaaaaaaaaaaaaaaaaaaaaaaaaaaaaaaaaaaaa

SEQ ID NO: 40412 - RNA, 1724 nt, Artificial Sequence
  mRNA product Design a-1 (A100) comprising derived and/or modified sequence from LASV(G1442-SLE-2011;Clade IV)__AIT17180__GPCmut12 (opt4)
aggagagucccgcagucggcguccagcggcucugcuuguucgugugugugucguugcaggccuuauucaagcuuaccaugggccagaucgugaccuucuuccaggaggugccccacgugaucgaggaggugaugaacaucgugcugaucgcccugagcauccuggccgugcugaagggccuguacaacguggccaccugcggccugaucggccuggugaccuuccugcugcugugcggcagaagcugcaccaccacccuguacaagggcguguacgagcugcagacccuggagcugaacauggagacccugaacaugugcaugccccugagcugcaccaagaacaacagccaccacuacaucagagugggcaacgagaccggccuggagcugacccugaccaacaccagcaucaucaaccacaaguucugcaaccugagcgacgcccacaagaagaaccuguacgaccacgcccugaugagcaucaucagcaccuuccaccugagcauccccaacuucaaccaguacgaggccaugagcugcgacuucaacggcggcaagaucagcgugcaguacaaccugagccacagcuacgccggcgacgccgccaaccacugcggcaccguggccaacggcgugcugcagaccuucaugagaauggccuggggcggcagcuacaucgcccuggacagcggcagaggcaacugggacugcaucaugaccagcuaccaguaccugaucauccagaacaccaccugggacgaccacugccaguucagcagacccagccccaucggcuaccugggccugcugagccagagaaccagagacguguacaucagcagaagacugcugggcaccuucaccuggacccugagcgacagcgagggcaaggacacccccggcggcuacugccugaccagauggaugcugaucgaggccgagcugaagugcuucggcaacaccgccguggccaagugcaacgagaagcacgacgaggaguucugcgacaugcugagacuguucgacuucugcaagcaggccauccagagacugaaggccgaggcccagaugagcauccagcugaucaacaaggccgugaacgcccugaucaacgaccagcugaucaugaagaaccaccugagagacaucaugggcauccccuacugcaacuacagcaaguacugcuaccugaacaacaccgccaccggcaagaccagccugcccaagugcugccugaucagcaacggcagcuaccugaacgagacccacuucagcgacgacaucgagcaggaggccgacaacaugaucaccgagaugcugcagaaggaguacauggagagacagggcaagaccccccugggccugguggaccuguucguguucagcaccagcuucuaccugaucagcaucuuccugcaccuggugaagauccccacccacagacacaucgugggcaagagcugccccaagccccacagacugaaccacaugggcaucugcagcugcggccuguacaagcagcccggcgugcccgugagauggaagagaugaggacuagucccuguucccagagcccacuuuuuuuucuuuuuuugaaauaaaauagccugucuuucagaucuaaaaaaaaaaaaaaaaaaaaaaaaaaaaaaaaaaaaaaaaaaaaaaaaaaaaaaaaaaaaaaaaaaaaaaaaaaaaaaaaaaaaaaaaaaaaaaaaaaaa

SEQ ID NO: 40413 - RNA, 1724 nt, Artificial Sequence
  mRNA product Design a-1 (A100) comprising derived and/or modified sequence from LASV(G3010-SLE-2013;Clade IV)__AIT17344__GPCmut12 (opt4)
aggagagucccgcagucggcguccagcggcucugcuuguucgugugugugucguugcaggccuuauucaagcuuaccaugggccagaucgugaccuucuuccaggaggugccccacgugaucgaggaggugaugaacaucgugcugaucgcccugagcauccuggccgugcugaagggccuguacaacuucgccaccugcggccuggugggccuggugaccuuccugcugcugugcggcagaagcugcaccaccagccuguacaagggcguguacgagcugcagacccuggagcugaacauggagacccugaacaugugcaugccccugagcugcaccaagaacaacagccaccacuacaucauggugggcaacgagaccggccuggagcugacccugaccaacaccagcaucaucaaccacaaguucugcaaccugagcgacgcccacaagaagaaccuguacaaccacgcccugaugagcaucaucagcaccuuccaccugagcauccccaacuucaaccaguacgaggccaugagcugcgacuucaacggcggcaagaucagcgugcaguacaaccugagccacagcuacgccggcgacgccgccagccacugcggcaccguggccaacggcgugcugcagaccuucaugagaauggccuggggcggcagcuacaucgcccuggacagcggcuacggcaagugggacugcaucaugaccagcuaccaguaccugaucauccagaacaccaccugggaggaccacugccaguucagcagacccagccccaucggcuaccugggccugcugagccagagaaccagagacaucuacaucagcagaagacugcugggcaccuucaccuggacccugagcgacagcgagggcaaggacacccccggcggcuacugccugaccagauggaugcugaucgaggccgagcugaagugcuucggcaacaccgccguggccaagugcaacgagaagcacgacgaggaguucugcgacaugcugagacuguucgacuucugcaagcaggccauccagagacugaagaccgaggcccagaugagcauccagcugaucaacaaggccgugaacgcccugaucaacgaccagcugaucaugaagaaccaccugagagacaucaugggcauccccuacugcaacuacagcaaguacugcuaccugaaccacaccaccaccggcaagaccagccugcccaagugcugccuggugagcaacggcagcuaccugaacgagacccacuucagcgacgacaucgagcagcaggccgacaacaugaucaccgagaugcugcagaaggaguacauggagagacagggcaagaccccccugggccugguggaccuguucguguucagcaccagcuucuaccugaucagcaucuuccugcaccuggugaagauccccacccacagacacaucgugggcaagagcugccccaagccccacagacugaaccacaugggcaucugcagcugcggccuguacaagcagcccggcgugcccgugagauggaagagaugaggacuagucccuguucccagagcccacuuuuuuuucuuuuuuugaaauaaaauagccugucuuucagaucuaaaaaaaaaaaaaaaaaaaaaaaaaaaaaaaaaaaaaaaaaaaaaaaaaaaaaaaaaaaaaaaaaaaaaaaaaaaaaaaaaaaaaaaaaaaaaaaaaaaa

SEQ ID NO: 40414 - RNA, 1724 nt, Artificial Sequence
  mRNA product Design a-1 (A100) comprising derived and/or modified sequence from LASV(G502-SLE-2009;Clade IV)__AIT17126__GPCmut12 (opt4)
aggagagucccgcagucggcguccagcggcucugcuuguucgugugugugucguugcaggccuuauucaagcuuaccaugggccagaucgugaccuucuuccaggaggugccccacgugaucgaggaggugaugaacaucgugcugaucgcccugagcauccuggccgugcugaagggccuguacaacuucgccaccugcggccuggugggccugcugaccuuccugcugcugugcggcagaagcugcaccaccggccuguacaagggcguguacgagcugcagacccuggagcugaacauggagacccugaacaugugcaugccccugagcugcaccaagaacaacagccaccacuacaucauggugggcaacgagaccggccuggagcugacccugaccaacaccagcaucaucaaccacaaguucugcaaccugagcgacgcccacaagaagaaccuguacgaccacgcccugaugagcaucaucagcaccuuccaccugagcauccccaacuucaaccaguacgaggccaugagcugcgacuucaacggcggcaagaucagcgugcaguacaaccugagccacagcuacgccggcgacgccgccgaccacugcggcaccguggccaacggcgugcugcagaccuucaugagaauggccuggggcggcagcuacaucgcccuggacagcggcagaggcagaugggacugcaucaugaccagcuaccaguaccugaucauccagaacaccaccugggaggaccacugccaguucagcagacccagccccaucggcuaccugggccugcugagccagagaaccagagacaucuacaucagcagaagacugcugggcaccuucaccuggacccugagcgacagcgagggcaaggacacccccggcggcuacugccugaccagauggaugcugaucgaggccgagcugaagugcuucggcaacaccgccguggccaagugcaacgagaagcacgacgaggaguucugcgacaugcugagacuguucgacuucugcaagcaggccauccagagacugaaggccgaggcccagaugagcauccagcugaucaacaaggccgugaacgcccugaucaacgaccagcuggugaugaagaaccaccugagagacaucaugggcauccccuacugcaacuacagcagauacugcuaccugaaccacaccaccaccggcagaaccagccugcccaagugcugccuggugagcaacggcagcuaccugaacgagacccacuucagcgacgacaucgagcagcaggccgacaacaugaucaccgagaugcugcagaaggaguacauggagagacagggcaagaccccccugggccugguggaccuguucguguucagcaccagcuucuaccugaucagcaucuuccugcaccuggugaagauccccacccacagacacaucgugggcaagagcugccccaagccccacagacugaaccacaugggcaucugcagcugcggccuguacaagcagcccggcgugcccgugaaguggaagagaugaggacuagucccuguucccagagcccacuuuuuuuucuuuuuuugaaauaaaauagccugucuuucagaucuaaaaaaaaaaaaaaaaaaaaaaaaaaaaaaaaaaaaaaaaaaaaaaaaaaaaaaaaaaaaaaaaaaaaaaaaaaaaaaaaaaaaaaaaaaaaaaaaaaaa

SEQ ID NO: 40415 - RNA, 1724 nt, Artificial Sequence
  mRNA product Design a-1 (A100) comprising derived and/or modified sequence from LASV(G733-SLE-2010;Clade IV)__AIT17154__GPCmut12 (opt4)
aggagagucccgcagucggcguccagcggcucugcuuguucgugugugugucguugcaggccuuauucaagcuuaccaugggccagaucgugaccuucuuccaggaggugccccacgugaucgaggaggugaugaacaucgugcugaucgcccugagcauccuggccgugcugaagggccuguacaacuucgccaccugcggcaucgugggccuggugagcuuccugcugcugugcggcagaagcugcaccaccagccuguacaagggcguguacgagcugcagacccuggagcugaacauggagacccugaacaugugcaugccccugagcugcaccaagaacaacagccaccacuacaucauggugggcaacgagaccggccuggagcugacccugaccaacaccagcaucaucaaccacaaguucugcaaccugagcgacgcccacaagaagaaccuguacgaccacgcccugaugagcaucaucagcaccuuccaccugagcauccccaacuucaaccaguacgaggccaugagcugcgacuucaacggcggcaagaucagcgugcaguacaaccugagccacagcuacgccggcgacgccgccaaccacugcggcaccaucgccaacggcgugcugcagaccuucaugagaauggccuggggcggcagcuacaucgcccuggacagcggcagagacagaugggacugcaucaugaccagcuaccaguaccugaucauccagaacaccaccugggaggaccacugccaguucagcagacccagccccaucggcuaccugggccugcugagccagagaaccagagacaucuacaucagcagaagacugcugggcaccuucaccuggacccugagcgacagcgagggcaaggacacccccggcggcuacugccugaccagauggaugcugaucgaggccgagcugaagugcuucggcaacaccgccguggccaagugcaacgagaagcacgacgaggaguucugcgacaugcugagacuguucgacuucugcaagcaggccauccagagacugaaggccgaggcccagaugagcauccagcugaucaacaaggccgugaacgcccugaucaacgaccagcugaucaugaagaaccaccugagagacaucaugggcauccccuacugcaacuacagcaaguacugcuaccugaaccacaccaccaccggcaagaccagccugcccaagugcugccuggugagcaacggcagcuaccugaacgagacccacuucagcgacgacaucgagcagcaggccgacaacaugaucaccgagaugcugcagaaggaguacauggagagacagggcaagaccccccugggccugguggaccuguucguguucagcaccagcuucuaccugaucagcaucuuccugcaccuggugaagauccccacccacagacacguggugggcaagagcugccccaagccccacagacugaaccacaugggcaucugcagcugcggccuguacggccagcccggcgugcccgugaaguggaagagaugaggacuagucccuguucccagagcccacuuuuuuuucuuuuuuugaaauaaaauagccugucuuucagaucuaaaaaaaaaaaaaaaaaaaaaaaaaaaaaaaaaaaaaaaaaaaaaaaaaaaaaaaaaaaaaaaaaaaaaaaaaaaaaaaaaaaaaaaaaaaaaaaaaaaa

SEQ ID NO: 40416 - RNA, 1724 nt, Artificial Sequence
  mRNA product Design a-1 (A100) comprising derived and/or modified sequence from MOPV/LASV reassortant(IGS-1;Clade IV)__AFY05576__GPCmut12 (opt4)
aggagagucccgcagucggcguccagcggcucugcuuguucgugugugugucguugcaggccuuauucaagcuuaccaugggccagaucgugaccuucuuccaggaggugccccacgugaucgaggaggugaugaacaucgugcugaucgcccugagcgugcuggccgugcugaagggccuguacaacuucgccaccugcggccuggugggccuggugaccuuccugcugcugugcggcagaagcugcaccaccagccuguacaagggcguguacgagcugcagacccuggagcugaacauggagacccugaacaugugcaugccccugagcugcaccaagaacaacagccaccacuacaucauggugggcaacgagaccggccuggagcugacccugaccaacaccagcaucaucaaccacaaguucugcaaccugagcgacgcccacaagaagaaccuguacgaccacgcccugaugagcaucaucagcaccuuccaccugagcauccccaacuucaaccaguacgaggccaugagcugcgacuucaacggcggcaagaucagcgugcaguacaaccugagccacagcuacgccggcgacgccgccaaccacugcggcaccguggccaacggcgugcugcagaccuucaugagaauggccuggggcggcagcuacaucgcccuggacagcggcagaggcaacugggacugcaucaugaccagcuaccaguaccugaucauccagaacaccaccugggaggaccacugccaguucagcagacccagccccaucggcuaccugggccugcugagccagagaaccagagacaucuacaucagcagaagacugcugggcaccuucaccuggacccugagcgacagcgagggcgaggacacccccggcggcuacugccugaccagauggaugcugaucgaggccgagcugaagugcuucggcaacaccgccguggccaagugcaacgagaagcacgacgaggaguucugcgacaugcugagacuguucgacuucugcaagcaggccauccagagacugaaggccgaggcccagaugagcauccagcugaucaacaaggccgugaacgcccugaucaacgaccagcugaucaugaagaaccaccugagagacaucaugggcauccccuacugcaacuacagcaaguacugcuaccugaaccacaccaccaccggcagaaccagccugcccaagugcugccuggugagcaacggcagcuaccugaacgagacccacuucagcgacgacaucgagcagcaggccgacaacaugaucaccgagaugcugcagaaggaguacauggagagacagggcaagaccccccugggccugguggaccuguucguguucagcaccagcuucuaccugaucagcaucuuccugcaccuggugaagauccccacccacagacacaucgugggcaagagcugccccaagccccacagacugaaccacaugggcaucugcagcugcggccuguacaagcagcccggcgugcccgugaaguggaagagaugaggacuagucccuguucccagagcccacuuuuuuuucuuuuuuugaaauaaaauagccugucuuucagaucuaaaaaaaaaaaaaaaaaaaaaaaaaaaaaaaaaaaaaaaaaaaaaaaaaaaaaaaaaaaaaaaaaaaaaaaaaaaaaaaaaaaaaaaaaaaaaaaaaaaa

SEQ ID NO: 40417 - RNA, 1724 nt, Artificial Sequence
  mRNA product Design a-1 (A100) comprising derived and/or modified sequence from LASV(LM765-SLE-2012;Clade IV)__AIT17814__GPCmut12 (opt4)
aggagagucccgcagucggcguccagcggcucugcuuguucgugugugugucguugcaggccuuauucaagcuuaccaugggccagaucgugaccuucuuccaggaggugccccacgugaucgaggaggugaugaacaucgugcugaucgcccugagcauccuggccgugcugaagggccuguacaacuucgccaccugcggccuggugggccuggugaccuuccugcugcugugcggcagaagcugcaccaccagccuguacaagggcguguacgagcugcagacccuggagcugaacauggagacccugaacaugugcaugccccugagcugcaccaagaacaacagccaccacuacaucauggugggcaacgagaccggccuggagcugacccugaccaacaccagcaucaucgaccacaaguucugcaaccugagcgacgcccacagaaagaaccuguacgaccacgcccugaugagcaucaucagcaccuuccaccugagcauccccaacuucaaccaguacgaggccaugagcugcgacuucaacggcggcaagaucagcgugcaguacaaccugagccacagcuacgccaaggacgccgccgaccacugcggcaccguggccaacggcgugcugcagaccuucaugagaauggccuggggcggcagcuacaucgcccuggacagcggcagaggcagaugggacugcaucaugaccagcuaccaguaccugaucauccagaacaccaccugggaggaccacugccaguucagcagacccagccccaucggcuaccugggccugcugagccagagaaccagagacaucuacaucagcagaagacugcugggcaccuucaccuggacccugagcgacagcgagggcaaggacacccccggcggcuacugccugaccagauggaugcugaucgaggccgagcugaagugcuucggcaacaccgccguggccaagugcaacgagaagcacgacgaggaguucugcgacaugcugagacuguucgacuucugcaagcaggccauccagagacugaaggccgaggcccagaugagcauccagcugaucaacaaggccgugaacgcccugaucaacgaccagcugaucaugaagaaccaccugagagacaucaugggcauccccuacugcaacuacagcaaguacugcuaccugaaccacaccaccaccggcaagaccagccugcccaagugcugccuggugagcaacggcagcuaccugaacgagacccacuucagcgacgacaucgagcagcaggccgacaacaugaucaccgagaugcugcagaaggaguacauggagagacagggcaagaccccccugggccugguggaccuguucguguucagcaccagcuucuaccugaucagcaucuuccugcaccuggugaagauccccacccacagacacaucgugggcaagcccugccccaagccccacagacugaaccacaugggcaucugcagcugcggccuguacaagcagcccggcgugcccgugaaguggaagagaugaggacuagucccuguucccagagcccacuuuuuuuucuuuuuuugaaauaaaauagccugucuuucagaucuaaaaaaaaaaaaaaaaaaaaaaaaaaaaaaaaaaaaaaaaaaaaaaaaaaaaaaaaaaaaaaaaaaaaaaaaaaaaaaaaaaaaaaaaaaaaaaaaaaaa

SEQ ID NO: 40418 - RNA, 1724 nt, Artificial Sequence
  mRNA product Design a-1 (A100) comprising derived and/or modified sequence from LASV(LM776-SLE-2012;Clade IV)__AIT17824__GPCmut12 (opt4)
aggagagucccgcagucggcguccagcggcucugcuuguucgugugugugucguugcaggccuuauucaagcuuaccaugggccagaucgugaccuucuuccaggaggugccccacgugaucgaggaggugaugaacaucgugcugaucgcccugagcauccuggccgugcugaagggccuguacaacuucgccaccugcggccuggugggccuggugaccuuccugcugcugugcggcagaagcugcaccaccagcguguacaagggcguguacgagcugcagacccuggagcugaacauggagacccugaacaugugcaugccccugagcugcaccaagaacaacagccaccacuacaucauggugggcaacgagaccggccuggagcugacccugaccaacaccagcaucaucaaccacaaguucugcaaccugagcgacgcccacaagaagaaccuguacgaccacgcccugaugagcaucaucagcaccuuccaccugagcauccccaacuucaaccaguacgaggccaugagcugcgacuucaacggcggcaagaucagcgugcaguacaaccugagccacagcuacgccggcgacgccgccaaccacugcggcaccguggccaacggcgugcugcagaccuucaugagaauggccuggggcggcagcuacaucgcccuggacagcggccacggcaagugggacugcaucaugaccagcuaccaguaccugaucauccagaacaccaccugggaggaccacugccaguucagcagacccagccccaucggcuaccugggccugcugagccagagaaccagagacaucuacaucagcagaagacugcugggcaccuucaccuggacccugagcgacagcgagggcaaggacacccccggcggcuacugccugaccagauggaugcugaucgaggccgagcugaagugcuucggcaacaccgccguggccaagugcaacgagaagcacgacgaggaguucugcgacaugcugagacuguucgacuucugcaagcaggccauccagagacugaaggccgaggcccagaugagcauccagcugaucaacaaggccgugaacgcccugaucaacgaccagcugaucaugaagaaccaccugagagacaucaugggcauccccuacugcaacuacagcaaguacugcuaccugaaccacaccaccaccggcaagaccagccugcccaagugcugccuggugagcaacggcagcuaccugaacgagacccacuucagcgacgacaucgagcagcaggccgacaacaugaucaccgagaugcugcagaaggaguacauggagagacagggcaagaccccccugggccugguggaccuguucguguucagcaccagcuucuaccugaucagcaucuuccugcaccuggugaagauccccacccacagacacaucgugggcaagagcugccccaagccccacagacugaaccacaugggcaucugcagcugcggccuguacaagcagcccggcgugcccgugagauggaagagaugaggacuagucccuguucccagagcccacuuuuuuuucuuuuuuugaaauaaaauagccugucuuucagaucuaaaaaaaaaaaaaaaaaaaaaaaaaaaaaaaaaaaaaaaaaaaaaaaaaaaaaaaaaaaaaaaaaaaaaaaaaaaaaaaaaaaaaaaaaaaaaaaaaaaa

SEQ ID NO: 40419 - RNA, 1724 nt, Artificial Sequence
  mRNA product Design a-1 (A100) comprising derived and/or modified sequence from LASV(Mad39;Clade IV)__ANH09722__GPCmut12 (opt4)
aggagagucccgcagucggcguccagcggcucugcuuguucgugugugugucguugcaggccuuauucaagcuuaccaugggccagaucgugaccuucuuccaggaggugccccacgugaucgaggaggugaugaacaucgugcugaucgcccugagcauccuggccgugcugaagggccuguacaacguggccaccugcggccugaucggccuggugaccuuccugcugcugugcggcagaagcugcaccaccacccuguacaagggcguguacgagcugcaggcccuggagcugaacauggagacccugaacaugugcaugccccugagcugcaccaagaacaacagccaccacuacaucagagugggcaacgagaccggccuggagcugacccugaccaacaccagccugaucaaccacaaguucugcaaccugagcgacgcccacaagaagaaccuguacgaccacgcccugaugagcaucaucagcaccuuccaccugagcauccccaacuucaaccaguacgaggccaugagcugcgacuucaacgacggcaagaucagcgugcaguacaaccugagccacaccuacgccggcgacaccgccaaccacugcggcaccguggccaacggcgugcugcagaccuucaugagaauggccuggggcggcagcuacaucgcccuggacagcggcagaggcggcugggacugcaucaugaccagcuaccaguaccugaucauccagaacaccaccugggaggaccacugccaguucagcagacccagccccaucggcuaccugggccugcugagccagagaaccagagacaucuacaucagcagaagacugcugggcaccuucaccuggacccugagcgacagcgagggcaaggacacccccggcggcuacugccugaccagauggaugcugaucgaggccgagcugaagugcuucggcaacaccgccguggccaagugcaacgagaagcacgacgaggaguucugcgacaugcugagacuguucgacuucugcaagcaggccauccagagacugaaggccgaggcccagaugagcauccagcugaucaacaaggccgugaacgcccugaucaacgaccagcugaucaugaagaaccaccugagagacaucaugggcauccccuacugcaacuacagcaaguacugcuaccugaaccacaccgugaccggcaagaccagccugcccaagugcugccuggugagcaacggcagcuaccugaacgagacccacuucagcgacgacaucgagcagcaggccgacaacaugaucaccgagaugcugcagaaggaguacauggagagacagggcaagaccccccugggccugguggaccuguucguguucagcaccagcuucuaccugaucagcaucuuccugcaccuggugaagauccccacccacagacacguggugggcaagcccugccccaagccccacagacugaaccacaugggcaucugcagcugcggcuucuacaagcagcccggcgugcccgugagauggaagagaugaggacuagucccuguucccagagcccacuuuuuuuucuuuuuuugaaauaaaauagccugucuuucagaucuaaaaaaaaaaaaaaaaaaaaaaaaaaaaaaaaaaaaaaaaaaaaaaaaaaaaaaaaaaaaaaaaaaaaaaaaaaaaaaaaaaaaaaaaaaaaaaaaaaaa

SEQ ID NO: 40420 - RNA, 1724 nt, Artificial Sequence
  mRNA product Design a-1 (A100) comprising derived and/or modified sequence from LASV(Z0947-SLE-2011;Clade IV)__AIT17840__GPCmut12 (opt4)
aggagagucccgcagucggcguccagcggcucugcuuguucgugugugugucguugcaggccuuauucaagcuuaccaugggccagaucgugaccuucuuccaggaggugccccacgugaucgaggaggugaugaacaucgugcugaucgcccugagcauccuggccgugcugaagggccuguacaacuucgccaccugcggccuggugggccuggugaccuuccugcugcugugcggcagaagcugcaccaucagccuguacaagggcguguacgagcugcagacccuggagcugaacauggagacccugaacaugugcaugccccugagcugcaccaagaacaacagccaccacuacaucauggugggcaacgagaccggccuggagcugacccugaccaacaccagcaucaucaaccacaaguucugcaaccugagcgacgcccacaagaagaaccuguacgaccacgcccugaugagcaucaucagcaccuuccaccugagcauccccaacuucaaccaguacgaggccaugagcugcgacuucaacggcggcaagaucagcgugcaguacaaccugagccacagcuacgccggcgacgccgccaaccacugcggcaccguggccaacggcgugcugcagaccuucaugagaauggccuggggcggcagcuacaucgcccuggacagcggcagagacagaugggacugcaucaugaccagcuaccaguaccugaucauccagaacaccaccugggaggaccacugccaguucagcagacccagccccaucggcuaccugggccugcugagccagagaaccagagacaucuacaucagcagaagacugcugggcaccuucaccuggacccugagcgacagcgagggcaaggacacccccggcggcuacugccugaccagauggaugcugaucgaggccgagcugaagugcuucggcaacaccgccguggccaagugcaacgagaagcacgacgaggaguucugcgacaugcugagacuguucgacuucugcaagcaggccauccagagacugaaggccgaggcccagaugagcauccagcugaucaacaaggccgugaacgcccugaucaacgaccagcugaucaugaagaaccaccugagagacaucaugggcauccccuacugcaacuacagcaaguacugcuaccugaaccacaccaccaccggcaagaccagccugcccaagugcugccuggugagcaacggcagcuaccugaacgagacccacuucagcgacgacaucgagcagcaggccgacaacaugaucaccgagaugcugcagaaggaguacauggagagacagggcaagaccccccugggccugguggaccuguucguguucagcaccagcuucuaccugaucagcaucuuccugcaccuggugaagauccccacccacagacacaucgugggcaagcccugccccaagccccacagacugaaccacaugggcaucugcagcugcggccuguacaagcagcccggcgugcccgugaaguggaagagaugaggacuagucccuguucccagagcccacuuuuuuuucuuuuuuugaaauaaaauagccugucuuucagaucuaaaaaaaaaaaaaaaaaaaaaaaaaaaaaaaaaaaaaaaaaaaaaaaaaaaaaaaaaaaaaaaaaaaaaaaaaaaaaaaaaaaaaaaaaaaaaaaaaaaa

SEQ ID NO: 40421 - RNA, 1724 nt, Artificial Sequence
  mRNA product Design a-1 (A100) comprising derived and/or modified sequence from LASV(Josiah;Clade IV)__NP_694870__GPCmut12 (opt5)
aggagagucccgcagucggcguccagcggcucugcuuguucgugugugugucguugcaggccuuauucaagcuuaccaugggccagaucgugaccuucuuucaagaggucccccacguuauugaagaggugaugaacaucgugcugauugcccucagcguccuggcugugcuuaaggggcuguacaauuucgccacaugcggacucguuggccuggugacguuucuucugcucugugggagauccugcaccacaucucuguauaaaggagucuacgaacugcagacccucgagcugaacauggaaacacuuaauauguguaugccucugagcugcaccaagaacaauucccaucacuauaucauggugggcaacgagacagggcucgagcugacccuuacgaauaccucuauuaucaaccauaaauucuguaaucugagcgacgcgcacaagaaaaaccucuacgaucaugcucugauguccaucauuucuacauuucaccugagcaucccgaauuucaaccaguaugaagccauguccugcgacuuuaauggaggcaagauuagcguucaguacaaccucucucacuccuaugccggcgaugcugccaaucauugugggaccguggcuaacggaguccugcaaacauucaugcggauggccuggggcgggagcuacaucgcgcuugacucuggacgcggcaacugggauugcauuaugaccuccuaccaguaucugaucauucagaauacgacaugggaggaccacugucaguuuagcagacccucuccuaucggguaccucggacugcuuucccaacggacccgcgauaucuauauuagcagacggcugcucggcacauucaccuggacccuguccgacucugaaggcaaggauacacccgggggauacugccugacgcgcuggaugcucaucgaggccgagcugaaauguuuuggcaacaccgcuguggccaagugcaaugaaaaacaugacgaggaguucugcgauaugcuuagacuguuugacuucuguaagcaggcuauucagcggcucaaagccgaagcgcagaugagcauccaacugauuaacaaggccgugaaugcucuuaucaacgaucagcugaucaugaagaaucaccuccgcgacauuauggggaucccuuauugcaacuacuccaaauauuguuaccugaaucacacaaccacaggaagaaccagccugcccaagugcugucucgucucuaacggcuccuaccugaaugaaacgcauuucagcgacgauauugagcagcaagccgacaacaugaucacagagaugcuucagaaagaauauauggagcggcaggggaagaccccucugggacucguugaucuguuuguguucucuaccagcuuuuaccugauuuccaucuuccuucaccucgugaaaaucccgacacaucgccacauugucggcaagucuugccccaaaccucauagacugaaucacaugggcaucuguagcugcgggcuguauaagcagcccggagugccuguuaaguggaaacggugaggacuagucccuguucccagagcccacuuuuuuuucuuuuuuugaaauaaaauagccugucuuucagaucuaaaaaaaaaaaaaaaaaaaaaaaaaaaaaaaaaaaaaaaaaaaaaaaaaaaaaaaaaaaaaaaaaaaaaaaaaaaaaaaaaaaaaaaaaaaaaaaaaaaa

SEQ ID NO: 40422 - RNA, 1721 nt, Artificial Sequence
  mRNA product Design a-1 (A100) comprising derived and/or modified sequence from LASV(LP;Clade I)__AAF86701__GPCmut12 (opt5)
aggagagucccgcagucggcguccagcggcucugcuuguucgugugugugucguugcaggccuuauucaagcuuaccaugggccagaucauuaccuucuuucaagaggugccccacgucaucgaagagguuaugaacauugugcugaucgcccucagccugcuugcuauucugaaggggcucuacaauaucgccacaugcggaaucauuggccugguggcguuccuuuuucugugugggaaauccugcucucucacgcugaagggaggcuaugaacugcagacccucgagcugaacauggaaacacuuaauauguguaugccucugagcugcaccaaaaacuccucucaucacuacaucagagucgggaaugagacaggacucgagcugacccuuacaaacaccagcauuaucaaucauaaguucuguaaccuguccgacgcucacaaaaagaaucucuaugaucaugcccugaugucuauuaucagcacguuucaccuguccauuccgaacuucaaucaguacgaagccaugagcugcgacuuuaacggcggcaagaucucugugcaguauaaucucucccacagcuacgcuggggaugccgcugagcauuguggaaccguugccaacggcgugcugcaaacauucaugcggauggcguggggagggcgcuauaucgcccuugacucuggcaaagggaauugggauugcauuaugaccuccuaccaguaccugaucauucagaacacaaccugggaagaccacugucaguuuagcagacccucuccuaucggauaucucggccugcuuucccaacggacgcgcgauauuuacaucagcagacggcugcucggcacauucaccuggacacuguccgacucugaggggaacgagacccccggaggcuauugccugacccgcuggaugcucaucgaagcugagcugaaguguuuugggaauacagccgucgcuaaaugcaacgaaaagcaugaugaggaguucugcgacaugcuuagacuguuugauuucuguaaacaggccauucggcgccucaaggcggaagcccagaugagcauccagcugauuaauaaggcugugaacgcccuuaucaaugaccaacugauuaugaaaaaccaccucagagauaucaugggaaucccuuacugcaauuauuccaaguacuguuaucugaaccacacgagcucuggccggaccucccugcccaaaugcugucucauuagcaaugggucuuaccugaacgagacacaguucagcgacgacaucgaacagcaagcugauaauaugauuaccgagaugcuucagaaggaauacaucgagcgccagggaaaaacaccucugggccucguugacauuuuuaucuucuccaccucuuuuuaucugauuagcaucuuccugcaucuuaucaagauuccgacgcacagacauaucgugggcaaacccugcccuaagccccaccggcucaaccauaugggggucuguuccugcggacuguacaagcacccuggcgugcccacaaaauggaagcgcugaggacuagucccuguucccagagcccacuuuuuuuucuuuuuuugaaauaaaauagccugucuuucagaucuaaaaaaaaaaaaaaaaaaaaaaaaaaaaaaaaaaaaaaaaaaaaaaaaaaaaaaaaaaaaaaaaaaaaaaaaaaaaaaaaaaaaaaaaaaaaaaaaaaaa

SEQ ID NO: 40423 - RNA, 1721 nt, Artificial Sequence
  mRNA product Design a-1 (A100) comprising derived and/or modified sequence from LASV(803213;Clade II)__AAF86703__GPCmut12 (opt5)
aggagagucccgcagucggcguccagcggcucugcuuguucgugugugugucguugcaggccuuauucaagcuuaccaugggccagaucauuaccuucuuucaagaggugccccacgucaucgaagagguuaugaacauugugcugaucgcccucagccugcuugcuauucugaaggggaucuacaauguggccacaugcggacucuucggccugaucuccuuucuucugcucugugggagaucuugcagcgucacguauaaaggaguguacgaacugcagacccuggagcucaacauggcgaaucugaacauguguaugccucuuuccugcacaaagaauaacucucaucacuauauuaugguuggcaaugaaaccgggcuggagcucacacugaccaacacaagcaucauuaaucauaaauucuguaaccuuuccgacgcucacaagaaaaaucuguacgaucaugcccucaugucuaucauuagcaccuuucaccuguccaucccgaacuucaaucaguaugaggccaugagcugcgacuuuaacggaggcaagauuucugugcaguacaaucugucccacagcuucgcugucgaugccgcuaaccauuguggcacgaucgccaacggggugcuccaaaccuuuaugcggauggcguggggaggcucuuauaucgcccuggacuccgggaagggaaauugggauugcauuaugacaagcuaccaguaccuuaucauucagaacaccacaugggaagaccacugucaguucucucgccccuccccuaucggcuaucuggggcuccugagccaaagaacccgggauauuuacaucucccgcagacuucugggaacguuuacauggacccucucugacagcgagggcaaugaagcucccggcggguauugccugacacgguggaugcugaucgaggccgagcucaaauguuucggaaacaccgcuguugccaagugcaaugaaaaacaugaugaggaauuuugcgacaugcugcgccuuuucgauuucuguaagcaggcgauuaaaagacugaagaccgaggcccagauguccauccagcucauuaacaaggcugugaaugcccugaucaacgaccaacuuauuaugaaaaaucaucugcgggauaucaugggcaucccuuacugcaacuauagccgcuacuguuaucucaaucacacagucacggggaagaccucucugcccagaugcugucugguguccaacggaagcuaccucaaugaaacacacuuuucugacgacauugagcagcaggcugauaacaugaucaccgagaugcugcaaaaagaauacauggaccggcagggcaagacaccucuugggcugguggaucucuucgucuuuagcaccuccuucuaucugauuucuaucuuucugcaccuuguuaaaauuccgacgcaucgccacaucgugggaaagcccugcccuaaaccccauagacucaaucacaugggcauuuguagcugcggccuguacaagcacccuggggugcccgucaaguggaaacggugaggacuagucccuguucccagagcccacuuuuuuuucuuuuuuugaaauaaaauagccugucuuucagaucuaaaaaaaaaaaaaaaaaaaaaaaaaaaaaaaaaaaaaaaaaaaaaaaaaaaaaaaaaaaaaaaaaaaaaaaaaaaaaaaaaaaaaaaaaaaaaaaaaaaa

SEQ ID NO: 40424 - RNA, 1721 nt, Artificial Sequence
  mRNA product Design a-1 (A100) comprising derived and/or modified sequence from LASV(GA391;Clade III)__CAA36645__GPCmut12 (opt5)
aggagagucccgcagucggcguccagcggcucugcuuguucgugugugugucguugcaggccuuauucaagcuuaccaugggccagaucgugaccuucuuucaagaggucccccacguuauugaagaggugaugaacaucgugcugauugcccucagcauccuggcuauucuuaaggggcuguacaaugucgccacaugcggacucaucggccuggugacguuccuucugcucuccgggagaucuuguagccugaucuauaaaggaaccuacgaacugcagacacucgagcugaacauggaaacccuuaauaugugcaugccucuguccuguacaaagaacaauucucaucacuauauucggguuggcaacgagaccgggcucgagcugacacuuaccaauacgagcauccugaaccauaaauuuugcaaucucuccgacgcgcacaagcgcaaccuguacgaucauucucugaugagcauuaucuccaccuuccaccucagcauuccgaauuuuaaccaguaugaagcuaugucuugugacuucaauggaggcaaaaucacagugcaguacaaccugucccacagcuuugccgucgaugccgcuggccauugcgggacccuugccaauggagugcugcaaacauucaugagaauggcuuggggcgggucuuauauugcccucgacuccggacggggcaacugggauuguaucaugaccagcuaccaguaccugaucauucagaacacgacaugggacgaucacugccaguuuucucgccccuccccuaucggguaucuuggacugcucagccaaagaacccgggacauuuacaucucccgcagacugcugggcacauucaccuggacccucucugauagcgagggcaaugaaacacccgggggauauugucugacgcgguggaugcuuauugaggcggagcugaagugcuuuggcaacaccgccguugcuaaguguaaugaaaaacaugacgaggaguucugcgauaugcuccgccuguuugacuucugcaagcaggccaucagacggcuuaaaacagaagcucagauguccauccagcugauuaacaaggccgugaaugcgcucaucaacgaucaacugauuaugaaaaaucaucugcgcgacaucauggggauuccuuacuguaacuauagcagauacugcuaucucaaucacaccucuacaggaaagaccucccugccccgguguugccuuaucagcaacggcucuuaccugaaugaaacgaaguucagcgacgauaucgagcagcaggccgacaacaugauuacagagaugcuccaaaaagaauacaucgaucgccaggggaagaccccucugggacuggucgaccuuuuuguguucuccaccucuuuuuaucucauuagcaucuuccugcaccuggugaaaauuccgacacacagacauaucgucggcaagcccuguccuaaaccccaccggcucaaucauaugggcauuugcuccugugggcuguacaagcagccuggaguucccgugagauggaaacgcugaggacuagucccuguucccagagcccacuuuuuuuucuuuuuuugaaauaaaauagccugucuuucagaucuaaaaaaaaaaaaaaaaaaaaaaaaaaaaaaaaaaaaaaaaaaaaaaaaaaaaaaaaaaaaaaaaaaaaaaaaaaaaaaaaaaaaaaaaaaaaaaaaaaaa

SEQ ID NO: 40425 - RNA, 1724 nt, Artificial Sequence
  mRNA product Design a-1 (A100) comprising derived and/or modified sequence from LASV(AV;Clade V)__CCA30314__GPCmut12 (opt5)
aggagagucccgcagucggcguccagcggcucugcuuguucgugugugugucguugcaggccuuauucaagcuuaccaugggccagaucgugaccuucuuucaagaggucccccacguuauugaagaggugaugaacaucgugcugauugcccucagcauccuggcuguccuuaaggggcuguacaauauugccacaugcggacucaucggccugaucacguuccuucugcucugugggagauccugcucuagcaaccuguauaaaggaguguacgaacugcagucccucgaccugaauauggagacccuuaacauguguaugccucugucuugcacaaagaauaacagccaucacuauauucggguuggcaaugauaccgggcucgaacugacacuuaccaacacauccauccugaaucauaaauuuuguaaccucucugacgcgcacaagaaagaucuguacgaccaugcucugaugagcauuaucuccaccuuccaccucagcauuccgaauuuuaaccaguaugaggccaugucuugcgauuucaauggaggcaagaucuccgugcaguacaaccugagccacucuuaugccauugacgcugccaaucauuguggcacggucgcuaacgggauccuucaaaccuuuaugcgcauggccuggggaggcuccuacaucgcgcuggauagcgggagaggaaacugggacugcauuaugacaucuuaccaguaucucaucauucagaauaccacaugggagaaccacugucaguucucccggcccagcccuaucggcuaccuggggcuucugucccaacgcaccagagauauuuauaucucucggcgccuccugggaacguuuacauggacccugagcgacuccgaaggcaaugccacacccggcggguacugccucaccagauggaugcugaucgaggcugaacuuaaguguuucggaaacaccgccguggcuaaaugcaaugagaagcaugaugaggaauuuugcgacaugcugcgccucuucgauuuuuguaaacaggccauuagccggcugaagucugaggcgcagauguccauccagcuuauuaacaaagccguuaaugcucugaucaacgaccaacucauuaugaagaaucaccugagagacaucaugggcaucccuuauugcaacuacagcaaguauuguuaccugaaucacacaauuacggggaaaaccucucuccccaagugcugucuggugagcaacggauccuaccuuaaugaaacacauuucucugaugacaucgagcagcaggccgauaacaugauuaccgaaaugcugcaaaaagaguauauggagcggcagggcaagacaccucucgggcuggucgaccuguucguguuuagcaccuccuucuaccuuaucagcauuuuucuccgccuggugaaaaucccgacgcacagacauauugucggaaagcccugcccuaaaccccaccggcugaaucauaugggcaucuguucuugcggccucuauaagcagccugggguucccgugcgcuggaagagaugaggacuagucccuguucccagagcccacuuuuuuuucuuuuuuugaaauaaaauagccugucuuucagaucuaaaaaaaaaaaaaaaaaaaaaaaaaaaaaaaaaaaaaaaaaaaaaaaaaaaaaaaaaaaaaaaaaaaaaaaaaaaaaaaaaaaaaaaaaaaaaaaaaaaa

SEQ ID NO: 40426 - RNA, 1721 nt, Artificial Sequence
  mRNA product Design a-1 (A100) comprising derived and/or modified sequence from LASV(Togo/2016/7082;Clade VI)__AMR44577__GPCmut12 (opt5)
aggagagucccgcagucggcguccagcggcucugcuuguucgugugugugucguugcaggccuuauucaagcuuaccaugggccagaucauuaccuucuuucaagaggugccccacgucaucgaagagguuaugaacauugugcugaucgcccucagccugcuugcuauucugaaggggguguacaaugucgccacaugcggaaucaucggccucgugacguuccuguuucuuugugggagauccugcucucugauuuauaaaggaagcuacgaacuccagacccuggagcugaacauggaaacacucaauauguguaugccucuguccugcaccaagaacucuagccaucacuauauccggguuggcaaugagacagggcuugagcugacccucacaaacaccuccauuaucaaucauaaauucuguaaccugucugacgcgcacaagcgcaaucuuuacgaucaugcucugaugagcauucucuccacguuucaccugagcaucccgaacuucaaucaguaugaagccaugucuugcgacuuuaacggaggcaaaauuuccgugcaguacaaucugagccacgccuaugcugucgaugccgcugagcauuguggcaccguggccaacgggguucuccaaacauucaugagaauggcguggggaggcucuuacaucgcccuggacuccgggcggggaaauugggauugcaucaugaccagcuaccaguaucuuauuauccagaacacaaccugggaagaccacugucaguuuucucgccccuccccuauuggcuaccuggggcuccugagccaaagaacgcgggauaucuauauuucccgcagacuucugggaacauucaccuggacacucucugacagcgagggcaacgagacccccggcggguacugccugacccgguggaugcugaucgaagcugagcucaaguguuuuggaaauacagccguggcuaagugcaacgaaaaacaugaugaggaguucugcgacaugcugcgccuuuuugauuucuguaagcaggccauccagagacugaaauccgaagcgcagaugagcauucaacucaucaauaaggccgucaacgcucugauuaaugaccagcuuaucaugaaaaaccaucugcgggauaugaugggcauuccuuauugcaauuacucuaaguauuguuaccucaaccacacguccagcgggcgcaccucucugcccaagugcugucuggugagcaauggauccuaccucaacgagacacacuucucugacgacaucgaacagcaagccgauaauaugaucaccgagaugcugcagaaagaauauauugacagacagggcaagacaccucuugggcugguggaucucuuugucuucagcaccuccuuuuaccugaucagcauuuuccugcaccuuaucaaaauuccgacgcaucggcacaucguuggaaagcccugcccuaaaccccaucgccucaaccacaugggcauuuguucuugcggccuguauaagcagccuggggugcccacaagauggaaacggugaggacuagucccuguucccagagcccacuuuuuuuucuuuuuuugaaauaaaauagccugucuuucagaucuaaaaaaaaaaaaaaaaaaaaaaaaaaaaaaaaaaaaaaaaaaaaaaaaaaaaaaaaaaaaaaaaaaaaaaaaaaaaaaaaaaaaaaaaaaaaaaaaaaaa

SEQ ID NO: 40427 - RNA, 1721 nt, Artificial Sequence
  mRNA product Design a-1 (A100) comprising derived and/or modified sequence from LASV(KAK-428;Clade n.d. (VII))__ANH09740__GPCmut12 (opt5)
aggagagucccgcagucggcguccagcggcucugcuuguucgugugugugucguugcaggccuuauucaagcuuaccaugggccagaucgugaccuucuuucaagaggucccccacguuauugaagaggugaugaacaucgugcugauugcccucagccugcuugcuauccugaaggggcucuacaauuucgccacaugcggagucauuggccugaucacguuucuucugcucugugggagauccugcucugcgaccuauaaaggacaguacgaacugcagacacuggagcucaacauggaaagccugaauauguguaugccucuuuccugcaccaagaacaauucucaucacuauauccgggcuggcaacaauacagggcuggagcucacccugacaaacaccagcauuaucucccauaaauucuguaaucuuucugacgcccacaagaaaaaccuguacgaucauacgcucaugagcauuaucaccacauuucaccuguccauuccgaauuucaaccaguaugaggccaugagcugcgacuuuaauggaggcaagaucucuauucaauacaaccugucccacagcuaugcuggcgaugccgcucagcauugugggaccguggccaauggaguucuccagacauucaugcgcauggcguggggcgggucuuaccuggcccuugacuccggaagacggggcugggauugcaucaucagcucuuaccaguaucugauuauccaaaacaccacgugggacgaucacugucaguuuucccgccccagcccuauuggguaccucggauucgugucccagaagacaagagacaucuauauuucucggcgccugcuuggcaccuuuacauggacccugagcgauuccgaaggccaugacaugcccgggggauacugccucaccagauggaugcugaucgaggcugaucugaaauguuucggcaacacagccgucgcuaagugcaaugaaaaacacgacgaggaguuuugcgauauguggcgccucuucgacuucuguaagcaggccauccaacggcugaaagcggaagcccagaugaacauucagcuuaucaauaaggcugugaacgcccugauuaaugaccaacucaugaugaagaaccaccugagagauaucauggggauuccuuauugcaauuacagcaaauuuuguuaucuuaacaauacgaccacaggacggaccucucugccccgcugcugucucaucuccaacggcagcuaccugaaugagacacauuucucugacgauaucgaacagcaggcugacaacaugauuaccgagaugcugcagaaggaauacauggauagacaagggaaaacgccucucggacugguugaccuuuuuguguucagcacauccuuuuaucugaucaccauuuuccuccaccuggucaagaucccgacccaucggcacauugugggcaaacccugcccuaagccccaucgccugaaucacaugggcaucuguucuugcgggcuuuacaaacagccuggagugcccgucagauggaagcggugaggacuagucccuguucccagagcccacuuuuuuuucuuuuuuugaaauaaaauagccugucuuucagaucuaaaaaaaaaaaaaaaaaaaaaaaaaaaaaaaaaaaaaaaaaaaaaaaaaaaaaaaaaaaaaaaaaaaaaaaaaaaaaaaaaaaaaaaaaaaaaaaaaaaa

SEQ ID NO: 40428 - RNA, 1721 nt, Artificial Sequence; identical to SEQ ID NO: 40422
  mRNA product Design a-1 (A100) comprising derived and/or modified sequence from LASV(Pinneo-NIG-1969;Clade I)__AIT17836__GPCmut12 (opt5)

SEQ ID NO: 40429 - RNA, 1721 nt, Artificial Sequence
  mRNA product Design a-1 (A100) comprising derived and/or modified sequence from LASV(ISTH0009-NIG-2011;Clade II)__AIT17404__GPCmut12 (opt5)
aggagagucccgcagucggcguccagcggcucugcuuguucgugugugugucguugcaggccuuauucaagcuuaccaugggccagaucauuaccuucuuucaagaggugccccacgucaucgaagagguuaugaacauugugcugaucgcccucagccugcuugcuauucugaaggggaucuacaauguggccacaugcggacucuucggccuggucuccuuucuucugcucugugggagaucuugcagcacgaccuauaaaggaguguacgaacugcagacacuggagcucgacauggcgucccugaacauguguaugccucuuucuugcaccaagaauaacagccaucacuauaucaugguuggcaaugaaacagggcuggagcucacccugacaaacaccuccauuaucaaucauaaauucuguaaccuuucugaugcucacaagaaaaaucuguacgaccaugcccucaugagcauuaucuccacguuucaccugagcauuccgaacuucaaucaguaugaggccaugucuugcgauuuuaacggaggcaagaucuccgugcaguacaaucugagccacgcuuaugccgucgacgcugccaaccauuguggcaccauugcgaauggggugcuccaaacauucaugcggauggccuggggaggcucuuacaucgcucuggauuccgggaagggaagcugggacugcaucaugaccucuuaccaguaucuuauuauccagaacacaaccugggaagaucacugucaguuuucccgccccagcccuauuggcuaccuggggcuccugucccaaagaacgcgggacaucuauauuucucgcagacuucugggaacauucaccuggacacucagcgauuccgagggcaacgaaacccccggcggguacugccugacccgguggaugcugaucgaggccgagcucaaauguuuuggaaauacagcuguugccaagugcaacgaaaaacaugacgaggaguucugcgauaugcugcgccuuuuugacuucuguaagcaggcgaucagacggcugaaaacggaagcccagaugagcauucagcucaucaauaaggcugugaacgcccugauuaaugaucaacuuaucaugaagaaccaucugcgcgacauuaugggcaucccuuauugcaauuacucuaaauauuguuaccucaaccacaccgucacagggaagaccucccugcccagaugcugucuggugagcaauggaucuuaccucaacgaaacacacuucagcgacgauaucgagcagcaggcugacaauaugauuaccgagcugcuucaaaaagaauauauggaucggcagggcaagacgccucuggggcucguggaccuguuugucuucuccacaucuuuuuaccugaucagcauuuuccuucaccucaucaaaauuccgacccaucgccacaucaccggaaagcccugcccuaaaccccauagacugaaccacaugggcauuuguuccugcggccuguauaagcacccugggguucccgugaaguggaaacggugaggacuagucccuguucccagagcccacuuuuuuuucuuuuuuugaaauaaaauagccugucuuucagaucuaaaaaaaaaaaaaaaaaaaaaaaaaaaaaaaaaaaaaaaaaaaaaaaaaaaaaaaaaaaaaaaaaaaaaaaaaaaaaaaaaaaaaaaaaaaaaaaaaaaa

SEQ ID NO: 40430 - RNA, 1721 nt, Artificial Sequence
  mRNA product Design a-1 (A100) comprising derived and/or modified sequence from LASV(ISTH2010-NIG-2012;Clade II)__AIT17482__GPCmut12 (opt5)
aggagagucccgcagucggcguccagcggcucugcuuguucgugugugugucguugcaggccuuauucaagcuuaccaugggccagaucauuaccuucuuucaagaggugccccacgucaucgaagagguuaugaacauugugcugaucgcccucagccugcuugcuauucugaaggggaucuacaauguggccacaugcggacucuucggccuggucuccuuucuucugcucugugggagaucuugcagcacgaccuauaaaggaguguacgaacugcagacacuggagcucgacauggcgucccugaacauguguaugccucuuucuugcaccaagaauaacagccaucacuauaucaugguuggcaaugaaacagggcuggagcucacccugacaaacaccuccauuaucaaucauaaauucuguaaccuuucugaugcucacaagaaaaaucuguacgaccaugcccucaugagcauuaucuccacguuucaccugagcauuccgaacuucaaucaguaugaggccaugucuugcgauuuuaacggaggcaagaucuccgugcaguacaaucugagccacgcuuaugccgucgacgcugccaaccauuguggcaccauugcgaauggggugcuccaaacauucaugcggauggccuggggaggcucuuacaucgcucuggauuccgggaagggaagcugggacugcaucaugaccucuuaccaguaucuuauuauccagaacauuacaugggaagaucacugucaguuuucccgccccagcccuaucggcuaccuggggcuccugucccaaagaacccgggacauuuauaucucucgcagacuucugggaacguucacauggacccucagcgauuccgagggcaacgaaacacccggcggguacugccugacccgguggaugcugaucgaggccgagcucaaauguuuuggaaauaccgcuguugccaagugcaacgaaaaacaugacgaggaguucugcgauaugcugcgccuuuuugacuucuguaagcaggcgauuagacggcugaaaacagaagcccagaugagcauccagcucauuaauaaggcugugaacgcccugaucaaugaucaacuuauuaugaagaaccaucugcgcgacaucaugggcaucccuuauugcaauuacucuaaauauuguuaccucaaccacacggucaccgggaagacaucccugcccagaugcugucuggugagcaauggaucuuaccucaacgaaacccacuucagcgacgauauugagcagcaggcugacaauaugaucacagagcugcuucaaaaagaauauauugaucggcagggcaagaccccucuggggcucguggaccuguuugucuucuccacgucuuuuuaccugaucagcauuuuccuucaccucguuaaaaucccgacacaucgccacguggugggaaagcccugcccuaaaccccauagacugaaccacaugggcauuuguuccugcggccuguauaagcacccugggguccccgugaaguggaaacggugaggacuagucccuguucccagagcccacuuuuuuuucuuuuuuugaaauaaaauagccugucuuucagaucuaaaaaaaaaaaaaaaaaaaaaaaaaaaaaaaaaaaaaaaaaaaaaaaaaaaaaaaaaaaaaaaaaaaaaaaaaaaaaaaaaaaaaaaaaaaaaaaaaaaa

SEQ ID NO: 40431 - RNA, 1721 nt, Artificial Sequence
  mRNA product Design a-1 (A100) comprising derived and/or modified sequence from LASV(Lassa virus/H.sapiens-wt/NGA/2015/ISTH_0543;Clade II)__AVO03639__GPCmut12 (opt5)
aggagagucccgcagucggcguccagcggcucugcuuguucgugugugugucguugcaggccuuauucaagcuuaccaugggccagaucauuaccuucuuucaagaggugccccacgucaucgaagagguuaugaacauugugcugaucgcccucagccugcuugcuauucugaaggggaucuacaauguggccacaugcggacucuucggccuggucuccuuucuucugcucugugggagaucuugcagcacgaccuauaaaggaguguacgaacugcagacacuggagcucgacauggcgaaccugaauauguguaugccucuuuccugcaccaagaacaauucucaucacuauaucaugguuggcaacgaaacagggcuggagcucacccugacaaauaccagcauuaucaaccauaaauucuguaaucuuuccgaugcucacaagaaaaaccuguacgaccaugcccucaugucuauuaucagcacguuucaccuguccauuccgaauuucaaccaguaugaggccaugagcugcgauuuuaauggaggcaagaucucugugcaguacaaccugucccacaccuaugcugucgacgccgcuaaucauuguggcacaauugccaacggggugcuccaaaccuucaugcggauggcguggggaggcagcuacaucgcccuggauucugggaagggauccugggacugcaucaugacaagcuaccaguaucuuguuauucagaacaccacgugggaagaucacugucaguuuucucgccccuccccuaucggcuaccuggggcuccugagccaaagaacacgggacauuuauaucucccgcagacuucugggaaccuucacauggacccucucugauagcgagggcaaugaaacccccggcggguacugccugacacgguggaugcugauugaggcugagcucaaauguuuuggaaacacggccguggcuaagugcaaugaaaaacaugacgaggaguucugcgauaugcugcgccuuuuugacuucuguaagcaggccaucagacggcugaaaaccgaagcgcagauguccauccagcucauuaacaaggccgucaaugcucugaucaacgaucaacuuauuaugaagaaucaucugcgcgacaucaugggcauuccuuauugcaacuacagcaaauauuguuaccucaaucacacagugaccgggaagacaucucugcccagaugcugucugguguccaacggaagcuaccucaaugaaacccacuucucugacgauaucgagcagcaggccgacaacaugaucacggagcugcuucaaaaagaauauauugaucggcagggcaagacaccucuggggcucgucgaccuguuuguuuucagcaccuccuuuuaccugaucucuauuuuccuucaccucgugaaaaucccgacccaucgccacauuacaggaaagcccugcccuaaaccccauagacugaaucacaugggcaucuguagcugcggccuguauaagcacccuggggugcccgucaaguggaaacggugaggacuagucccuguucccagagcccacuuuuuuuucuuuuuuugaaauaaaauagccugucuuucagaucuaaaaaaaaaaaaaaaaaaaaaaaaaaaaaaaaaaaaaaaaaaaaaaaaaaaaaaaaaaaaaaaaaaaaaaaaaaaaaaaaaaaaaaaaaaaaaaaaaaaa

SEQ ID NO: 40432 - RNA, 1721 nt, Artificial Sequence
  mRNA product Design a-1 (A100) comprising derived and/or modified sequence from LASV(Lassa virus/H.sapiens-wt/NGA/2016/ISTH_0009;Clade II)__AVO03571__GPCmut12 (opt5)
aggagagucccgcagucggcguccagcggcucugcuuguucgugugugugucguugcaggccuuauucaagcuuaccaugggccagaucauuaccuucuuucaagaggugccccacgucaucgaagagguuaugaacauugugcugaucgcccucagccugcuugcuauucugaaggggaucuacaauguggccacaugcggacuccugggccuugucuccuuccugcuccugugugggagaucuugcagcacgaccuauaaaggaguguacgaacugcagacacucgagcuggacauggcgucccuuaacauguguaugccucugucuugcaccaagaauaacagccaucacuauaucaugguuggcaaugaaacagggcucgagcugacccuuacaaacaccuccauuaucaaucauaaauuuuguaaccugucugaugcucacaagaaaaaucucuacgaccaugcccugaugagcauuaucuccacguuccaccugagcauuccgaacuuuaaucaguaugaggccaugucuugcgauuucaacggaggccggaucuccgugcaguacaaucucagccacucuuaugcugucgacgccgcuaaccauuguggcaccauugccaauggggugcugcaaacauuuaugcgcauggcguggggaggcuccuacaucgcccuugauagcgggaagggaucuugggacugcaucaugaccuccuaccaguaucugauuauccagaacacaaccugggaagaucacugucaguucagcagacccuccccuauuggcuaccucgggcugcuuucucaacggacgcgcgacaucuauauuagcagacggcugcucggaacauuuaccuggacacuguccgauagcgagggcaacgaaacccccggcggguacugccugacccgcuggaugcucaucgaggcugagcugaaguguuucggaaauacagccguugcuaaaugcaacgaaaagcaugacgaggaauuuugcgauaugcuuagacuguucgacuuuuguaaacaggccauccggcgccucaagacggaggcgcagaugucuauucagcugaucaauaaagccgugaacgcucuuauuaaugaucaacugaucaugaagaaccaccucagagacauuaugggcaucccuuauugcaauuacuccaaguauuguuaccugaaccacaccgucacagggaaaaccagccugccccggugcugucucgugucuaauggaagcuaccugaacgaaacacauuucuccgacgauaucgagcagcaggccgacaauaugauuaccgagcuucugcaaaaggaauauaucgaucgccagggcaaaacgccucucgggcugguggaccuguucgucuuuucuaccagcuucuaccuuauuuccaucuuucuccaccugguuaagauuccgacacauagacacaucaccggaaaacccugcccuaagccccaucggcugaaccacaugggcauuuguagcugcggccucuauaaucacccuggggugcccgugaaauggaagcgcugaggacuagucccuguucccagagcccacuuuuuuuucuuuuuuugaaauaaaauagccugucuuucagaucuaaaaaaaaaaaaaaaaaaaaaaaaaaaaaaaaaaaaaaaaaaaaaaaaaaaaaaaaaaaaaaaaaaaaaaaaaaaaaaaaaaaaaaaaaaaaaaaaaaaa

SEQ ID NO: 40433 - RNA, 1721 nt, Artificial Sequence
  mRNA product Design a-1 (A100) comprising derived and/or modified sequence from LASV(Lassa virus/H.sapiens-wt/NGA/2016/ISTH_0017;Clade II)__AVO03567__GPCmut12 (opt5)
aggagagucccgcagucggcguccagcggcucugcuuguucgugugugugucguugcaggccuuauucaagcuuaccaugggccagaucauuaccuucuuucaagaggugccccacgucaucgaagagguuaugaacauugugcugaucgcccucagccugcuugcuauucugaaggggaucuacaauguggccacaugcggacucuucggccuggucuccuuucuucugcucugugggagaucuugcagcacgaccuauaaaggaguguacgaacugcagacacuggagcucgacauggcgucccugaacauguguaugccucuuucuugcaccaagaauaacagccaucacuauaucaugguuggcaaugaaacagggcuggagcucacccugacaaacaccuccauuaucaaucauaaauucuguaaccuuucugaugcucacaagaaaaaucuguacgaccaugcccucaugagcauuaucuccacguuucaccugagcauuccgaacuucaaucaguaugaggccaugucuugcgauuuuaacggaggcaagaucuccgugcaguacaaucugagccacaccuaugcuauugacgccgcuaaccauuguggcacaaucgccaaugggguccuccaaaccuucaugcggauggcguggggaggcucuuacaucgcccuggauuccgggaagggaagcugggacugcauuaugacaucuuaccaguaucuuaucauucagaacaccacgugggaagaucacugucaguuuucccgccccagcccuaucggcuaccuggggcuccugucccaaagaacacgggacauuuauaucucucgcagacuucugggaaccuucacauggacccucagcgauuccgagggcaacgaaacccccggcggguacugccugacacgguggaugcugaucgaggcugagcucaaauguuuuggaaauacggccguggcuaagugcaacgaaaaacaugacgaggaguucugcgauaugcugcgccuuuuugacuucuguaagcaggccauuagacggcugaaaaccgaagcgcagaugagcauccagcucauuaauaaggccguuaacgcucugaucaaugaucaacuuauuaugaagaaccaucugcgcgacaucaugggcaucccuuauugcaauuacucuaaauauuguuaccucaaccacacagugaccgggaagacaucccugcccagaugcugucuggucagcaauggaucuuaccucaacgaaacccacuucagcgacgauauugagcagcaggccgacaauaugaucacggagcugcuucaaaaagaauauauggaucggcagggcaagacaccucuggggcucguggaccuguuuguguucuccaccucuuuuuaccugauuagcaucuuccuucaccucguccgcauuccgacccauagacacguuaucggaaaacccugcccuaagccccaucggcugaaccacaugggcauuuguuccugcggccuguauaaacacccuggggugcccgugaaguggaagcgcugaggacuagucccuguucccagagcccacuuuuuuuucuuuuuuugaaauaaaauagccugucuuucagaucuaaaaaaaaaaaaaaaaaaaaaaaaaaaaaaaaaaaaaaaaaaaaaaaaaaaaaaaaaaaaaaaaaaaaaaaaaaaaaaaaaaaaaaaaaaaaaaaaaaaa

SEQ ID NO: 40434 - RNA, 1721 nt, Artificial Sequence
  mRNA product Design a-1 (A100) comprising derived and/or modified sequence from LASV(Lassa virus/H.sapiens-wt/NGA/2018/ISTH_0959;Clade II)__AVV65099__GPCmut12 (opt5)
aggagagucccgcagucggcguccagcggcucugcuuguucgugugugugucguugcaggccuuauucaagcuuaccaugggccagaucauuaccuucuuucaagaggugccccacgucaucgaagagguuaugaacauugugcugaucgcccucagccugcuugcuauucugaaggggaucuacaauguggucacaugcggacucuucggccugguguccuuucuucugcucugugggagaucuugcagcacgaccuauaaaggaguuuacgaacugcagacacuggagcucgacauggccucccugaacauguguaugccucuuucuugcaccaagaauaacagccaucacuauaucauggugggcaaugaaacagggcuggagcucacccugacaaacaccuccauuaucaaucauaaauucuguaaccuuucugaugcgcacaagaaaaaucuguacgaccaugcucucaugagcauuaucuccacguuucaccugagcauuccgaacuucaaucaguaugaggccaugucuugcgauuuuaacggaggcaagaucuccguccaguacaaucugagccacgccuaugcuauugacgccgcuaaccauuguggcaccaucgccaauggggugcuccaaacauucaugcggauggcguggggaggcucuuacaucgcccuggauuccgggaagggaagcugggacugcauuaugaccucuuaccaguaucuuaucauucagaacacaaccugggaagaucacugucaguuuucccgccccagcccuaucggcuaccuggggcuccugucccaaagaacgcgggacauuuauaucucucgcagacuucugggaacauucaccuggacacucagcgauuccgagggcaacgaaacccccggcggguacugccugacccgguggaugcugaucgaggcugagcucaaauguuuuggaaauacagccguugcuaagugcaacgaaaaacaugacgaggaguucugcgauaugcugcgccuuuuugacuucuguaagcaggccauuagacggcugaaaacggaagcgcagaugagcauccagcucauuaauaaggccgugaacgcucugaucaaugaucaacuuauuaugaagaaccaucugcgcgacaucaugggcaucccuuauugcaauuacucuaaauauuguuaccucaaccacaccgucacagggaagaccucccugcccagaugcugucuggugagcaauggaucuuaccucaacgaaacacacuucagcgacgauauugagcagcaggccgacaauaugaucaccgagcugcuucaaaaagaauauauugaucggcagggcaagacgccucuggggcucguggaccuguuugucuucuccacaucuuuuuaccugaucagcauuuuccuucaccucguuaaaaucccgacccaucgccacgugauuggaaagcccugcccuaaaccccauagacugaaccacaugggcaucuguuccugcggccuguauaagcacccuggggugcccgucaaguggaaacggugaggacuagucccuguucccagagcccacuuuuuuuucuuuuuuugaaauaaaauagccugucuuucagaucuaaaaaaaaaaaaaaaaaaaaaaaaaaaaaaaaaaaaaaaaaaaaaaaaaaaaaaaaaaaaaaaaaaaaaaaaaaaaaaaaaaaaaaaaaaaaaaaaaaaa

SEQ ID NO: 40435 - RNA, 1721 nt, Artificial Sequence
  mRNA product Design a-1 (A100) comprising derived and/or modified sequence from LASV(LASV003-NIG-2008;Clade II)__AIT17580__GPCmut12 (opt5)
aggagagucccgcagucggcguccagcggcucugcuuguucgugugugugucguugcaggccuuauucaagcuuaccaugggccagaucauuaccuucuuucaagaggugccccacgucaucgaagagguuaugaacauugugcugaucgcccucagccugcuugcuauucugaaggggaucuacaauguggccacaugcggacucuucggccuggucuccuuucuucugcucugugggagaucuugcagcacgaccuauaaaggaguguacgaacugcagacacuggagcucgacauggcgucccugaacauguguaugccucuuucuugcaccaagaauaacagccaucacuauaucaugguuggcaaugaaacagggcuggagcucacccugacaaacaccuccauuaucaaucauaaauucuguaaccuuucugaugcucacaagaaaaaucuguacgaccaugcccucaugagcauuaucuccacguuucaccugagcauuccgaacuucaaucaguaugaggccaugucuugcgauuuuaacggaggcaagaucuccgugcaguacaaucugagccacaccuaugcugucgacgccgcuaaccauuguggcacaauugccaauggggugcuccaaaccuucaugcggauggcguggggaggcucuuacaucgcccuggauuccgggaagggaagcugggacugcaucaugacaucuuaccaguaucuuauuauccagaacaccacgugggaagaucacugucaguuuucccgccccagcccuauuggcuaccuggggcuccugucccaaagaacacgggacaucuauauuucucgcagacuucugggaaccuucacauggacccucagcgauuccgagagcaacgaaacccccggcggcuacugccugacacgguggaugcugaucgaggcugagcucaaauguuuugggaauacggccguugcuaagugcaacgaaaaacaugacgaggaguucugcgauaugcugcgccuuuuugacuucuguaagcaggccaucagacggcugaaagcggaagcccagaugucuauucagcucaucaauaaggcugugaacgcccugauuaaugaucaacuuaucaugaagaaccaucugcgcgacauuaugggaaucccuuauugcaauuacuccaaauauuguuaccucaaccacaccgucacaggcagaaccagccugccccggugcugucuggugucuaaugggagcuaccucaacgaaacacacuucuccgacgauaucgagcagcaggcugacaauaugauuaccgagcugcuucaaaaggaauauauggaucgccagggaaaaacgccucugggccucguggaccuguuugucuucucuaccagcuuuuaccugaucuccauuuuccuucaccucguuaagaucccgacacauagacacgugauugggaaacccugcccuaagccccaucggcugaaccacaugggaaucuguagcugcggccuguauaaacacccuggcgugcccgucaaguggaagcgcugaggacuagucccuguucccagagcccacuuuuuuuucuuuuuuugaaauaaaauagccugucuuucagaucuaaaaaaaaaaaaaaaaaaaaaaaaaaaaaaaaaaaaaaaaaaaaaaaaaaaaaaaaaaaaaaaaaaaaaaaaaaaaaaaaaaaaaaaaaaaaaaaaaaaa

SEQ ID NO: 40436 - RNA, 1721 nt, Artificial Sequence
  mRNA product Design a-1 (A100) comprising derived and/or modified sequence from LASV(LASV035-NIG-2009;Clade II)__AIT17588__GPCmut12 (opt5)
aggagagucccgcagucggcguccagcggcucugcuuguucgugugugugucguugcaggccuuauucaagcuuaccaugggccagaucauuaccuucuuucaagaggugccccacgucaucgaagagguuaugaacauugugcugaucgcccucagccugcuugcuauucugaaggggaucuacaauguggccacaugcggacucuucggccuggucuccuuucuucugcucugugggagaucuugcagcacgaccuauaaaggaguguacgaacugcagacacuggagcucgacauggcgucccugaacauguguaugccucuuucuugcaccaagaauaacagccaucacuauaucaugguuggcaaugaaacagggcuggagcucacccugacaaacaccuccauuaucaaucauaaauucuguaaccuuucugaugcucacaagaaaaaucuguacgaccaugcccucaugagcauuaucuccacguuucaccugagcauuccgaacuucaaucaguaugaggccaugucuugcgauuuuaacggaggcaagaucuccgugcaguacaaucugagccacgcuuaugccgucgacgcugccaaccauuguggcaccauugcgaauggggugcuccaaacauucaugcggauggccuggggaggcucuuacaucgcucuggauuccgggaagggaagcugggacugcaucaugaccucuuaccaguaucuuauuauccagaacacaaccugggaagaucacugucaguuuucccgccccagcccuauuggcuaccuggggcuccugucccaaagaacgcgggacaucuauauuucucgcagacuucugggaacauucaccuggacacucagcgauuccgagggcaacgaaacccccggcggguacugccugacccgguggaugcugaucgaggccgagcucaaauguuuuggaaauacagcuguugccaagugcaacgaaaaacaugacgaggaguucugcgauaugcugcgccuuuuugacuucuguaagcaggcgaucagacggcugaaagccgaagcucagaugagcauucagcucaucaauaaggccgugaacgcucugauuaaugaucaacuuaucaugaagaaccaucugcgcgacauuaugggcaucccuuauugcaauuacucuaaauauuguuaccucaaccacacggucaccgggaagacaucccugcccagaugcugucuggugagcaauggaucuuaccucaacgaaacccacuucagcgacgauaucgagcagcaggccgacaauaugauuacagagcugcuucaaaaagaauauaucgaucggcagggcaagaccccucuggggcucguggaccuguuugucuucuccacgucuuuuuaccugauuagcaucuuccuucaccucguuaaaauuccgacacaucgccacgugaucggaaagcccugcccuaaaccccauagacugaaccacaugggcauuuguuccugcggccuguauaagcacccuggggugcccgucaaguggaaacggugaggacuagucccuguucccagagcccacuuuuuuuucuuuuuuugaaauaaaauagccugucuuucagaucuaaaaaaaaaaaaaaaaaaaaaaaaaaaaaaaaaaaaaaaaaaaaaaaaaaaaaaaaaaaaaaaaaaaaaaaaaaaaaaaaaaaaaaaaaaaaaaaaaaaa

SEQ ID NO: 40437 - RNA, 1721 nt, Artificial Sequence
  mRNA product Design a-1 (A100) comprising derived and/or modified sequence from LASV(LASV1000-NIG-2009;Clade II)__AIT17782__GPCmut12 (opt5)
aggagagucccgcagucggcguccagcggcucugcuuguucgugugugugucguugcaggccuuauucaagcuuaccaugggccagaucauuaccuucuuucaagaggugccccacgucaucgaagagguuaugaacauugugcugaucgcccucagccugcuugcuauucugaaggggaucuacaauguggccacaugcggacucuucggccuggucuccuuucuucugcucugugggagaucuugcagcacgaccuauaaaggaguguacgaacugcagacacuggagcucgacauggcgucccugaacauguguaugccucuuucuugcaccaagaauaacagccaucacuauaucaugguuggcaaugaaacagggcuggagcucacccugacaaacaccuccauuaucaaucauaaauucuguaaccuuucugaugcucacaagaaaaaucuguacgaccaugcccucaugagcauuaucuccacguuucaccugagcauuccgaacuucaaucaguaugaggccaugucuugcgauuuuaacggaggcaagaucuccgugcaguacaaucugagccacaccuaugcugucgacgccgcuaaccauuguggcacaauugccaauggggugcuccaaaccuucaugcggauggcguggggaggcucuuacaucgcccuggauuccgggaagggaagcugggacugcaucaugacaucuuaccaguaucuuauuauccagaacaccacgugggaagaucacugucaguuuucccgccccagcccuauuggcuaccuggggcuccugucccaaagaacacgggacaucuauauuucucgcagacuucugggaaccuucacauggacccucagcgauuccgagggcaacgaaacccccggcggguacugccugacacgguggaugcugaucgaggcugagcucaaauguuuuggaaauacggccguugcuaagugcaacgaaaaacaugacgaggaguucugcgauaugcugcgccuuuuugacuucuguaagcaggccaucaaaagacugaagaccgaagcgcagaugagcauucagcucaucaauaaggccgugaacgcucugauuaaugaucaacuuaucaugaaaaaccaucugcgggacauuaugggcaucccuuauugcaauuacucuaaguauuguuaccucaaccacacagucaccgggaaaacaucccugccccgcugcugucuggugagcaauggaucuuaccucaacgaaacccacuucagcgacgauaucgagcagcaggccgacaauaugauuacggagcugcuucaaaaggaauauaucgauagacagggcaaaacaccucuggggcucguggaccuguuugucuucuccaccucuuuuuaccugauuagcaucuuccuucaccucguuaagauuccgacccaucggcacguggugggaaaacccugcccuaagccccaucgccugaaccacaugggcaucuguuccugcggccuguauaagcacccugggguccccgugaaauggaagagaugaggacuagucccuguucccagagcccacuuuuuuuucuuuuuuugaaauaaaauagccugucuuucagaucuaaaaaaaaaaaaaaaaaaaaaaaaaaaaaaaaaaaaaaaaaaaaaaaaaaaaaaaaaaaaaaaaaaaaaaaaaaaaaaaaaaaaaaaaaaaaaaaaaaaa

SEQ ID NO: 40438 - RNA, 1721 nt, Artificial Sequence
  mRNA product Design a-1 (A100) comprising derived and/or modified sequence from LASV(LASV221-NIG-2010;Clade II)__AIT17624__GPCmut12 (opt5)
aggagagucccgcagucggcguccagcggcucugcuuguucgugugugugucguugcaggccuuauucaagcuuaccaugggccagaucauuaccuucuuucaagaggugccccacgucaucgaagagguuaugaacauugugcugaucgcccucagccugcuugcuauucugaaggggaucuacaauguggccacaugcggacucuucggccuggucuccuuucuucugcucugugggagaucuugcagcacgaccuauaaaggaguguacgaacugcagacacuggagcucgacauggcgucccugaacauguguaugccucuuucuugcaccaagaauaacagccaucacuauaucaugguuggcaaugaaacagggcuggagcucacccugacaaacaccuccauuaucaaucauaaauucuguaaccuuucugaugcucacaagaaaaaucuguacgaccaugcccucaugagcauuaucuccacguuucaccugagcauuccgaacuucaaucaguaugaggccaugucuugcgauuuuaacggaggcaagaucuccgugcaguacaaucugagccacaccuaugcuauugacgccgcuaaccauuguggcacaaucgccaaugggguccuccaaaccuucaugcggauggcguggggaggcucuuacaucgcccuggauuccgggaagggaagcugggacugcauuaugacaucuuaccaguaucuuaucauucagaacaccacgugggaagaucacugucaguuuucccgccccagcccuaucggcuaccuggggcuccugucccaaagaacacgggacauuuauaucucucgcagacuucugggaaccuucacauggacccucagcgauuccgagggcaacgaaacccccggcggguacugccugacacgguggaugcugaucgaggcugagcucaaauguuuuggaaauacggccguggcuaagugcaacgaaaaacaugacgaggaguucugcgauaugcugcgccuuuuugacuucuguaagcaggccauuagacggcugaaaaccgaagcgcagaugagcauccagcucauuaauaaggccguuaacgcucugaucaaugaucaacuuauuaugaagaaccaucugcgcgacaucaugggcaucccuuauugcaauuacucuaaauauuguuaccucaaccacacagugaccgggaagacaucccugcccagaugcugucuggucagcaauggaucuuaccucaacgaaacccacuucagcgacgauauugagcagcaggccgacaauaugaucacggagaugcugcaaaaagaauauauggaucggcagggcaagacaccucuugggcugguggaccucuuuguguucuccaccucuuuuuaccugauuagcaucuuccugcaccuugucaaaauuccgacccaucgccacguuaucggaaagcccugcccuaaaccccauagacucaaccacaugggcauuuguuccugcggccuguauaagcacccuggggugcccgugaaguggaaacggugaggacuagucccuguucccagagcccacuuuuuuuucuuuuuuugaaauaaaauagccugucuuucagaucuaaaaaaaaaaaaaaaaaaaaaaaaaaaaaaaaaaaaaaaaaaaaaaaaaaaaaaaaaaaaaaaaaaaaaaaaaaaaaaaaaaaaaaaaaaaaaaaaaaaa

SEQ ID NO: 40439 - RNA, 1721 nt, Artificial Sequence
  mRNA product Design a-1 (A100) comprising derived and/or modified sequence from LASV(LASV237-NIG-2010;Clade II)__AIT17638__GPCmut12 (opt5)
aggagagucccgcagucggcguccagcggcucugcuuguucgugugugugucguugcaggccuuauucaagcuuaccaugggccagaucauuaccuucuuucaagaggugccccacgucaucgaagagguuaugaacauugugcugaucgcccucagccugcuugcuauucugaaggggaucuacaauguggccacaugcggacucuucggccuggucuccuuucuucugcucugugggagaucuugcagcacgaccuauaaaggaguguacgaacugcagacacuggagcucgacauggcgucccugaacauguguaugccucuuucuugcaccaagaauaacagccaucacuauaucaugguuggcaaugaaacagggcuggagcucacccugacaaacaccuccauuaucaaucauaaauucuguaaccuuucugaugcucacaagaaagaccuguacgaucaugcccucaugagcauuaucuccacguuucaccugagcauuccgaauuucaaccaguaugaggccaugucuugcgacuuuaauggaggcaagaucuccgugcaguacaaccugagccacaccuaugcugucgaugccgcuaaucauuguggcacaauugccaacggggugcuccaaaccuucaugcggauggcguggggaggcucuuacaucgcccuggacuccgggaagggaagcugggauugcaucaugacaucuuaccaguaucuuauuauccagaauaccacgugggaagaccacugucaguuuucccgccccagcccuauuggcuaccuggggcuccugucccaaagaacacgggauaucuauauuucucgcagacuucugggaaccuucacauggacccucagcgacuccgagggcaacgaaacccccggcggguacugccugacacgguggaugcugaucgaggcugagcucaaauguuuuggaaacacggccguugcuaagugcaaugaaaaacaugaugaggaguucugcgacaugcugcgccuuuuugauuucuguaagcaggccaucagacggcugaaaaccgaagcgcagaugagcauucagcucaucaacaaggccgugaaugcucugauuaacgaccaacuuaucaugaagaaucaucugcgcgacauuaugggcaucccuuauugcaacuacucuaaauauuguuaccucaaucacacagucaccgggaagacaucccugcccagaugcugucuggugagcaacggaucuuaccucaaugaaacccacuucagcgaugacaucgagcagcaggccgauaacaugauuacggagcugcuucaaaaagaauauauggaccggcagggcaagacaccucuggggcucguggaucuguuugucuucuccaccucuuuuuaccugaucagcauuuuccuucaccucaucaaaauuccgacccaucgccacaucacaggaaagcccugcccuaaaccccauagacugaaucacaugggcauuuguuccugcggccuguauaagcacccugggguucccgugaaguggaaacggugaggacuagucccuguucccagagcccacuuuuuuuucuuuuuuugaaauaaaauagccugucuuucagaucuaaaaaaaaaaaaaaaaaaaaaaaaaaaaaaaaaaaaaaaaaaaaaaaaaaaaaaaaaaaaaaaaaaaaaaaaaaaaaaaaaaaaaaaaaaaaaaaaaaaa

SEQ ID NO: 40440 - RNA, 1721 nt, Artificial Sequence
  mRNA product Design a-1 (A100) comprising derived and/or modified sequence from LASV(LASV253-NIG-2011;Clade II)__AIT17670__GPCmut12 (opt5)
aggagagucccgcagucggcguccagcggcucugcuuguucgugugugugucguugcaggccuuauucaagcuuaccaugggccagaucauuaccuucuuucaagaggugccccacgucaucgaagagguuaugaacauugugcugaucgcccucagccugcuugcuauucugaaggggaucuacaauguggccacaugcggacucuucggccuggucuccuuucuucugcucugugggagaucuugcagcacgaccuauaaaggaguguacgaacugcagacacuggagcucgacauggcgucccugaacauguguaugccucuuucuugcaccaagaauaacagccaucacuauaucaugguuggcaaugaaacagggcuggagcucacccugacaaacaccuccauuaucaaucauaaauucuguaaccuuucugaugcucacaagaaaaaucuguacgaccaugcccucaugagcauuaucuccacguuucaccugagcauuccgaacuucaaucaguaugaggccaugucuugcgauuuuaacggaggcaagaucuccgugcaguacaaucugagccacaccuaugcugucgacgccgcuaaccauuguggcacaauugccaauggggugcuccaaaccuucaugcggauggcguggggaggcucuuacaucgcccuggauuccgggaagggaagcugggacugcaucaugacaucuuaccaguaucuuauuauccagaacaccacgugggaagaucacugucaguuuucccgccccagcccuauuggcuaccuggggcuccugucccaaagaacacgggacaucuauauuucucgcagacuucugggaaccuucacauggacccucagcgauuccgagggcaacgaaacccccggcggguacugccugacacgguggaugcugaucgaggcugagcucaaauguuuuggaaauacggccguugcuaagugcaacgaaaaacaugacgaggaguucugcgauaugcugcgccuuuuugacuucuguaagcaggccaucagacggcugaaagcggaagcccagaugagcauucagcucaucaauaaggcugugaacgcccugauuaaugaucaacuuaucaugaagaaccaucugcgcgacauuaugggcaucccuuauugcaauuacucuaaauauuguuaccucaaccacaccgucacagggagaaccucccugccccggugcugucuggugagcaauggaucuuaccucaacgaaacacacuucagcgacgauaucgagcagcaggcugacaauaugauuaccgagcugcuucaaaaggaauauaucgaucgccagggcaaaacgccucuggggcucguggaccuguuugucuucuccacaucuuuuuaccugauuagcaucuuccuucaccucguuaagauuccgacccauagacacaucauuggaaaacccugcccuaagccccaucggcugaaccacaugggcaucuguuccugcggccuguauaaacacccuggggugcccgugaaguggaagcgcugaggacuagucccuguucccagagcccacuuuuuuuucuuuuuuugaaauaaaauagccugucuuucagaucuaaaaaaaaaaaaaaaaaaaaaaaaaaaaaaaaaaaaaaaaaaaaaaaaaaaaaaaaaaaaaaaaaaaaaaaaaaaaaaaaaaaaaaaaaaaaaaaaaaaa

SEQ ID NO: 40441 - RNA, 1721 nt, Artificial Sequence
  mRNA product Design a-1 (A100) comprising derived and/or modified sequence from LASV(LASV254-NIG-2011;Clade II)__AIT17674__GPCmut12 (opt5)
aggagagucccgcagucggcguccagcggcucugcuuguucgugugugugucguugcaggccuuauucaagcuuaccaugggccagaucauuaccuucuuucaagaggugccccacgucaucgaagagguuaugaacauugugcugaucgcccucagccugcuugcuauucugaaggggaucuacaauguggccacaugcggacucuucggccuggucuccuuucuucugcucugugggagaucuugcagcacgaccuauaaaggaguguacgaacugcagacacuggagcucgacaugaccaaccugaauauguguaugccucuuuccugcacaaagaacaauucucaucacuauaucaugguuggcaacgaaaccgggcuggagcucacacugaccaauacgagcauuaucaaccauaaauucuguaaucuuuccgaugcgcacaagaaaaaccuguacaaucaugcucucaugucuauuaucagcaccuuucaccuguccauuccgaacuucaaucaguaugaggccaugagcugcgacuuuaacggaggcaagaucucugugcaguacaaucugucccacagcuaugccgucgaugcugccaaccauuguggcacaauugcuaacggggugcuccaaaccuucaugcggauggccuggggaggcucuuacaucgcgcuggacuccgggaagggaaauugggauugcaucaugacaagcuaccaguaucuuauuauccagaacaccacgugggaagaccacugucaguuuucucgccccuccccuauuggcuaccuggggcuccugagccaaagaacacgggauaucuauauuucccgcagacuucugggaaccuucacauggacccucucugacagcgagggcaaugaaacccccggcggguacugccugacacgguggaugcugaucgaggccgagcucaaauguuuuggaaacacggcuguugccaagugcaaugaaaaacaugaugaggaguucugcgacaugcugcgccuuuuugauuucuguaagcaggcuaucagacggcugaaaaccgaagcccaggcgaacauucagcucaucaauaaggccgugaacgcucugauuaaugaccaacuuaucaugaagaaccaucugcgcgauauuaugggcaucccuuauugcaauuacuccaaauauuguuaccucaaccacacagucaccgggaagacaagccugcccagaugcugucuggugucuaauggauccuaccucaacgaaacccacuucagcgacgacaucgagcagcaggccgauaauaugauuacggagcugcuucaaaaagaauauauggaccggcagggcaagacaccucuggggcucguggaucuguuugucuucucuaccagcuuuuaccugaucuccauuuuccuucaccucguuaaaaucccgacccaucgccacgugauuggaaagcccugcccuaaaccccauagacugaaccacaugggcaucuguucuugcggccuguauaagcacccuggggugcccgucaaguggaaacggugaggacuagucccuguucccagagcccacuuuuuuuucuuuuuuugaaauaaaauagccugucuuucagaucuaaaaaaaaaaaaaaaaaaaaaaaaaaaaaaaaaaaaaaaaaaaaaaaaaaaaaaaaaaaaaaaaaaaaaaaaaaaaaaaaaaaaaaaaaaaaaaaaaaaa

SEQ ID NO: 40442 - RNA, 1721 nt, Artificial Sequence
  mRNA product Design a-1 (A100) comprising derived and/or modified sequence from LASV(Nig08-A19;Clade III)__ADU56618__GPCmut12 (opt5)
aggagagucccgcagucggcguccagcggcucugcuuguucgugugugugucguugcaggccuuauucaagcuuaccaugggccagaucgugaccuucuuucaagaggucccccacguuauugaagaggugaugaacaucgugcugauugcccucagcauccuggcuauucuuaaggggcuguacaauaucgccacaugcggacucaucggccuggucacguuccuucugcucuccgggagaucuuguagcaugaccuauaaaggaguguacgaacugcagacacuggagcucaacaugaauacccugaacaugugcaugccucuuuccuguacaaagaauaacucucaucacuauauuaugguuggcaaugaaaccgggcuggagcucacacugaccaacacgagccuucugcaucacaaauuuugcaaucucuccgacgcgcauaagaaaaaccuguacgaucacacccugaugucuaucauuagcacauuccaccucuccaucccgaauuuuaaccaguaugaggcuaugagcugugacuucaauggaggcaagauuaccgugcaguacaaccugucucauuccuaugccaucgaugccgcuaaucacugcggcacagucgccaacggggugcuucaaaccuuuaugcggauggcuuggggaggcagcuacauugcccuggacucugggcgcggaaagugggauuguaucaugacguccuaccaguaucucaucauucagaacacaaccugggaagaccauugccaguucagcagacccucuccuaucggcuaccuggggcuucugucccaacggacacgcgauauuuauaucagcagacggcuccugggaaccuuuaccuggacacuguccgacucugagggcaaugaaacgcccggcggguacugucucacccgcuggaugcugauugaggcggagcuuaaaugcuucggaaacacagccguugcuaaguguaaugaaaaacacgaugaggaauuuugcgacaugcugagacucuucgauuuuugcaagcaggccauccggcgccugaaagcugaggcccagaugagcauccagcuuauuaacaaggcggugaaugcccugaucaacgaccaacucauuaugaagaaucaccugagagauaucaugggcauuccuuauuguaacuacuccaaauauugcuaccugaaucauaccagcacagggcggaccucucucccccgcuguugccuggucuccaacggaagcuaccuuaaugaaacgcacuucucugacgacaucgagcagcaggcugauaacaugaucacagagaugcugcaaaaggaauaucucgacagacagggcaaaaccccucuggggcugguggaucuuuucguguuuagcaccuccuucuaccucauuucuaucuuucugcaucuggucaagauuccgacacaccggcauaucguuggaaaacccuguccuaagccccaccgccucaaucacaugggcauuugcagcuguggccuguauaaacagccuggggugcccgugagauggaagcggugaggacuagucccuguucccagagcccacuuuuuuuucuuuuuuugaaauaaaauagccugucuuucagaucuaaaaaaaaaaaaaaaaaaaaaaaaaaaaaaaaaaaaaaaaaaaaaaaaaaaaaaaaaaaaaaaaaaaaaaaaaaaaaaaaaaaaaaaaaaaaaaaaaaaa

SEQ ID NO: 40443 - RNA, 1724 nt, Artificial Sequence
  mRNA product Design a-1 (A100) comprising derived and/or modified sequence from LASV(G1180-SLE-2010;Clade IV)__AIT17168__GPCmut12 (opt5)
aggagagucccgcagucggcguccagcggcucugcuuguucgugugugugucguugcaggccuuauucaagcuuaccaugggccagaucgugaccuucuuucaagaggucccccacguuauugaagaggugaugaacaucgugcugauugcccucagcauccuggcuguccuuaaggggcuguacaauuucgccacaugcggacucgugggccugcuuacguuucugcuccugugugggagauccugcaccgcgucucgguauaaaggaguuuacgaacugcagacacucgagcugaacauggaaacccuuaauauguguaugccucugagcugcacaaagaacaauucccaucacuauauuauggugggcaacgagaccgggcucgagcugacacuuaccaauacgucuaucaucaaccauaaauucuguaaucugagcgacgcucacaagaaaaaccucuacgaucaugcccugauguccauuaucucuaccuuucaccugagcauuccgaauuucaaccaguaugaagccauguccugcgacuuuaauggaggcaagaucagcguccaguacaaccucucucacuccuaugcuggcgaugccgcuaaucauugugggacaguggccaacggaguucugcaaaccuucaugcgcauggcguggggcgggagcuacauugcccuugacucuggacacggcuccugggauugcaucaugacaagcuaccaguaucugauuauccagaacaccacgugggaggaccauugucaguuuucuagacccuccccuaucggguaccucggacugcuuagccaacggacacgcgauauuuauaucuccagacggcugcucggcaccuucacauggacccugucugacagcgaaggcaaggauacccccgggggauacugccugacacgcuggaugcucauugaggcugagcugaaauguuuuggcaauacggccguggcuaagugcaacgaaaaacacgacgaggaguucugcgauaugcuuagacuguuugacuucuguaagcaggccauccagcggcucaaagcggaagcccagauguccauucaacugaucaauaaggcugucaacgcccuuaucaaugaucagcugauuaugaagaaccaccuccgcgacaucauggggauuccuuauugcaauuacagcaaauauuguuaccugaaccauaccacaaccggaaagacaucucugcccaaaugcugucucguguccaauggcagcuaccugaacgaaacccacuucucugacgauaucgagcagcaagcugacaauaugauuacggagaugcuucagaaggaauauauggagagacaggggaaaacaccucugggacucguggaucuguuugucuucagcaccuccuuuuaccugaucucuaucuuccuucaucucguuaagauuccgacccaccggcauaucgugggcaaaagcugccccaagccucaccgccugaaccacaugggcauuuguuccugcgggcuguauaagcagcccggagugccugucaaauggaagagaugaggacuagucccuguucccagagcccacuuuuuuuucuuuuuuugaaauaaaauagccugucuuucagaucuaaaaaaaaaaaaaaaaaaaaaaaaaaaaaaaaaaaaaaaaaaaaaaaaaaaaaaaaaaaaaaaaaaaaaaaaaaaaaaaaaaaaaaaaaaaaaaaaaaaa

SEQ ID NO: 40444 - RNA, 1724 nt, Artificial Sequence
  mRNA product Design a-1 (A100) comprising derived and/or modified sequence from LASV(G1442-SLE-2011;Clade IV)__AIT17180__GPCmut12 (opt5)
aggagagucccgcagucggcguccagcggcucugcuuguucgugugugugucguugcaggccuuauucaagcuuaccaugggccagaucgugaccuucuuucaagaggucccccacguuauugaagaggugaugaacaucgugcugauugcccucagcauccuggcuguccuuaaggggcuguacaauguggccacaugcggacucauuggccugguuacguuccuucugcucugugggagauccugcaccacaacccuguauaaaggaguguacgaacugcagacacucgagcugaacauggaaacccuuaauauguguaugccucugucuugcacaaagaacaauagccaucacuauauccgggucggcaacgagaccgggcucgagcugacgcuuaccaauacauccaucauuaaccauaaauuuuguaaucugucugacgcgcacaagaaaaaccucuacgaucaugcucugaugagcaucauuuccaccuuccaccugucuaucccgaauuuuaaccaguaugaagccaugagcugcgacuucaauggaggcaagauuuccgugcaguacaaccucagccacucuuaugccggcgaugcugccaaucauugugggacaguugcuaacggagugcugcaaaccuuuaugcgcauggccuggggcggguccuacaucgcgcuugacagcggaagaggcaacugggauugcauuaugacgucuuaccaguaucugaucauccagaauacaaccugggacgaucacugucaguucucccggcccagcccuauuggguaccucggacugcuuucucaacgcacaagagacgucuauaucucccggcgccugcucggcaccuuuaccuggacacugagcgauuccgagggcaaggacacgcccgggggauacugccugaccagauggaugcucauugaagccgagcugaaauguuucggcaacacagcuguggccaagugcaaugagaaacaugaugaagaguuuugcgacaugcuucggcuguucgauuuuuguaagcaggcuauccagcgccucaaagccgaagcgcagaugucuauucaacugaucaacaaggccgugaaugcucuuaucaacgaccagcugauuaugaagaaucaccucagagacaucauggggauuccuuauugcaacuacagcaaauauuguuaccugaauaacaccgccacaggaaagaccucccugcccaaaugcugucucaucagcaauggcucuuaccugaacgagacgcacuucuccgaugacauugaacaggaggcugauaauaugaucacagagaugcuucaaaaggaauauauggagcggcaggggaaaaccccucugggacucgucgaccuguucguuuuuagcaccucuuucuaccugaucagcauuuuucuucaucucgugaagaucccgacacaccgccauauugugggcaaauccugccccaagccucacagacugaaccauaugggcaucuguucuugcgggcuguauaagcagcccggagucccugugcgguggaaacgcugaggacuagucccuguucccagagcccacuuuuuuuucuuuuuuugaaauaaaauagccugucuuucagaucuaaaaaaaaaaaaaaaaaaaaaaaaaaaaaaaaaaaaaaaaaaaaaaaaaaaaaaaaaaaaaaaaaaaaaaaaaaaaaaaaaaaaaaaaaaaaaaaaaaaa

SEQ ID NO: 40445 - RNA, 1724 nt, Artificial Sequence
  mRNA product Design a-1 (A100) comprising derived and/or modified sequence from LASV(G3010-SLE-2013;Clade IV)__AIT17344__GPCmut12 (opt5)
aggagagucccgcagucggcguccagcggcucugcuuguucgugugugugucguugcaggccuuauucaagcuuaccaugggccagaucgugaccuucuuucaagaggucccccacguuauugaagaggugaugaacaucgugcugauugcccucagcauccuggcuguccuuaaggggcuguacaauuucgccacaugcggacucgugggccugguuacguuucuucugcucugugggagauccugcaccacaucucuguauaaaggaguguacgaacugcagacccucgagcugaacauggaaacacuuaauauguguaugccucugagcugcaccaagaacaauucccaucacuauauuauggucggcaacgagacagggcucgagcugacccuuacgaauaccucuaucaucaaccauaaauucuguaaucugagcgacgcgcacaagaaaaaccucuacaaucaugcucugauguccauuaucucuacauuucaccugagcauuccgaacuucaaucaguaugaagccauguccugcgauuuuaacggaggcaagaucagcgugcaguacaaucucucucacuccuaugccggcgacgcugccagccauugugggaccguugcuaacggagugcugcaaacauucaugcggauggccuggggcgggucuuacauugcgcuugauuccggauacggcaagugggacugcaucaugaccagcuaucaguaccugauuauccagaacacgacaugggaggaucacugucaguuuucucgccccuccccuaucggguaucucggacugcuuagccaaagaacccgggacauuuacaucucccgcagacugcucggcacauucaccuggacccugucugauagcgaaggcaaagacacacccgggggauauugccugacgcgguggaugcucauugaggccgagcugaaguguuuuggcaauaccgcugucgccaaaugcaacgaaaagcaugaugaggaguucugcgacaugcuucgccuguuugauuucuguaaacaggcuauccagagacucaagacagaagcccagauguccauucaacugaucaauaaggcggugaacgcccuuaucaaugaccagcugauuaugaaaaaccaccuccgggauaucauggggauuccuuacugcaauuauagcaaguacuguuaccugaaccacaccacaaccggaaaaacgucucugcccaagugcugucucguguccaauggcagcuaucugaacgaaacacauuucucugacgacaucgagcagcaagcugauaauaugauuaccgagaugcuucagaaagaauacauggagcgccaggggaagaccccucugggacucgucgaccuguuuguuuucagcacauccuuuuaucugaucucuaucuuccuucaccucgugaaaauuccgacccauagacacaucgugggcaagagcugccccaagccucaucggcugaaccacaugggcauuuguuccugcgggcuguacaaacagcccggagucccugugcgcuggaagagaugaggacuagucccuguucccagagcccacuuuuuuuucuuuuuuugaaauaaaauagccugucuuucagaucuaaaaaaaaaaaaaaaaaaaaaaaaaaaaaaaaaaaaaaaaaaaaaaaaaaaaaaaaaaaaaaaaaaaaaaaaaaaaaaaaaaaaaaaaaaaaaaaaaaaa

SEQ ID NO: 40446 - RNA, 1724 nt, Artificial Sequence
  mRNA product Design a-1 (A100) comprising derived and/or modified sequence from LASV(G502-SLE-2009;Clade IV)__AIT17126__GPCmut12 (opt5)
aggagagucccgcagucggcguccagcggcucugcuuguucgugugugugucguugcaggccuuauucaagcuuaccaugggccagaucgugaccuucuuucaagaggucccccacguuauugaagaggugaugaacaucgugcugauugcccucagcauccuggcuguccuuaaggggcuguacaauuucgccacaugcggacucgugggccugcuuacguuucugcuccugugugggagauccugcaccacaggacuguauaaaggcguuuacgaacuccagacccuggagcuuaacauggaaacacugaauauguguaugccucucucuugcaccaagaacaauagccaucacuauauuaugguggggaacgagacaggacuggagcuuacccugacgaauaccuccaucaucaaccauaaauucuguaaucucucugacgcgcacaagaaaaaccuguacgaucaugcucugaugagcauuaucuccacauuucaccucucuauuccgaauuucaaccaguaugaagccaugagcugcgacuuuaauggcggcaagaucuccguccaguacaaccugagccacucuuaugccggggaugcugccgaccauuguggaaccguggcuaauggcguucuucaaacauucaugcggauggccuggggaggguccuacauugcgcuggauagcggccgcgggagaugggacugcaucaugaccucuuaccaguaucucauuauccagaacacgacaugggaggaucacugucaguuuucccggcccagcccuaucggauaccugggccuucugucucaacgcaccagagacauuuauaucucccggcgccuccugggcacauucaccuggacccugagcgauuccgaagggaaggacacacccggaggcuacugccucacgagauggaugcugauugaggccgagcuuaaauguuuugggaacaccgcuguggccaagugcaaugaaaaacaugaugaggaguucugcgacaugcugcggcucuuugauuucuguaagcaggcuauccagcgccugaaagccgaagcgcagaugucuauucaacuuaucaacaaggccgucaaugcucugaucaacgaccagcucgugaugaagaaucaccugagagacauuaugggaaucccuuauugcaacuacagccgguauuguuaccugaaucacacaaccacaggccgcaccucccuccccaaaugcugucuggugagcaacgggucuuaccuuaaugaaacgcauuucuccgaugacauugagcagcaagccgauaacaugaucacagagaugcugcagaaggaauauauggagagacagggaaaaaccccucucggccuggucgaccuguuuguuuucagcaccucuuuuuaccuuauuagcaucuuccuccaccuggugaagaucccgacacaucggcacauugugggcaaauccugccccaagccucaucgccugaaucacauggggaucuguucuugcggacucuauaaacagcccggcgucccugugaaguggaagagaugaggacuagucccuguucccagagcccacuuuuuuuucuuuuuuugaaauaaaauagccugucuuucagaucuaaaaaaaaaaaaaaaaaaaaaaaaaaaaaaaaaaaaaaaaaaaaaaaaaaaaaaaaaaaaaaaaaaaaaaaaaaaaaaaaaaaaaaaaaaaaaaaaaaaa

SEQ ID NO: 40447 - RNA, 1724 nt, Artificial Sequence
  mRNA product Design a-1 (A100) comprising derived and/or modified sequence from LASV(G733-SLE-2010;Clade IV)__AIT17154__GPCmut12 (opt5)
aggagagucccgcagucggcguccagcggcucugcuuguucgugugugugucguugcaggccuuauucaagcuuaccaugggccagaucgugaccuucuuucaagaggucccccacguuauugaagaggugaugaacaucgugcugauugcccucagcauccuggcuguccuuaaggggcuguacaauuucgccacaugcggaauugugggccucguuuccuuucugcuucugugugggagaucuugcacgaccagccucuauaaaggaguguacgaacugcagacacuggagcucaacauggaaacccugaauauguguaugccucuuuccugcacaaagaacaauucucaucacuauaucauggucggcaacgagaccgggcuggagcucacacugaccaauacgagcaucauuaaccauaaauucuguaaucuuuccgacgcgcacaagaaaaaccuguacgaucaugcucucaugucuaucauuagcaccuuucaccuguccaucccgaauuucaaccaguaugaagccaugagcugcgacuuuaauggaggcaagauuucugugcaguacaaccugucccacagcuaugccggcgaugcugccaaucauugugggacaaucgcuaacggaguucuccaaaccuucaugcggauggccuggggcgggucuuacauugcgcuggacuccggacgcgauagaugggacugcaucaugacaagcuaccaguaucuuaucauucagaacaccacgugggaggaucacugucaguuuucucggcccuccccuaucggcuaccuggggcuccugagccaacgcacaagagacauuuauaucucccggcgccuucugggaaccuucacauggacccucucugauagcgaaggcaaggacacccccggcggguacugccugacaagauggaugcugauugaggccgagcucaaauguuuuggaaauacggcuguggccaagugcaacgaaaaacaugaugaggaguucugcgacaugcugcggcuuuuugauuucuguaagcaggcuauccagcgccugaaagccgaagcgcagauguccauccaacucauuaauaaggccgucaacgcucugaucaaugaccagcuuauuaugaagaaccaccugagagacaucaugggcauuccuuauugcaauuacagcaaauauuguuaccucaaccacaccacaaccgggaagacaucucugcccaaaugcugucugguguccaauggaagcuaccucaacgaaacccauuucucugaugacaucgagcagcaagccgauaauaugaucacggagaugcugcagaaggaauauauggagcggcagggcaaaacaccucuugggcugguggaccucuuugucuucagcaccuccuuuuaccugauuucuaucuuccugcaccuuguuaagauuccgacccaucgccacguggugggaaaaagcugccccaagccucauagacucaaccacaugggcaucuguuccugcggccuguaugggcagcccggagucccugugaaguggaaacggugaggacuagucccuguucccagagcccacuuuuuuuucuuuuuuugaaauaaaauagccugucuuucagaucuaaaaaaaaaaaaaaaaaaaaaaaaaaaaaaaaaaaaaaaaaaaaaaaaaaaaaaaaaaaaaaaaaaaaaaaaaaaaaaaaaaaaaaaaaaaaaaaaaaaa

SEQ ID NO: 40448 - RNA, 1724 nt, Artificial Sequence
  mRNA product Design a-1 (A100) comprising derived and/or modified sequence from MOPV/LASV reassortant(IGS-1;Clade IV)__AFY05576__GPCmut12 (opt5)
aggagagucccgcagucggcguccagcggcucugcuuguucgugugugugucguugcaggccuuauucaagcuuaccaugggccagaucgugaccuucuuucaagaggucccccacguuauugaagaggugaugaacaucgugcugauugcccucagcguccuggcugugcuuaaggggcuguacaauuucgccacaugcggacucguuggccuggugacguuucuucugcucugugggagauccugcaccacaucucuguauaaaggagucuacgaacugcagacccucgagcugaacauggaaacacuuaauauguguaugccucugagcugcaccaagaacaauucccaucacuauaucauggugggcaacgagacagggcucgagcugacccuuacgaauaccucuauuaucaaccauaaauucuguaaucugagcgacgcgcacaagaaaaaccucuacgaucaugcucugauguccaucauuucuacauuucaccugagcaucccgaauuucaaccaguaugaagccauguccugcgacuuuaauggaggcaagauuagcguucaguacaaccucucucacuccuaugccggcgaugcugccaaucauugugggaccguggcuaacggaguccugcaaacauucaugcggauggccuggggcgggagcuacaucgcgcuugacucuggacgcggcaacugggauugcauuaugaccuccuaccaguaucugaucauucagaauacgacaugggaggaccacugucaguuuagcagacccucuccuaucggguaccucggacugcuuucccaacggacccgcgauaucuauauuagcagacggcugcucggcacauucaccuggacccuguccgacucugaaggcgaggauacacccgggggauacugccugacgcgcuggaugcucaucgaggccgaacugaaguguuuuggcaacaccgcuguggccaaaugcaaugagaagcaugacgaagaguucugcgauaugcuuagacuguuugacuucuguaaacaggcuauucagcggcucaaggccgaagcgcagaugagcauccaacugauuaacaaagccgugaaugcucuuaucaacgaucagcugaucaugaagaaucaccuccgcgacauuauggggaucccuuauugcaacuacuccaaguauuguuaccugaaucacacaaccacaggaagaaccagccugcccaaaugcugucucgucucuaacggcuccuaccugaaugagacgcauuucagcgacgauauugagcagcaagccgacaacaugaucacagaaaugcuucagaaggaguauauggaacggcaggggaaaaccccucugggacucguugaucuguuuguguucucuaccagcuuuuaccugauuuccaucuuccuucaccucgugaagaucccgacacaucgccacauugucggcaaaucuugccccaagccucauagacugaaucacaugggcaucuguagcugcgggcuguauaaacagcccggagugccuguuaaguggaagcggugaggacuagucccuguucccagagcccacuuuuuuuucuuuuuuugaaauaaaauagccugucuuucagaucuaaaaaaaaaaaaaaaaaaaaaaaaaaaaaaaaaaaaaaaaaaaaaaaaaaaaaaaaaaaaaaaaaaaaaaaaaaaaaaaaaaaaaaaaaaaaaaaaaaaa

SEQ ID NO: 40449 - RNA, 1724 nt, Artificial Sequence
  mRNA product Design a-1 (A100) comprising derived and/or modified sequence from LASV(LM765-SLE-2012;Clade IV)__AIT17814__GPCmut12 (opt5)
aggagagucccgcagucggcguccagcggcucugcuuguucgugugugugucguugcaggccuuauucaagcuuaccaugggccagaucgugaccuucuuucaagaggucccccacguuauugaagaggugaugaacaucgugcugauugcccucagcauccuggcuguccuuaaggggcuguacaauuucgccacaugcggacucgugggccugguuacguuucuucugcucugugggagauccugcaccacaucucuguauaaaggaguguacgaacugcagacccucgagcugaacauggaaacacuuaauauguguaugccucugagcugcaccaagaacaauucccaucacuauauuauggucggcaacgagacagggcucgagcugacccuuacgaauaccucuaucaucgaccauaaauucuguaaccugagcgaugcgcaccggaagaaucucuacgaccaugcucugauguccauuaucucuacauuucaccugagcauuccgaacuucaaucaguaugaagccauguccugcgauuuuaacggaggcaaaaucagcgugcaguacaaucucucucacuccuaugccaaggacgcugccgaucauuguggcaccguugcuaacggggugcugcaaacauucaugcgcauggccuggggaggcagcuacauugcgcuugacucugggagaggacggugggauugcaucaugaccuccuaccaguaucugauuauccagaauacgacaugggaggaccacugucaguuuagccgccccucuccuaucggcuaccucgggcugcuuucccaaagaacccgggauauuuauaucagccgcagacugcucggaacauucaccuggacccuguccgacucugaaggcaaggauacacccggcggguacugccugacgcgguggaugcucauugaggccgagcugaaauguuuuggaaacaccgcugucgccaagugcaacgaaaaacaugacgaggaguucugcgauaugcuucgccuguuugacuucuguaagcaggcuauccagagacucaaagccgaagcgcagaugagcauucaacugaucaauaaggccgugaacgcucuuaucaaugaccagcugauuaugaagaaccaccuccgggauaucaugggcauuccuuauugcaauuacuccaaauauuguuaccugaaccacacaaccacagggaagaccagccugcccaaaugcugucucgugucuaauggauccuaccugaacgaaacgcauuucagcgacgauaucgagcagcaagccgacaauaugauuacagagaugcuucagaaggaauauauggagcgccagggcaaaaccccucuggggcucgucgaucuguuuguuuucucuaccagcuuuuaccugaucuccaucuuccuucaccucgugaagauuccgacacauagacacaucgugggaaaacccugcccuaagccccaucggcugaaccacaugggcauuuguucuugcggccuguauaagcagccugggguccccgugaaauggaagcgcugaggacuagucccuguucccagagcccacuuuuuuuucuuuuuuugaaauaaaauagccugucuuucagaucuaaaaaaaaaaaaaaaaaaaaaaaaaaaaaaaaaaaaaaaaaaaaaaaaaaaaaaaaaaaaaaaaaaaaaaaaaaaaaaaaaaaaaaaaaaaaaaaaaaaa

SEQ ID NO: 40450 - RNA, 1724 nt, Artificial Sequence
  mRNA product Design a-1 (A100) comprising derived and/or modified sequence from LASV(LM776-SLE-2012;Clade IV)__AIT17824__GPCmut12 (opt5)
aggagagucccgcagucggcguccagcggcucugcuuguucgugugugugucguugcaggccuuauucaagcuuaccaugggccagaucgugaccuucuuucaagaggucccccacguuauugaagaggugaugaacaucgugcugauugcccucagcauccuggcuguccuuaaggggcuguacaauuucgccacaugcggacucgugggccugguuacguuucuucugcucugugggagauccugcaccacaucuguguauaaaggagucuacgaacugcagacccuggagcucaacauggaaacacugaauauguguaugccucuuagcugcaccaagaacaauucccaucacuauauuauggugggcaacgagacagggcuggagcucacccugacgaauaccucuaucaucaaccauaaauucuguaaucuuagcgacgcgcacaagaaaaaccuguacgaucaugcucucauguccauuaucucuacauuucaccugagcauuccgaauuucaaccaguaugaagccauguccugcgacuuuaauggaggcaagaucagcguucaguacaaccugucucacuccuaugccggcgaugcugccaaucauugugggaccguggcuaacggaguccuccaaacauucaugcggauggccuggggcgggagcuacauugcgcuggacucuggacacggcaagugggauugcaucaugaccuccuaccaguaucuuauuauccagaacacgacaugggaggaccauugucaguuuagccgccccucuccuaucggguaccugggacuccugucccaaagaacccgggauauuuauaucagccgcagacuucugggcacauucaccuggacccucuccgacucugaaggcaaagauacacccgggggauacugccugacgcgguggaugcugauugaggccgagcucaaguguuuuggcaauaccgcuguggccaaaugcaacgaaaagcacgacgaggaguucugcgauaugcugcgccuuuuugacuucuguaaacaggcuauccagagacugaaggccgaagcgcagaugagcauucaacucaucaauaaggccgugaacgcucugaucaaugaucagcuuauuaugaaaaaccaucugcgggacaucauggggauuccuuauugcaauuacuccaaguauuguuaccucaaccacacaaccacaggaaaaaccagccugcccaagugcugucuggucucuaauggcuccuaccucaacgaaacgcacuucagcgacgauaucgagcagcaagccgacaauaugauuacagagaugcugcagaaagaauauauggagcgccaggggaagaccccucuuggacugguugaucucuuuguguucucuaccagcuuuuaccugaucuccaucuuccugcaucuugugaaaauuccgacacacagacauaucgucggcaagucuugccccaagccucaccggcucaaccacaugggcauuuguagcugcgggcuguauaaacagcccggagugccuguucgcuggaagagaugaggacuagucccuguucccagagcccacuuuuuuuucuuuuuuugaaauaaaauagccugucuuucagaucuaaaaaaaaaaaaaaaaaaaaaaaaaaaaaaaaaaaaaaaaaaaaaaaaaaaaaaaaaaaaaaaaaaaaaaaaaaaaaaaaaaaaaaaaaaaaaaaaaaaa

SEQ ID NO: 40451 - RNA, 1724 nt, Artificial Sequence
  mRNA product Design a-1 (A100) comprising derived and/or modified sequence from LASV(Mad39;Clade IV)__ANH09722__GPCmut12 (opt5)
aggagagucccgcagucggcguccagcggcucugcuuguucgugugugugucguugcaggccuuauucaagcuuaccaugggccagaucgugaccuucuuucaagaggucccccacguuauugaagaggugaugaacaucgugcugauugcccucagcauccuggcuguccuuaaggggcuguacaauguggccacaugcggacucauuggccugguuacguuccuucugcucugugggagauccugcaccacaacccuguauaaaggaguguacgaacugcaggcgcucgagcugaacauggaaacacuuaauauguguaugccucugucuugcaccaagaacaauagccaucacuauauccgggucggcaacgagacagggcucgagcugacccuuacgaauaccucccugaucaaccauaaauuuuguaaucucucugacgcucacaagaaaaaccuguacgaucaugcccugaugagcauuaucuccacauuccaccucucuauuccgaauuuuaaccaguaugaagccaugagcugcgacuucaaugauggaaagaucuccgugcaguacaaccugagccacaccuaugcuggcgacacagccaaucauuguggcaccguugcuaacggggugcuucaaacguuuaugcgcauggccuggggaggcucuuacauugcgcuggauuccgggagaggaggcugggacugcaucaugacaagcuaccaguaucucauuauccagaacaccacaugggaggaucacugucaguucucucggcccuccccuaucggguaccugggacuucugagccaacgcaccagagacauuuauaucucucggcgccuccugggcaccuuuacauggacgcuguccgauagcgaaggcaaggacacccccgggggauacugccucacaagauggaugcugauugaggccgagcuuaaauguuucggcaauaccgcugucgccaagugcaacgaaaaacaugaugaggaauuuugcgacaugcugcgccucuucgauuuuuguaagcaggcuauccagcggcugaaagccgaggcgcagauguccauucaacuuaucaauaaggccgugaacgcucugaucaaugaccagcucauuaugaagaaccaccugagagacaucauggggauuccuuauugcaauuacucuaaauauuguuaccugaaccacacagugaccggaaagacgagccuccccaaaugcugucuggucuccaauggcagcuaccuuaacgaaacacauuucucugaugacaucgagcagcaagccgauaauaugauuaccgagaugcugcagaaggaauauauggagcggcaggggaaaaccccucucggacugguugaccuguucguguuuuccaccagcuucuaccuuaucucuaucuuucuccaccuggugaagauuccgacacaucgccacgucgugggcaaacccugcccuaagccccauagacugaaccacaugggcaucuguagcugcggguucuauaagcagccuggaguucccgugcgguggaaacgcugaggacuagucccuguucccagagcccacuuuuuuuucuuuuuuugaaauaaaauagccugucuuucagaucuaaaaaaaaaaaaaaaaaaaaaaaaaaaaaaaaaaaaaaaaaaaaaaaaaaaaaaaaaaaaaaaaaaaaaaaaaaaaaaaaaaaaaaaaaaaaaaaaaaaa

SEQ ID NO: 40452 - RNA, 1724 nt, Artificial Sequence
  mRNA product Design a-1 (A100) comprising derived and/or modified sequence from LASV(Z0947-SLE-2011;Clade IV)__AIT17840__GPCmut12 (opt5)
aggagagucccgcagucggcguccagcggcucugcuuguucgugugugugucguugcaggccuuauucaagcuuaccaugggccagaucgugaccuucuuucaagaggucccccacguuauugaagaggugaugaacaucgugcugauugcccucagcauccuggcuguccuuaaggggcuguacaauuucgccacaugcggacucgugggccugguuacguuucuucugcucugugggagauccugcaccauuucucuguauaaaggaguguacgaacugcagacacucgagcugaacauggaaacccuuaauauguguaugccucugagcugcacaaagaacaauucccaucacuauaucauggucggcaacgagaccgggcucgagcugacacuuaccaauacgucuaucauuaaccauaaauucuguaaucugagcgacgcgcacaagaaaaaccucuacgaucaugcucugauguccaucauuucuaccuuucaccugagcaucccgaauuucaaccaguaugaagccauguccugcgacuuuaauggaggcaagauuagcgugcaguacaaccucucucacuccuaugccggcgaugcugccaaucauugugggacaguugcuaacggagugcugcaaaccuucaugcggauggccuggggcgggagcuacaucgcgcuugacucuggacgcgauagaugggacugcauuaugacauccuaccaguaucugaucauccagaacaccacgugggaggaucacugucaguuuagccggcccucuccuauuggcuaccucgggcugcuuucccaacgcacaagagacaucuauauuagccggcgccugcucggaaccuucacauggacccuguccgauucugaaggcaaggacacccccggcggguacugccugacaagauggaugcucaucgaggccgagcugaaauguuuuggaaauacggcugucgccaagugcaacgaaaaacaugaugaggaguucugcgacaugcuucggcuguuugauuucuguaagcaggcuauucagcgccucaaagccgaagcgcagaugagcauccaacugaucaauaaggccgugaacgcucuuauuaaugaccagcugaucaugaagaaccaccucagagacauuaugggcaucccuuauugcaauuacuccaaauauuguuaccugaaccacaccacaaccgggaagacaagccugcccaaaugcugucucgugucuaauggauccuaccugaacgaaacccauuucagcgaugacauugagcagcaagccgauaauaugaucacggagaugcuucagaaggaauauauggagcggcagggcaaaacaccucuggggcucgucgaccuguuuguuuucucuaccagcuuuuaccugaucuccauuuuccuucaccucgugaagaucccgacccaucgccacauugugggaaaacccugcccuaagccccauagacugaaccacaugggcaucuguucuugcggccuguauaagcagccugggguccccgugaaauggaagcggugaggacuagucccuguucccagagcccacuuuuuuuucuuuuuuugaaauaaaauagccugucuuucagaucuaaaaaaaaaaaaaaaaaaaaaaaaaaaaaaaaaaaaaaaaaaaaaaaaaaaaaaaaaaaaaaaaaaaaaaaaaaaaaaaaaaaaaaaaaaaaaaaaaaaa

SEQ ID NO: 40453 - RNA, 1736 nt, Artificial Sequence
  mRNA product Design a-2 (hSL-A64-N5) comprising derived and/or modified sequence from LASV(Josiah;Clade IV)__NP_694870__GPCmut12 (opt1)
aggagaguccgcucagccagguugcagaagcggcuuagcguguguccuaaucuucucucugcguguagguaggccugugccgcaaacaagcuuaccaugggccagaucgugaccuucuuccaggaggucccccacgugaucgaggaggugaugaacaucguccugaucgcccucagcgugcuggccgugcugaaggggcucuacaacuucgcgaccugcggccuggucgggcuggugacguuccuccugcugugcggccgcuccugcaccaccagccucuacaaggggguguacgagcugcagacccuggagcucaacauggagacgcugaacaugugcaugccgcuguccugcaccaagaacaacagccaccacuacaucauggucggcaacgagaccggccucgagcugacgcugaccaacaccuccaucaucaaccacaaguucugcaaccucagcgacgcccacaagaagaaccuguacgaccacgcccugauguccaucaucagcaccuuccaccucuccauccccaacuucaaccaguacgaggccaugagcugcgacuucaacgggggcaagaucuccgugcaguacaaccugagccacuccuacgccggggacgcggccaaccacugcggcacgguggccaacgggguccugcagaccuucaugcggauggccuggggcggcagcuacaucgcgcucgacuccgggcgcggcaacugggacugcaucaugaccagcuaccaguaccugaucauccagaacaccacgugggaggaccacugccaguucucccggcccagccccaucggguaccugggccuccugucccagcgcacccgggacaucuacaucagccgccggcugcucggcaccuucaccuggacgcugagcgacuccgaggggaaggacaccccgggcggguacugccugacccgcuggaugcucaucgaggccgagcugaagugcuucggcaacaccgccguggccaagugcaacgagaagcacgacgaggaguucugcgacaugcugcggcuguucgacuucugcaagcaggccauccagcgccugaaggcggaggcccagaugagcauccagcugaucaacaaggccgugaacgcccucaucaacgaccagcugaucaugaagaaccaccuccgggacaucauggggauccccuacugcaacuacuccaaguacugcuaccucaaccacacgaccaccggccgcaccagccugcccaagugcugccuggucuccaacggcagcuaccucaacgagacgcacuucuccgacgacaucgagcagcaggccgacaacaugaucaccgagaugcugcagaaggaguacauggagcggcaggggaagacgccccugggccucguggaccuguucguguucagcaccuccuucuaccugaucagcaucuuccugcaccucgucaagaucccgacccaccgccacaucguggggaaguccugccccaagccccaccggcugaaccacaugggcaucugcagcugcgggcuguacaagcagcccggcgugccggucaaguggaagcgcugaggacuagucccuguucccagagcccacuuuuuuuucuuuuuuugaaauaaaauagccugucuuucagaucucaaaggcucuuuucagagccaccaaaaaaaaaaaaaaaaaaaaaaaaaaaaaaaaaaaaaaaaaaaaaaaaaaaaaaaaaaaaaaaaagaauu

SEQ ID NO: 40454 - RNA, 1733 nt, Artificial Sequence
  mRNA product Design a-2 (hSL-A64-N5) comprising derived and/or modified sequence from LASV(LP;Clade I)__AAF86701__GPCmut12 (opt1)
aggagaguccgcucagccagguugcagaagcggcuuagcguguguccuaaucuucucucugcguguagguaggccugugccgcaaacaagcuuaccaugggccagaucaucaccuucuuccaggaggugccccacgucaucgaggaggugaugaacaucgugcugaucgcccucagccugcuggccauccucaaggggcuguacaacaucgcgaccugcggcaucaucgggcuggucgccuuccucuuccugugcggcaaguccugcagccugacgcucaagggcggguacgagcugcagacccuggagcucaacauggagacccugaacaugugcaugccgcuguccugcacgaagaacagcucccaccacuacauccgcgugggcaacgagaccgggcucgagcugacccugaccaacacgagcaucaucaaccacaaguucugcaaccucuccgacgcccacaagaagaaccuguacgaccacgcccugaugagcaucaucuccaccuuccaccucagcauccccaacuucaaccaguacgaggccauguccugcgacuucaacggcgggaagaucagcgugcaguacaaccugucccacagcuacgcgggcgacgccgccgagcacugcgggaccgucgccaacggcgugcugcagaccuucaugcggauggcguggggcgggcgcuacaucgcccucgacuccggcaaggggaacugggacugcaucaugacgagcuaccaguaccugaucauccagaacaccaccugggaggaccacugccaguucucccggcccagccccaucggcuaccugggccuccugucccagcgcacccgggacaucuacaucagccgccggcugcucgggacguucaccuggacccugagcgacuccgagggcaacgagacccccgggggcuacugccugacgcgcuggaugcucaucgaggccgagcugaagugcuucgggaacaccgccguggccaagugcaacgagaagcacgacgaggaguucugcgacaugcugcggcuguucgacuucugcaagcaggcgauccgccggcugaaggccgaggcccagaugagcauccagcugaucaacaaggccgucaacgcccucaucaacgaccagcugaucaugaagaaccaccuccgcgacaucaugggcauccccuacugcaacuacuccaaguacugcuaccucaaccacaccagcuccggccggaccagccugcccaagugcugccugaucuccaacgggagcuaccucaacgagacgcaguucuccgacgacaucgagcagcaggcggacaacaugaucaccgagaugcugcagaaggaguacaucgagcgccagggcaagaccccgcuggggcucguggacaucuucaucuucagcaccuccuucuaccugaucagcaucuuccugcaccugaucaagaucccgacgcaccggcacaucgugggcaagcccugccccaagccccaccgccucaaccacaugggggucugcuccugcggccuguacaagcacccgggcgugcccaccaaguggaagcggugaggacuagucccuguucccagagcccacuuuuuuuucuuuuuuugaaauaaaauagccugucuuucagaucucaaaggcucuuuucagagccaccaaaaaaaaaaaaaaaaaaaaaaaaaaaaaaaaaaaaaaaaaaaaaaaaaaaaaaaaaaaaaaaaagaauu

SEQ ID NO: 40455 - RNA, 1733 nt, Artificial Sequence
  mRNA product Design a-2 (hSL-A64-N5) comprising derived and/or modified sequence from LASV(803213;Clade II)__AAF86703__GPCmut12 (opt1)
aggagaguccgcucagccagguugcagaagcggcuuagcguguguccuaaucuucucucugcguguagguaggccugugccgcaaacaagcuuaccaugggccagaucaucaccuucuuccaggaggugccccacgucaucgaggaggugaugaacaucgugcugaucgcccucagccugcuggccauccucaaggggaucuacaacgucgcgaccugcggccuguucgggcugaucuccuuccuccugcugugcggccgcagcugcuccgugacguacaaggggguguacgagcuccagacccuggagcugaacauggccaaccucaacaugugcaugccgcugagcugcaccaagaacaacucccaccacuacaucauggucggcaacgagacgggccuggagcucacccugaccaacaccagcaucaucaaccacaaguucugcaaccuguccgacgcccacaagaagaaccucuacgaccacgcccugaugagcaucaucuccacguuccaccugagcauccccaacuucaaccaguacgaggccauguccugcgacuucaacgggggcaagaucagcgugcaguacaaccucucccacagcuucgcgguggacgccgccaaccacugcgggaccaucgccaacggcguccugcagaccuucaugcggauggcguggggcggguccuacaucgcccuggacagcggcaaggggaacugggacugcaucaugaccuccuaccaguaccucaucauccagaacacgaccugggaggaccacugccaguucagccgccccucccccaucggcuaccuggggcugcucagccagcggacccgcgacaucuacaucagccggcgccugcugggcaccuucacguggacccucuccgacagcgagggcaacgaggcccccgggggcuacugccugacccgguggaugcugaucgaggccgagcucaagugcuucgggaacaccgccguggcgaagugcaacgagaagcacgacgaggaguucugcgacaugcugcgccuguucgacuucugcaagcaggccaucaagcggcucaagacggaggcccagauguccauccagcugaucaacaaggccgugaacgcccugaucaacgaccagcucaucaugaagaaccaccuccgcgacaucaugggcauccccuacugcaacuacagccgguacugcuaccugaaccacaccgucaccgggaagaccucccugccccgcugcugccuggugagcaacggcuccuaccugaacgagacgcacuucagcgacgacaucgagcagcaggcggacaacaugaucaccgagaugcuccagaaggaguacauggaccggcagggcaagaccccgcuggggcugguggaccucuucgucuucuccaccagcuucuaccugaucuccaucuuccugcaccuggugaagaucccgacgcaccgccacaucgugggcaagcccugccccaagccccaccggcucaaccacauggggaucugcagcugcggccuguacaagcacccggggguccccgugaaguggaagcgcugaggacuagucccuguucccagagcccacuuuuuuuucuuuuuuugaaauaaaauagccugucuuucagaucucaaaggcucuuuucagagccaccaaaaaaaaaaaaaaaaaaaaaaaaaaaaaaaaaaaaaaaaaaaaaaaaaaaaaaaaaaaaaaaaagaauu

SEQ ID NO: 40456 - RNA, 1733 nt, Artificial Sequence
  mRNA product Design a-2 (hSL-A64-N5) comprising derived and/or modified sequence from LASV(GA391;Clade III)__CAA36645__GPCmut12 (opt1)
aggagaguccgcucagccagguugcagaagcggcuuagcguguguccuaaucuucucucugcguguagguaggccugugccgcaaacaagcuuaccaugggccagaucgugaccuucuuccaggaggucccccacgugaucgaggaggugaugaacaucguccugaucgcccucagcauccuggccauccugaaggggcucuacaacguggcgaccugcggccugaucgggcuggugacguuccuccugcuguccggccgcagcugcucccucaucuacaaggggaccuacgagcugcagacccuggagcucaacauggagacccugaacaugugcaugccgcugagcugcaccaagaacaacucccaccacuacauccgggucggcaacgagaccggccucgagcugacccugacgaacaccagcauccucaaccacaaguucugcaaccuguccgacgcccacaagcgcaaccuguacgaccacagccucauguccaucaucagcaccuuccaccuguccauccccaacuucaaccaguacgaggccaugagcugcgacuucaacgggggcaagaucaccgugcaguacaaccugucccacagcuucgccguggacgccgcggggcacugcggcacgcucgccaacgggguccugcagaccuucaugcggauggccuggggcggcuccuacaucgcccuggacagcgggcgcggcaacugggacugcaucaugaccuccuaccaguaccucaucauccagaacaccacgugggacgaccacugccaguucagccggcccucccccaucggguaccugggccugcucagccagcgcacccgggacaucuacaucagccgccggcugcugggcaccuucaccuggacgcucuccgacagcgaggggaacgagaccccgggcggguacugccugacccgcuggaugcugaucgaggcggagcucaagugcuucggcaacaccgccguggccaagugcaacgagaagcacgacgaggaguucugcgacaugcugcggcuguucgacuucugcaagcaggccauccgccggcucaagacggaggcccagauguccauccagcugaucaacaaggcggugaacgcccugaucaacgaccagcucaucaugaagaaccaccuccgcgacaucauggggauccccuacugcaacuacagccgguacugcuaccugaaccacaccuccaccggcaagaccagccugccccgcugcugccugaucuccaacggcagcuaccugaacgagacgaaguucuccgacgacaucgagcagcaggccgacaacaugaucaccgagaugcuccagaaggaguacaucgaccggcaggggaagacgccccugggccuggucgaccuguucguguucagcaccuccuucuaccucaucagcaucuuccugcaccuggugaagaucccgacccaccgccacaucgucgggaagcccugccccaagccccaccggcucaaccacaugggcaucugcuccugcgggcuguacaagcagccgggcgugcccgugcgcuggaagcggugaggacuagucccuguucccagagcccacuuuuuuuucuuuuuuugaaauaaaauagccugucuuucagaucucaaaggcucuuuucagagccaccaaaaaaaaaaaaaaaaaaaaaaaaaaaaaaaaaaaaaaaaaaaaaaaaaaaaaaaaaaaaaaaaagaauu

SEQ ID NO: 40457 - RNA, 1736 nt, Artificial Sequence
  mRNA product Design a-2 (hSL-A64-N5) comprising derived and/or modified sequence from LASV(AV;Clade V)__CCA30314__GPCmut12 (opt1)
aggagaguccgcucagccagguugcagaagcggcuuagcguguguccuaaucuucucucugcguguagguaggccugugccgcaaacaagcuuaccaugggccagaucgugaccuucuuccaggaggucccccacgugaucgaggaggugaugaacaucguccugaucgcccucagcauccuggccgugcugaaggggcucuacaacaucgcgaccugcggccugaucgggcugaucacguuccuccugcugugcggccgcuccugcagcuccaaccucuacaaggggguguacgagcugcagagccuggaccucaacauggagacccugaacaugugcaugccgcuguccugcaccaagaacaacagccaccacuacauccgggucggcaacgacacgggccucgagcugacccugaccaacaccuccauccucaaccacaaguucugcaaccugagcgacgcccacaagaaggaccuguacgaccacgcccucauguccaucaucagcacguuccaccuguccauccccaacuucaaccaguacgaggccaugagcugcgacuucaacgggggcaagaucuccgugcaguacaaccugagccacuccuacgccaucgacgcggccaaccacugcgggaccguggccaacggcauccuccagaccuucaugcgcauggccuggggcgggagcuacaucgcgcuggacuccggccgggggaacugggacugcaucaugaccagcuaccaguaccugaucauccagaacacgaccugggagaaccacugccaguucucccgccccagccccaucggcuaccucgggcugcugagccagcggacccgcgacaucuacaucucccggcgccuccugggcaccuucacguggacccugagcgacuccgagggcaacgccacccccgggggcuacugccucacccgguggaugcugaucgaggccgagcugaagugcuucgggaacacggccgucgccaagugcaacgagaagcacgacgaggaguucugcgacaugcuccgccuguucgacuucugcaagcaggcgaucagccggcugaaguccgaggcccagaugagcauccagcucaucaacaaggccgugaacgcccugaucaacgaccagcugaucaugaagaaccaccuccgcgacaucaugggcauccccuacugcaacuacuccaaguacugcuaccugaaccacaccaucaccgggaagaccagccugcccaagugcugccucguguccaacggcagcuaccugaacgagacgcacuucuccgacgacaucgagcagcaggccgacaacaugaucaccgagaugcugcagaaggaguacauggagcggcagggcaagaccccgcucgggcuggucgaccuguucguguucagcaccuccuucuaccugaucagcaucuuccuccgccuggugaagaucccgacgcaccggcacaucgucggcaagcccugccccaagccccaccgccugaaccacauggggaucugcuccugcggccucuacaagcagccgggggugcccgugcgguggaagcgcugaggacuagucccuguucccagagcccacuuuuuuuucuuuuuuugaaauaaaauagccugucuuucagaucucaaaggcucuuuucagagccaccaaaaaaaaaaaaaaaaaaaaaaaaaaaaaaaaaaaaaaaaaaaaaaaaaaaaaaaaaaaaaaaaagaauu

SEQ ID NO: 40458 - RNA, 1733 nt, Artificial Sequence
  mRNA product Design a-2 (hSL-A64-N5) comprising derived and/or modified sequence from LASV(Togo/2016/7082;Clade VI)__AMR44577__GPCmut12 (opt1)
aggagaguccgcucagccagguugcagaagcggcuuagcguguguccuaaucuucucucugcguguagguaggccugugccgcaaacaagcuuaccaugggccagaucaucaccuucuuccaggaggugccccacgucaucgaggaggugaugaacaucgugcugaucgcccucagccugcuggccauccucaagggggucuacaacguggcgaccugcggcaucaucgggcuggugacguuccuguuccucugcggccgcuccugcagccugaucuacaagggguccuacgagcugcagacccucgagcugaacauggagacccugaacaugugcaugccgcucagcugcacgaagaacuccagccaccacuacauccgggucggcaacgagaccggccuggagcugacccucaccaacacguccaucaucaaccacaaguucugcaaccugagcgacgcccacaagcgcaaccuguacgaccacgcccucauguccauccugagcaccuuccaccuguccauccccaacuucaaccaguacgaggccaugagcugcgacuucaacgggggcaagaucuccgugcaguacaaccucagccacgccuacgcgguggacgccgccgagcacugcgggaccgucgccaacggcgugcugcagaccuucaugcggauggcguggggcggguccuacaucgcccuggacagcggccgcgggaacugggacugcaucaugacguccuaccaguaccucaucauccagaacaccaccugggaggaccacugccaguucagccggcccucccccaucggcuaccuggggcugcucagccagcgcacccgggacaucuacaucagccgccggcugcugggcacguucaccuggacccucuccgacagcgagggcaacgagacccccgggggcuacugccugacgcgcuggaugcugaucgaggccgagcucaagugcuucgggaacaccgccguggccaagugcaacgagaagcacgacgaggaguucugcgacaugcugcggcuguucgacuucugcaagcaggcgauccagcgccucaaguccgaggcccagaugagcauccagcugaucaacaaggccgucaacgcccugaucaacgaccagcucaucaugaagaaccaccuccgggacaugaugggcauccccuacugcaacuacuccaaguacugcuaccugaaccacaccagcuccgggcgcaccagccugcccaagugcugccugguguccaacggcagcuaccugaacgagacgcacuucuccgacgacaucgagcagcaggccgacaacaugaucaccgagaugcuccagaaggaguacaucgaccggcagggcaagaccccgcuggggcugguggaccucuucgucuucagcaccuccuucuaccugaucagcaucuuccugcaccugaucaagaucccgacgcaccgccacaucgugggcaagcccugccccaagccccaccggcucaaccacauggggaucugcuccugcggccuguacaagcagccgggggugcccacccgcuggaagcggugaggacuagucccuguucccagagcccacuuuuuuuucuuuuuuugaaauaaaauagccugucuuucagaucucaaaggcucuuuucagagccaccaaaaaaaaaaaaaaaaaaaaaaaaaaaaaaaaaaaaaaaaaaaaaaaaaaaaaaaaaaaaaaaaagaauu

SEQ ID NO: 40459 - RNA, 1733 nt, Artificial Sequence
  mRNA product Design a-2 (hSL-A64-N5) comprising derived and/or modified sequence from LASV(KAK-428;Clade n.d. (VII))__ANH09740__GPCmut12 (opt1)
aggagaguccgcucagccagguugcagaagcggcuuagcguguguccuaaucuucucucugcguguagguaggccugugccgcaaacaagcuuaccaugggccagaucgugaccuucuuccaggaggucccccacgugaucgaggaggugaugaacaucguccugaucgcccucagccugcuggccauccucaaggggcuguacaacuucgcgaccugcggcgugaucgggcugaucacguuccuccugcugugcggccgcuccugcagcgccaccuacaaggggcaguacgagcuccagacccuggagcugaacauggagucccucaacaugugcaugccgcugagcugcacgaagaacaacucccaccacuacauccgggccggcaacaacaccggccuggagcucacccugaccaacacgagcaucaucucccacaaguucugcaaccugagcgacgcccacaagaagaaccucuacgaccacacccugauguccaucaucaccaccuuccaccugagcauccccaacuucaaccaguacgaggccauguccugcgacuucaacgggggcaagaucagcauccaguacaaccucucccacagcuacgcgggggacgccgcccagcacugcggcacgguggccaacgggguccugcagaccuucaugcgcauggcguggggcggcuccuaccuggcccucgacagcgggcggcgcggcugggacugcaucaucuccagcuaccaguaccugaucauccagaacaccaccugggacgaccacugccaguucucccggcccagccccaucggguaccugggcuucgugagccagaagacgcgcgacaucuacaucucccggcgccuccugggcaccuucaccuggacccugagcgacuccgaggggcacgacaugccgggcggguacugccucacgcgguggaugcugaucgaggccgaccugaagugcuucggcaacaccgccguggccaagugcaacgagaagcacgacgaggaguucugcgacauguggcgccucuucgacuucugcaagcaggcgauccagcggcugaaggccgaggcccagaugaacauccagcugaucaacaaggccgucaacgcccucaucaacgaccagcugaugaugaagaaccaccuccgcgacaucauggggauccccuacugcaacuacagcaaguucugcuaccugaacaacaccaccacgggccggaccucccugccccgcugcugccugaucagcaacggcuccuaccucaacgagacccacuucagcgacgacaucgagcagcaggcggacaacaugaucaccgagaugcugcagaaggaguacauggaccggcaggggaagacgccccugggccucguggaccuguucguguucuccaccagcuucuaccugaucaccaucuuccuccaccuggucaagaucccgacccaccgccacaucguggggaagcccugccccaagccccaccggcugaaccacaugggcaucugcuccugcgggcuguacaagcagccgggcgugcccguccgcuggaagcggugaggacuagucccuguucccagagcccacuuuuuuuucuuuuuuugaaauaaaauagccugucuuucagaucucaaaggcucuuuucagagccaccaaaaaaaaaaaaaaaaaaaaaaaaaaaaaaaaaaaaaaaaaaaaaaaaaaaaaaaaaaaaaaaaagaauu

SEQ ID NO: 40460 - RNA, 1733 nt, Artificial Sequence; identical to SEQ ID NO: 40454
  mRNA product Design a-2 (hSL-A64-N5) comprising derived and/or modified sequence from LASV(Pinneo-NIG-1969;Clade I)__AIT17836__GPCmut12 (opt1)

SEQ ID NO: 40461 - RNA, 1733 nt, Artificial Sequence
  mRNA product Design a-2 (hSL-A64-N5) comprising derived and/or modified sequence from LASV(ISTH0009-NIG-2011;Clade II)__AIT17404__GPCmut12 (opt1)
aggagaguccgcucagccagguugcagaagcggcuuagcguguguccuaaucuucucucugcguguagguaggccugugccgcaaacaagcuuaccaugggccagaucaucaccuucuuccaggaggugccccacgucaucgaggaggugaugaacaucgugcugaucgcccucagccugcuggccauccucaaggggaucuacaacgucgcgaccugcggccuguucgggcugguguccuuccuccugcugugcggccgcagcugcuccacgaccuacaaggggguguacgagcuccagacccuggagcuggacauggccagccucaacaugugcaugccgcuguccugcacgaagaacaacagccaccacuacaucauggucggcaacgagaccggccuggagcucacccugaccaacacguccaucaucaaccacaaguucugcaaccugagcgacgcccacaagaagaaccucuacgaccacgcccugauguccaucaucagcaccuuccaccuguccauccccaacuucaaccaguacgaggccaugagcugcgacuucaacgggggcaagaucuccgugcaguacaaccucagccacgcguacgccguggacgccgccaaccacugcgggaccaucgcgaacggcguccugcagaccuucaugcggauggccuggggcggguccuacaucgcccuggacagcggcaagggguccugggacugcaucaugacgagcuaccaguaccucaucauccagaacaccaccugggaggaccacugccaguucucccgccccagccccaucggcuaccuggggcugcucagccagcggacccgcgacaucuacaucucccggcgccugcugggcacguucaccuggacccucagcgacuccgagggcaacgagacccccgggggcuacugccugacgcgguggaugcugaucgaggccgagcucaagugcuucgggaacaccgccguggcgaagugcaacgagaagcacgacgaggaguucugcgacaugcugcgccuguucgacuucugcaagcaggccauccggcgccucaagaccgaggcccagaugagcauccagcugaucaacaaggccgugaacgcccugaucaacgaccagcucaucaugaagaaccaccuccgggacaucaugggcaucccguacugcaacuacuccaaguacugcuaccugaaccacaccgucacggggaagaccagccugccccgcugcugccugguguccaacggcagcuaccugaacgagacccacuucuccgacgacaucgagcagcaggcggacaacaugaucaccgagcuccugcagaaggaguacauggaccggcagggcaagacgccccuggggcucguggaccuguucgucuucagcaccuccuucuaccugaucagcaucuuccugcaccucaucaagaucccgacccaccgccacaucaccggcaagcccugccccaagccccaccggcugaaccacauggggaucugcuccugcggccuguacaagcacccgggggugcccgugaaguggaagcgcugaggacuagucccuguucccagagcccacuuuuuuuucuuuuuuugaaauaaaauagccugucuuucagaucucaaaggcucuuuucagagccaccaaaaaaaaaaaaaaaaaaaaaaaaaaaaaaaaaaaaaaaaaaaaaaaaaaaaaaaaaaaaaaaaagaauu

SEQ ID NO: 40462 - RNA, 1733 nt, Artificial Sequence
  mRNA product Design a-2 (hSL-A64-N5) comprising derived and/or modified sequence from LASV(ISTH2010-NIG-2012;Clade II)__AIT17482__GPCmut12 (opt1)
aggagaguccgcucagccagguugcagaagcggcuuagcguguguccuaaucuucucucugcguguagguaggccugugccgcaaacaagcuuaccaugggccagaucaucaccuucuuccaggaggugccccacgucaucgaggaggugaugaacaucgugcugaucgcccucagccugcuggccauccucaaggggaucuacaacgucgcgaccugcggccuguucgggcugguguccuuccuccugcugugcggccgcagcugcuccacgaccuacaaggggguguacgagcuccagacccuggagcuggacauggccagccucaacaugugcaugccgcuguccugcacgaagaacaacagccaccacuacaucauggucggcaacgagaccggccuggagcucacccugaccaacacguccaucaucaaccacaaguucugcaaccugagcgacgcccacaagaagaaccucuacgaccacgcccugauguccaucaucagcaccuuccaccuguccauccccaacuucaaccaguacgaggccaugagcugcgacuucaacgggggcaagaucuccgugcaguacaaccucagccacgcguacgccguggacgccgccaaccacugcgggaccaucgcgaacggcguccugcagaccuucaugcggauggccuggggcggguccuacaucgcccuggacagcggcaagggguccugggacugcaucaugacgagcuaccaguaccucaucauccagaacaucaccugggaggaccacugccaguucucccgccccagccccaucggcuaccuggggcugcucagccagcggacccgcgacaucuacaucucccggcgccugcugggcaccuucacguggacccucagcgacuccgagggcaacgagacccccgggggcuacugccugacccgguggaugcugaucgaggccgagcucaagugcuucgggaacacggccguggcgaagugcaacgagaagcacgacgaggaguucugcgacaugcugcgccuguucgacuucugcaagcaggccauccggcgccucaagaccgaggcccagaugagcauccagcugaucaacaaggccgugaacgcccugaucaacgaccagcucaucaugaagaaccaccuccgggacaucaugggcauccccuacugcaacuacuccaaguacugcuaccugaaccacaccgucaccgggaagacgagccugccccgcugcugccugguguccaacggcagcuaccugaacgagacccacuucuccgacgacaucgagcagcaggcggacaacaugaucaccgagcuccugcagaaggaguacaucgaccggcagggcaagaccccgcuggggcucguggaccuguucgucuucagcacguccuucuaccugaucagcaucuuccugcaccucgugaagaucccgacccaccgccacguggucggcaagcccugccccaagccccaccggcugaaccacauggggaucugcuccugcggccuguacaagcacccgggggugcccgugaaguggaagcgcugaggacuagucccuguucccagagcccacuuuuuuuucuuuuuuugaaauaaaauagccugucuuucagaucucaaaggcucuuuucagagccaccaaaaaaaaaaaaaaaaaaaaaaaaaaaaaaaaaaaaaaaaaaaaaaaaaaaaaaaaaaaaaaaaagaauu

SEQ ID NO: 40463 - RNA, 1733 nt, Artificial Sequence
  mRNA product Design a-2 (hSL-A64-N5) comprising derived and/or modified sequence from LASV(Lassa virus/H.sapiens-wt/NGA/2015/ISTH_0543;Clade II)__AVO03639__GPCmut12 (opt1)
aggagaguccgcucagccagguugcagaagcggcuuagcguguguccuaaucuucucucugcguguagguaggccugugccgcaaacaagcuuaccaugggccagaucaucaccuucuuccaggaggugccccacgucaucgaggaggugaugaacaucgugcugaucgcccucagccugcuggccauccucaaggggaucuacaacgucgcgaccugcggccuguucgggcugguguccuuccuccugcugugcggccgcagcugcuccacgaccuacaaggggguguacgagcuccagacccuggagcuggacauggccaaccucaacaugugcaugccgcugagcugcacgaagaacaacucccaccacuacaucauggucggcaacgagaccggccuggagcucacccugaccaacacgagcaucaucaaccacaaguucugcaaccuguccgacgcccacaagaagaaccucuacgaccacgcccugaugagcaucaucuccaccuuccaccugagcauccccaacuucaaccaguacgaggccauguccugcgacuucaacgggggcaagaucagcgugcaguacaaccucucccacaccuacgcgguggacgccgccaaccacugcgggaccaucgccaacggcguccugcagacguucaugcggauggcguggggcgggagcuacaucgcccuggacuccggcaaggggagcugggacugcaucaugaccuccuaccaguaccucgugauccagaacaccaccugggaggaccacugccaguucagccgccccucccccaucggcuaccuggggcugcucagccagcggacgcgcgacaucuacaucagccggcgccugcugggcaccuucaccuggacccucuccgacagcgagggcaacgagacgcccgggggcuacugccugacccgguggaugcugaucgaggccgagcucaagugcuucgggaacaccgccguggccaagugcaacgagaagcacgacgaggaguucugcgacaugcugcgccuguucgacuucugcaagcaggcgauccggcgccucaagaccgaggcccagauguccauccagcugaucaacaaggccgucaacgcccugaucaacgaccagcucaucaugaagaaccaccuccgggacaucaugggcauccccuacugcaacuacagcaaguacugcuaccugaaccacacggugaccgggaagaccucccugccccgcugcugccuggugagcaacggcuccuaccugaacgagacccacuucagcgacgacaucgagcagcaggccgacaacaugaucacggagcuccugcagaaggaguacaucgaccggcagggcaagaccccgcuggggcucgucgaccuguucguguucuccaccagcuucuaccugaucuccaucuuccugcaccucgugaagaucccgacccaccgccacaucacgggcaagcccugccccaagccccaccggcugaaccacauggggaucugcagcugcggccuguacaagcacccggggguccccgugaaguggaagcgcugaggacuagucccuguucccagagcccacuuuuuuuucuuuuuuugaaauaaaauagccugucuuucagaucucaaaggcucuuuucagagccaccaaaaaaaaaaaaaaaaaaaaaaaaaaaaaaaaaaaaaaaaaaaaaaaaaaaaaaaaaaaaaaaaagaauu

SEQ ID NO: 40464 - RNA, 1733 nt, Artificial Sequence
  mRNA product Design a-2 (hSL-A64-N5) comprising derived and/or modified sequence from LASV(Lassa virus/H.sapiens-wt/NGA/2016/ISTH_0009;Clade II)__AVO03571__GPCmut12 (opt1)
aggagaguccgcucagccagguugcagaagcggcuuagcguguguccuaaucuucucucugcguguagguaggccugugccgcaaacaagcuuaccaugggccagaucaucaccuucuuccaggaggugccccacgucaucgaggaggugaugaacaucgugcugaucgcccucagccugcuggccauccucaaggggaucuacaacgucgcgaccugcggccugcuggggcucguguccuuccugcugcucugcggccgcagcugcuccacgaccuacaaggggguguacgagcugcagacccuggagcucgacauggccagccugaacaugugcaugccgcuguccugcacgaagaacaacagccaccacuacaucauggucggcaacgagaccggccucgagcugacccugaccaacacguccaucaucaaccacaaguucugcaaccucagcgacgcccacaagaagaaccuguacgaccacgcccugauguccaucaucagcaccuuccaccucuccauccccaacuucaaccaguacgaggccaugagcugcgacuucaacgggggccggaucuccgugcaguacaaccugagccacuccuacgcgguggacgccgccaaccacugcgggaccaucgccaacggcguccugcagaccuucaugcgcauggcguggggcgggagcuacaucgcccucgacuccggcaaggggagcugggacugcaucaugacguccuaccaguaccugaucauccagaacaccaccugggaggaccacugccaguucagccggcccagccccaucggcuaccuggggcuccugucccagcgcacccgggacaucuacaucagccgccggcugcucggcacguucaccuggacccuguccgacagcgagggcaacgagacccccgggggcuacugccugacgcgcuggaugcucaucgaggccgagcugaagugcuucgggaacaccgccguggccaagugcaacgagaagcacgacgaggaguucugcgacaugcugcggcuguucgacuucugcaagcaggcgauccgccggcugaagaccgaggcccagauguccauccagcugaucaacaaggccgugaacgcccucaucaacgaccagcugaucaugaagaaccaccuccgcgacaucaugggcaucccguacugcaacuacagcaaguacugcuaccucaaccacaccgucacggggaagaccucccugccccggugcugccuggugagcaacggcuccuaccucaacgagacccacuucagcgacgacaucgagcagcaggccgacaacaugaucaccgagcugcugcagaaggaguacaucgaccgccagggcaagacgccccucgggcugguggaccuguucgucuucuccaccagcuucuaccugaucuccaucuuccuccaccuggugaagaucccgacccaccggcacaucaccggcaagcccugccccaagccccaccgccugaaccacauggggaucugcagcugcggccucuacaaccacccgggggugcccgucaaguggaagcggugaggacuagucccuguucccagagcccacuuuuuuuucuuuuuuugaaauaaaauagccugucuuucagaucucaaaggcucuuuucagagccaccaaaaaaaaaaaaaaaaaaaaaaaaaaaaaaaaaaaaaaaaaaaaaaaaaaaaaaaaaaaaaaaaagaauu

SEQ ID NO: 40465 - RNA, 1733 nt, Artificial Sequence
  mRNA product Design a-2 (hSL-A64-N5) comprising derived and/or modified sequence from LASV(Lassa virus/H.sapiens-wt/NGA/2016/ISTH_0017;Clade II)__AVO03567__GPCmut12 (opt1)
aggagaguccgcucagccagguugcagaagcggcuuagcguguguccuaaucuucucucugcguguagguaggccugugccgcaaacaagcuuaccaugggccagaucaucaccuucuuccaggaggugccccacgucaucgaggaggugaugaacaucgugcugaucgcccucagccugcuggccauccucaaggggaucuacaacgucgcgaccugcggccuguucgggcugguguccuuccuccugcugugcggccgcagcugcuccacgaccuacaaggggguguacgagcuccagacccuggagcuggacauggccagccucaacaugugcaugccgcuguccugcacgaagaacaacagccaccacuacaucauggucggcaacgagaccggccuggagcucacccugaccaacacguccaucaucaaccacaaguucugcaaccugagcgacgcccacaagaagaaccucuacgaccacgcccugauguccaucaucagcaccuuccaccuguccauccccaacuucaaccaguacgaggccaugagcugcgacuucaacgggggcaagaucuccgugcaguacaaccucagccacaccuacgcgaucgacgccgccaaccacugcgggaccaucgccaacggcgugcugcagacguucaugcggauggcguggggcggguccuacaucgcccuggacagcggcaagggguccugggacugcaucaugaccagcuaccaguaccucaucauccagaacaccaccugggaggaccacugccaguucucccgccccagccccaucggcuaccuggggcugcucagccagcggacgcgcgacaucuacaucucccggcgccugcugggcaccuucaccuggacccucagcgacuccgagggcaacgagacgcccgggggcuacugccugacccgguggaugcugaucgaggccgagcucaagugcuucgggaacaccgccgucgccaagugcaacgagaagcacgacgaggaguucugcgacaugcugcgccuguucgacuucugcaagcaggcgauccggcgccucaagaccgaggcccagaugagcauccagcugaucaacaaggccgugaacgcccugaucaacgaccagcucaucaugaagaaccaccuccgggacaucaugggcauccccuacugcaacuacuccaaguacugcuaccugaaccacacggugaccgggaagaccagccugccccgcugcugccuggucuccaacggcagcuaccugaacgagacccacuucuccgacgacaucgagcagcaggccgacaacaugaucacggagcuccugcagaaggaguacauggaccggcagggcaagaccccgcuggggcucguggaccuguucguguucagcaccuccuucuaccugaucagcaucuuccugcaccucguccgcaucccgacccaccggcacgugaucggcaagcccugccccaagccccaccgccugaaccacauggggaucugcuccugcggccuguacaagcacccgggggugcccgucaaguggaagcggugaggacuagucccuguucccagagcccacuuuuuuuucuuuuuuugaaauaaaauagccugucuuucagaucucaaaggcucuuuucagagccaccaaaaaaaaaaaaaaaaaaaaaaaaaaaaaaaaaaaaaaaaaaaaaaaaaaaaaaaaaaaaaaaaagaauu

SEQ ID NO: 40466 - RNA, 1733 nt, Artificial Sequence
  mRNA product Design a-2 (hSL-A64-N5) comprising derived and/or modified sequence from LASV(Lassa virus/H.sapiens-wt/NGA/2018/ISTH_0959;Clade II)__AVV65099__GPCmut12 (opt1)
aggagaguccgcucagccagguugcagaagcggcuuagcguguguccuaaucuucucucugcguguagguaggccugugccgcaaacaagcuuaccaugggccagaucaucaccuucuuccaggaggugccccacgucaucgaggaggugaugaacaucgugcugaucgcccucagccugcuggccauccucaaggggaucuacaacgucgugaccugcggccuguucgggcugguguccuuccuccugcugugcggccgcagcugcuccacgaccuacaagggggucuacgagcuccagacccuggagcuggacauggcgagccucaacaugugcaugccgcuguccugcacgaagaacaacagccaccacuacaucauggugggcaacgagaccggccuggagcucacccugaccaacacguccaucaucaaccacaaguucugcaaccugagcgacgcccacaagaagaaccucuacgaccacgcccugauguccaucaucagcaccuuccaccuguccauccccaacuucaaccaguacgaggccaugagcugcgacuucaacgggggcaagaucuccgugcaguacaaccucagccacgccuacgcgaucgacgccgccaaccacugcgggaccaucgccaacggcguccugcagaccuucaugcggauggcguggggcggguccuacaucgcccuggacagcggcaagggguccugggacugcaucaugacgagcuaccaguaccucaucauccagaacaccaccugggaggaccacugccaguucucccgccccagccccaucggcuaccuggggcugcucagccagcggacccgcgacaucuacaucucccggcgccugcugggcacguucaccuggacccucagcgacuccgagggcaacgagacccccgggggcuacugccugacgcgguggaugcugaucgaggccgagcucaagugcuucgggaacaccgccguggccaagugcaacgagaagcacgacgaggaguucugcgacaugcugcgccuguucgacuucugcaagcaggcgauccggcgccucaagaccgaggcccagaugagcauccagcugaucaacaaggccgugaacgcccugaucaacgaccagcucaucaugaagaaccaccuccgggacaucaugggcaucccguacugcaacuacuccaaguacugcuaccugaaccacaccgucacggggaagaccagccugccccgcugcugccugguguccaacggcagcuaccugaacgagacccacuucuccgacgacaucgagcagcaggccgacaacaugaucaccgagcuccugcagaaggaguacaucgaccggcagggcaagacgccccuggggcucguggaccuguucgucuucagcaccuccuucuaccugaucagcaucuuccugcaccucgugaagaucccgacccaccgccacgugaucggcaagcccugccccaagccccaccggcugaaccacauggggaucugcuccugcggccuguacaagcacccggggguccccgugaaguggaagcgcugaggacuagucccuguucccagagcccacuuuuuuuucuuuuuuugaaauaaaauagccugucuuucagaucucaaaggcucuuuucagagccaccaaaaaaaaaaaaaaaaaaaaaaaaaaaaaaaaaaaaaaaaaaaaaaaaaaaaaaaaaaaaaaaaagaauu

SEQ ID NO: 40467 - RNA, 1733 nt, Artificial Sequence
  mRNA product Design a-2 (hSL-A64-N5) comprising derived and/or modified sequence from LASV(LASV003-NIG-2008;Clade II)__AIT17580__GPCmut12 (opt1)
aggagaguccgcucagccagguugcagaagcggcuuagcguguguccuaaucuucucucugcguguagguaggccugugccgcaaacaagcuuaccaugggccagaucaucaccuucuuccaggaggugccccacgucaucgaggaggugaugaacaucgugcugaucgcccucagccugcuggccauccucaaggggaucuacaacgucgcgaccugcggccuguucgggcugguguccuuccuccugcugugcggccgcagcugcuccacgaccuacaaggggguguacgagcuccagacccuggagcuggacauggccagccucaacaugugcaugccgcuguccugcacgaagaacaacagccaccacuacaucauggucggcaacgagaccggccuggagcucacccugaccaacacguccaucaucaaccacaaguucugcaaccugagcgacgcccacaagaagaaccucuacgaccacgcccugauguccaucaucagcaccuuccaccuguccauccccaacuucaaccaguacgaggccaugagcugcgacuucaacgggggcaagaucuccgugcaguacaaccucagccacaccuacgcgguggacgccgccaaccacugcgggaccaucgccaacggcguccugcagacguucaugcggauggcguggggcggguccuacaucgcccuggacagcggcaagggguccugggacugcaucaugaccagcuaccaguaccucaucauccagaacaccaccugggaggaccacugccaguucucccgccccagccccaucggcuaccuggggcugcucagccagcggacgcgcgacaucuacaucucccggcgccugcugggcaccuucaccuggacccucagcgacuccgagagcaacgagacgccgggcggguacugccugacccgguggaugcugaucgaggccgagcucaagugcuucggcaacaccgccguggccaagugcaacgagaagcacgacgaggaguucugcgacaugcugcgccuguucgacuucugcaagcaggcgauccggcgccucaaggccgaggcccagauguccauccagcugaucaacaaggccgugaacgcccugaucaacgaccagcucaucaugaagaaccaccuccgggacaucauggggauccccuacugcaacuacagcaaguacugcuaccugaaccacaccgucacgggccgcaccucccugccccggugcugccuggugagcaacggguccuaccugaacgagacccacuucagcgacgacaucgagcagcaggcggacaacaugaucaccgagcuccugcagaaggaguacauggaccgccagggcaagacgccccugggccucguggaccuguucgucuucuccaccagcuucuaccugaucuccaucuuccugcaccucgugaagaucccgacccaccggcacgugaucgggaagcccugccccaagccccaccgccugaaccacaugggcaucugcagcugcgggcuguacaagcacccgggcguccccgugaaguggaagcggugaggacuagucccuguucccagagcccacuuuuuuuucuuuuuuugaaauaaaauagccugucuuucagaucucaaaggcucuuuucagagccaccaaaaaaaaaaaaaaaaaaaaaaaaaaaaaaaaaaaaaaaaaaaaaaaaaaaaaaaaaaaaaaaaagaauu

SEQ ID NO: 40468 - RNA, 1733 nt, Artificial Sequence
  mRNA product Design a-2 (hSL-A64-N5) comprising derived and/or modified sequence from LASV(LASV035-NIG-2009;Clade II)__AIT17588__GPCmut12 (opt1)
aggagaguccgcucagccagguugcagaagcggcuuagcguguguccuaaucuucucucugcguguagguaggccugugccgcaaacaagcuuaccaugggccagaucaucaccuucuuccaggaggugccccacgucaucgaggaggugaugaacaucgugcugaucgcccucagccugcuggccauccucaaggggaucuacaacgucgcgaccugcggccuguucgggcugguguccuuccuccugcugugcggccgcagcugcuccacgaccuacaaggggguguacgagcuccagacccuggagcuggacauggccagccucaacaugugcaugccgcuguccugcacgaagaacaacagccaccacuacaucauggucggcaacgagaccggccuggagcucacccugaccaacacguccaucaucaaccacaaguucugcaaccugagcgacgcccacaagaagaaccucuacgaccacgcccugauguccaucaucagcaccuuccaccuguccauccccaacuucaaccaguacgaggccaugagcugcgacuucaacgggggcaagaucuccgugcaguacaaccucagccacgcguacgccguggacgccgccaaccacugcgggaccaucgcgaacggcguccugcagaccuucaugcggauggccuggggcggguccuacaucgcccuggacagcggcaagggguccugggacugcaucaugacgagcuaccaguaccucaucauccagaacaccaccugggaggaccacugccaguucucccgccccagccccaucggcuaccuggggcugcucagccagcggacccgcgacaucuacaucucccggcgccugcugggcacguucaccuggacccucagcgacuccgagggcaacgagacccccgggggcuacugccugacgcgguggaugcugaucgaggccgagcucaagugcuucgggaacaccgccguggcgaagugcaacgagaagcacgacgaggaguucugcgacaugcugcgccuguucgacuucugcaagcaggccauccggcgccucaaggccgaggcccagaugagcauccagcugaucaacaaggccgugaacgcgcugaucaacgaccagcucaucaugaagaaccaccuccgggacaucaugggcauccccuacugcaacuacuccaaguacugcuaccugaaccacaccgucaccgggaagacgagccugccccgcugcugccugguguccaacggcagcuaccugaacgagacccacuucuccgacgacaucgagcagcaggccgacaacaugaucaccgagcuccugcagaaggaguacaucgaccggcagggcaagaccccgcuggggcucguggaccuguucgucuucagcacguccuucuaccugaucagcaucuuccugcaccucgugaagaucccgacccaccgccacgugaucggcaagcccugccccaagccccaccggcugaaccacauggggaucugcuccugcggccuguacaagcacccggggguccccgugaaguggaagcgcugaggacuagucccuguucccagagcccacuuuuuuuucuuuuuuugaaauaaaauagccugucuuucagaucucaaaggcucuuuucagagccaccaaaaaaaaaaaaaaaaaaaaaaaaaaaaaaaaaaaaaaaaaaaaaaaaaaaaaaaaaaaaaaaaagaauu

SEQ ID NO: 40469 - RNA, 1733 nt, Artificial Sequence
  mRNA product Design a-2 (hSL-A64-N5) comprising derived and/or modified sequence from LASV(LASV1000-NIG-2009;Clade II)__AIT17782__GPCmut12 (opt1)
aggagaguccgcucagccagguugcagaagcggcuuagcguguguccuaaucuucucucugcguguagguaggccugugccgcaaacaagcuuaccaugggccagaucaucaccuucuuccaggaggugccccacgucaucgaggaggugaugaacaucgugcugaucgcccucagccugcuggccauccucaaggggaucuacaacgucgcgaccugcggccuguucgggcugguguccuuccuccugcugugcggccgcagcugcuccacgaccuacaaggggguguacgagcuccagacccuggagcuggacauggccagccucaacaugugcaugccgcuguccugcacgaagaacaacagccaccacuacaucauggucggcaacgagaccggccuggagcucacccugaccaacacguccaucaucaaccacaaguucugcaaccugagcgacgcccacaagaagaaccucuacgaccacgcccugauguccaucaucagcaccuuccaccuguccauccccaacuucaaccaguacgaggccaugagcugcgacuucaacgggggcaagaucuccgugcaguacaaccucagccacaccuacgcgguggacgccgccaaccacugcgggaccaucgccaacggcguccugcagacguucaugcggauggcguggggcggguccuacaucgcccuggacagcggcaagggguccugggacugcaucaugaccagcuaccaguaccucaucauccagaacaccaccugggaggaccacugccaguucucccgccccagccccaucggcuaccuggggcugcucagccagcggacgcgcgacaucuacaucucccggcgccugcugggcaccuucaccuggacccucagcgacuccgagggcaacgagacgcccgggggcuacugccugacccgguggaugcugaucgaggccgagcucaagugcuucgggaacaccgccguggccaagugcaacgagaagcacgacgaggaguucugcgacaugcugcgccuguucgacuucugcaagcaggcgaucaagcggcucaagaccgaggcccagaugagcauccagcugaucaacaaggccgugaacgcccugaucaacgaccagcucaucaugaagaaccaccuccgcgacaucaugggcauccccuacugcaacuacuccaaguacugcuaccugaaccacacggucaccgggaagaccagccugccccggugcugccugguguccaacggcagcuaccugaacgagacccacuucuccgacgacaucgagcagcaggccgacaacaugaucacggagcuccugcagaaggaguacaucgaccgccagggcaagaccccgcuggggcucguggaccuguucgucuucagcaccuccuucuaccugaucagcaucuuccugcaccucgugaagaucccgacccaccggcacguggucggcaagcccugccccaagccccaccgccugaaccacauggggaucugcuccugcggccuguacaagcacccgggggugcccgugaaguggaagcggugaggacuagucccuguucccagagcccacuuuuuuuucuuuuuuugaaauaaaauagccugucuuucagaucucaaaggcucuuuucagagccaccaaaaaaaaaaaaaaaaaaaaaaaaaaaaaaaaaaaaaaaaaaaaaaaaaaaaaaaaaaaaaaaaagaauu

SEQ ID NO: 40470 - RNA, 1733 nt, Artificial Sequence
  mRNA product Design a-2 (hSL-A64-N5) comprising derived and/or modified sequence from LASV(LASV221-NIG-2010;Clade II)__AIT17624__GPCmut12 (opt1)
aggagaguccgcucagccagguugcagaagcggcuuagcguguguccuaaucuucucucugcguguagguaggccugugccgcaaacaagcuuaccaugggccagaucaucaccuucuuccaggaggugccccacgucaucgaggaggugaugaacaucgugcugaucgcccucagccugcuggccauccucaaggggaucuacaacgucgcgaccugcggccuguucgggcugguguccuuccuccugcugugcggccgcagcugcuccacgaccuacaaggggguguacgagcuccagacccuggagcuggacauggccagccucaacaugugcaugccgcuguccugcacgaagaacaacagccaccacuacaucauggucggcaacgagaccggccuggagcucacccugaccaacacguccaucaucaaccacaaguucugcaaccugagcgacgcccacaagaagaaccucuacgaccacgcccugauguccaucaucagcaccuuccaccuguccauccccaacuucaaccaguacgaggccaugagcugcgacuucaacgggggcaagaucuccgugcaguacaaccucagccacaccuacgcgaucgacgccgccaaccacugcgggaccaucgccaacggcgugcugcagacguucaugcggauggcguggggcggguccuacaucgcccuggacagcggcaagggguccugggacugcaucaugaccagcuaccaguaccucaucauccagaacaccaccugggaggaccacugccaguucucccgccccagccccaucggcuaccuggggcugcucagccagcggacgcgcgacaucuacaucucccggcgccugcugggcaccuucaccuggacccucagcgacuccgagggcaacgagacgcccgggggcuacugccugacccgguggaugcugaucgaggccgagcucaagugcuucgggaacaccgccgucgccaagugcaacgagaagcacgacgaggaguucugcgacaugcugcgccuguucgacuucugcaagcaggcgauccggcgccucaagaccgaggcccagaugagcauccagcugaucaacaaggccgugaacgcccugaucaacgaccagcucaucaugaagaaccaccuccgggacaucaugggcauccccuacugcaacuacuccaaguacugcuaccugaaccacacggugaccgggaagaccagccugccccgcugcugccuggucuccaacggcagcuaccugaacgagacccacuucuccgacgacaucgagcagcaggccgacaacaugaucacggagaugcuccagaaggaguacauggaccggcagggcaagaccccgcuggggcugguggaccucuucguguucagcaccuccuucuaccugaucagcaucuuccugcaccuggucaagaucccgacccaccgccacgugaucggcaagcccugccccaagccccaccggcucaaccacauggggaucugcuccugcggccuguacaagcacccgggggugcccgucaaguggaagcgcugaggacuagucccuguucccagagcccacuuuuuuuucuuuuuuugaaauaaaauagccugucuuucagaucucaaaggcucuuuucagagccaccaaaaaaaaaaaaaaaaaaaaaaaaaaaaaaaaaaaaaaaaaaaaaaaaaaaaaaaaaaaaaaaaagaauu

SEQ ID NO: 40471 - RNA, 1733 nt, Artificial Sequence
  mRNA product Design a-2 (hSL-A64-N5) comprising derived and/or modified sequence from LASV(LASV237-NIG-2010;Clade II)__AIT17638__GPCmut12 (opt1)
aggagaguccgcucagccagguugcagaagcggcuuagcguguguccuaaucuucucucugcguguagguaggccugugccgcaaacaagcuuaccaugggccagaucaucaccuucuuccaggaggugccccacgucaucgaggaggugaugaacaucgugcugaucgcccucagccugcuggccauccucaaggggaucuacaacgucgcgaccugcggccuguucgggcugguguccuuccuccugcugugcggccgcagcugcuccacgaccuacaaggggguguacgagcuccagacccuggagcuggacauggccagccucaacaugugcaugccgcuguccugcacgaagaacaacagccaccacuacaucauggucggcaacgagaccggccuggagcucacccugaccaacacguccaucaucaaccacaaguucugcaaccugagcgacgcccacaagaaggaccucuacgaccacgcccugauguccaucaucagcaccuuccaccuguccauccccaacuucaaccaguacgaggccaugagcugcgacuucaacgggggcaagaucuccgugcaguacaaccucagccacaccuacgcgguggacgccgccaaccacugcgggaccaucgccaacggcguccugcagacguucaugcggauggcguggggcggguccuacaucgcccuggacagcggcaagggguccugggacugcaucaugaccagcuaccaguaccucaucauccagaacaccaccugggaggaccacugccaguucucccgccccagccccaucggcuaccuggggcugcucagccagcggacgcgcgacaucuacaucucccggcgccugcugggcaccuucaccuggacccucagcgacuccgagggcaacgagacgcccgggggcuacugccugacccgguggaugcugaucgaggccgagcucaagugcuucgggaacaccgccguggccaagugcaacgagaagcacgacgaggaguucugcgacaugcugcgccuguucgacuucugcaagcaggcgauccggcgccucaagaccgaggcccagaugagcauccagcugaucaacaaggccgugaacgcccugaucaacgaccagcucaucaugaagaaccaccuccgggacaucaugggcauccccuacugcaacuacuccaaguacugcuaccugaaccacacggucaccgggaagaccagccugccccgcugcugccugguguccaacggcagcuaccugaacgagacccacuucuccgacgacaucgagcagcaggccgacaacaugaucacggagcuccugcagaaggaguacauggaccggcagggcaagaccccgcuggggcucguggaccuguucgucuucagcaccuccuucuaccugaucagcaucuuccugcaccucaucaagaucccgacccaccgccacaucacgggcaagcccugccccaagccccaccggcugaaccacauggggaucugcuccugcggccuguacaagcacccgggggugcccgugaaguggaagcgcugaggacuagucccuguucccagagcccacuuuuuuuucuuuuuuugaaauaaaauagccugucuuucagaucucaaaggcucuuuucagagccaccaaaaaaaaaaaaaaaaaaaaaaaaaaaaaaaaaaaaaaaaaaaaaaaaaaaaaaaaaaaaaaaaagaauu

SEQ ID NO: 40472 - RNA, 1733 nt, Artificial Sequence
  mRNA product Design a-2 (hSL-A64-N5) comprising derived and/or modified sequence from LASV(LASV253-NIG-2011;Clade II)__AIT17670__GPCmut12 (opt1)
aggagaguccgcucagccagguugcagaagcggcuuagcguguguccuaaucuucucucugcguguagguaggccugugccgcaaacaagcuuaccaugggccagaucaucaccuucuuccaggaggugccccacgucaucgaggaggugaugaacaucgugcugaucgcccucagccugcuggccauccucaaggggaucuacaacgucgcgaccugcggccuguucgggcugguguccuuccuccugcugugcggccgcagcugcuccacgaccuacaaggggguguacgagcuccagacccuggagcuggacauggccagccucaacaugugcaugccgcuguccugcacgaagaacaacagccaccacuacaucauggucggcaacgagaccggccuggagcucacccugaccaacacguccaucaucaaccacaaguucugcaaccugagcgacgcccacaagaagaaccucuacgaccacgcccugauguccaucaucagcaccuuccaccuguccauccccaacuucaaccaguacgaggccaugagcugcgacuucaacgggggcaagaucuccgugcaguacaaccucagccacaccuacgcgguggacgccgccaaccacugcgggaccaucgccaacggcguccugcagacguucaugcggauggcguggggcggguccuacaucgcccuggacagcggcaagggguccugggacugcaucaugaccagcuaccaguaccucaucauccagaacaccaccugggaggaccacugccaguucucccgccccagccccaucggcuaccuggggcugcucagccagcggacgcgcgacaucuacaucucccggcgccugcugggcaccuucaccuggacccucagcgacuccgagggcaacgagacgcccgggggcuacugccugacccgguggaugcugaucgaggccgagcucaagugcuucgggaacaccgccguggccaagugcaacgagaagcacgacgaggaguucugcgacaugcugcgccuguucgacuucugcaagcaggcgauccggcgccucaaggccgaggcccagaugagcauccagcugaucaacaaggccgugaacgcccugaucaacgaccagcucaucaugaagaaccaccuccgggacaucaugggcaucccguacugcaacuacuccaaguacugcuaccugaaccacaccgucacggggcgcaccagccugccccggugcugccugguguccaacggcagcuaccugaacgagacccacuucuccgacgacaucgagcagcaggcggacaacaugaucaccgagcuccugcagaaggaguacaucgaccgccagggcaagacgccccuggggcucguggaccuguucgucuucagcaccuccuucuaccugaucagcaucuuccugcaccucgugaagaucccgacccaccggcacaucaucggcaagcccugccccaagccccaccgccugaaccacauggggaucugcuccugcggccuguacaagcacccgggggugcccgucaaguggaagcggugaggacuagucccuguucccagagcccacuuuuuuuucuuuuuuugaaauaaaauagccugucuuucagaucucaaaggcucuuuucagagccaccaaaaaaaaaaaaaaaaaaaaaaaaaaaaaaaaaaaaaaaaaaaaaaaaaaaaaaaaaaaaaaaaagaauu

SEQ ID NO: 40473 - RNA, 1733 nt, Artificial Sequence
  mRNA product Design a-2 (hSL-A64-N5) comprising derived and/or modified sequence from LASV(LASV254-NIG-2011;Clade II)__AIT17674__GPCmut12 (opt1)
aggagaguccgcucagccagguugcagaagcggcuuagcguguguccuaaucuucucucugcguguagguaggccugugccgcaaacaagcuuaccaugggccagaucaucaccuucuuccaggaggugccccacgucaucgaggaggugaugaacaucgugcugaucgcccucagccugcuggccauccucaaggggaucuacaacgucgcgaccugcggccuguucgggcugguguccuuccuccugcugugcggccgcagcugcuccacgaccuacaaggggguguacgagcuccagacccuggagcuggacaugaccaaccucaacaugugcaugccgcugagcugcaccaagaacaacucccaccacuacaucauggucggcaacgagaccggccuggagcucacccugacgaacaccagcaucaucaaccacaaguucugcaaccuguccgacgcccacaagaagaaccucuacaaccacgcccugaugagcaucaucuccaccuuccaccugagcauccccaacuucaaccaguacgaggccauguccugcgacuucaacgggggcaagaucagcgugcaguacaaccucucccacagcuacgccguggacgcggccaaccacugcgggaccaucgccaacggcguccugcagacguucaugcggauggccuggggcggguccuacaucgcgcuggacagcggcaaggggaacugggacugcaucaugaccuccuaccaguaccucaucauccagaacaccaccugggaggaccacugccaguucagccgccccucccccaucggcuaccuggggcugcucagccagcggacgcgcgacaucuacaucagccggcgccugcugggcaccuucaccuggacccucuccgacagcgagggcaacgagacgcccgggggcuacugccugacccgguggaugcugaucgaggccgagcucaagugcuucgggaacaccgccguggccaagugcaacgagaagcacgacgaggaguucugcgacaugcugcgccuguucgacuucugcaagcaggccauccggcgccucaagaccgaggcgcaggccaacauccagcugaucaacaaggccgugaacgcccugaucaacgaccagcucaucaugaagaaccaccuccgggacaucaugggcauccccuacugcaacuacuccaaguacugcuaccugaaccacacggucaccgggaagaccagccugccccgcugcugccugguguccaacggcagcuaccugaacgagacccacuucuccgacgacaucgagcagcaggccgacaacaugaucacggagcuccugcagaaggaguacauggaccggcagggcaagaccccgcuggggcucguggaccuguucgucuucagcaccuccuucuaccugaucagcaucuuccugcaccucgugaagaucccgacccaccgccacgugaucggcaagcccugccccaagccccaccggcugaaccacauggggaucugcuccugcggccuguacaagcacccggggguccccgugaaguggaagcgcugaggacuagucccuguucccagagcccacuuuuuuuucuuuuuuugaaauaaaauagccugucuuucagaucucaaaggcucuuuucagagccaccaaaaaaaaaaaaaaaaaaaaaaaaaaaaaaaaaaaaaaaaaaaaaaaaaaaaaaaaaaaaaaaaagaauu

SEQ ID NO: 40474 - RNA, 1733 nt, Artificial Sequence
  mRNA product Design a-2 (hSL-A64-N5) comprising derived and/or modified sequence from LASV(Nig08-A19;Clade III)__ADU56618__GPCmut12 (opt1)
aggagaguccgcucagccagguugcagaagcggcuuagcguguguccuaaucuucucucugcguguagguaggccugugccgcaaacaagcuuaccaugggccagaucgugaccuucuuccaggaggucccccacgugaucgaggaggugaugaacaucguccugaucgcccucagcauccuggccauccugaaggggcucuacaacaucgcgaccugcggccugaucgggcuggugacguuccuccugcuguccggccgcagcugcuccaugaccuacaaggggguguacgagcuccagacccuggagcugaacaugaacacccucaacaugugcaugccgcugagcugcaccaagaacaacucccaccacuacaucauggucggcaacgagaccggccuggagcucacccugacgaacaccagccugcuccaccacaaguucugcaaccuguccgacgcccacaagaagaaccuguacgaccacacccucaugagcaucaucuccaccuuccaccugagcauccccaacuucaaccaguacgaggccauguccugcgacuucaacgggggcaagaucacggugcaguacaaccugagccacuccuacgccaucgacgccgcgaaccacugcgggaccguggccaacggcguccuccagaccuucaugcggauggccuggggcgggagcuacaucgcccuggacuccggccgcgggaagugggacugcaucaugaccagcuaccaguaccugaucauccagaacacgaccugggaggaccacugccaguucucccggcccagccccaucggcuaccucgggcugcugucccagcgcacccgggacaucuacaucagccgccggcuccugggcaccuucacguggacccugagcgacuccgagggcaacgagacccccgggggcuacugccucacccgcuggaugcugaucgaggcggagcugaagugcuucgggaacacggccguggccaagugcaacgagaagcacgacgaggaguucugcgacaugcuccggcuguucgacuucugcaagcaggccauccgccggcugaaggccgaggcgcagaugagcauccagcucaucaacaaggccgugaacgcccugaucaacgaccagcugaucaugaagaaccaccuccgcgacaucaugggcauccccuacugcaacuacuccaaguacugcuaccugaaccacaccagcaccgggcggaccucccugccccgcugcugccucgucagcaacggcuccuaccugaacgagacgcacuucagcgacgacaucgagcagcaggccgacaacaugaucaccgagaugcugcagaaggaguaccucgaccggcagggcaagaccccgcuggggcugguggaccuguucguguucuccaccagcuucuaccucaucuccaucuuccugcaccuggucaagaucccgacgcaccgccacaucgugggcaagcccugccccaagccccaccggcucaaccacauggggaucugcagcugcggccuguacaagcagccgggggugcccguccgcuggaagcggugaggacuagucccuguucccagagcccacuuuuuuuucuuuuuuugaaauaaaauagccugucuuucagaucucaaaggcucuuuucagagccaccaaaaaaaaaaaaaaaaaaaaaaaaaaaaaaaaaaaaaaaaaaaaaaaaaaaaaaaaaaaaaaaaagaauu

SEQ ID NO: 40475 - RNA, 1736 nt, Artificial Sequence
  mRNA product Design a-2 (hSL-A64-N5) comprising derived and/or modified sequence from LASV(G1180-SLE-2010;Clade IV)__AIT17168__GPCmut12 (opt1)
aggagaguccgcucagccagguugcagaagcggcuuagcguguguccuaaucuucucucugcguguagguaggccugugccgcaaacaagcuuaccaugggccagaucgugaccuucuuccaggaggucccccacgugaucgaggaggugaugaacaucguccugaucgcccucagcauccuggccgugcugaaggggcucuacaacuucgcgaccugcggccugguggggcugcucaccuuccugcugcucugcggccgcuccugcaccgccagccgguacaagggggucuacgagcugcagacccuggagcucaacauggagacccugaacaugugcaugccgcuguccugcaccaagaacaacagccaccacuacaucauggugggcaacgagaccggccucgagcugacccugacgaacaccuccaucaucaaccacaaguucugcaaccucagcgacgcccacaagaagaaccuguacgaccacgcccugauguccaucaucagcaccuuccaccucuccauccccaacuucaaccaguacgaggccaugagcugcgacuucaacgggggcaagaucuccgugcaguacaaccugagccacuccuacgcgggggacgccgccaaccacugcggcaccgucgccaacggggugcugcagacguucaugcgcauggcguggggcggcagcuacaucgcccucgacuccgggcacggcagcugggacugcaucaugaccuccuaccaguaccugaucauccagaacaccaccugggaggaccacugccaguucagccggcccucccccaucggguaccugggccuccugagccagcgcacgcgggacaucuacaucagccgccggcugcucggcaccuucaccuggacccuguccgacagcgaggggaaggacacgccgggcggguacugccugacccgcuggaugcucaucgaggccgagcugaagugcuucggcaacaccgccguggccaagugcaacgagaagcacgacgaggaguucugcgacaugcugcggcuguucgacuucugcaagcaggcgauccagcgccugaaggccgaggcccagauguccauccagcugaucaacaaggccgucaacgcccucaucaacgaccagcugaucaugaagaaccaccuccgggacaucauggggauccccuacugcaacuacagcaaguacugcuaccucaaccacaccacgaccggcaagaccucccugcccaagugcugccuggugagcaacggcuccuaccucaacgagacccacuucagcgacgacaucgagcagcaggcggacaacaugaucacggagaugcugcagaaggaguacauggagcgccaggggaagacgccccugggccucguggaccuguucgucuucuccaccagcuucuaccugaucuccaucuuccugcaccucgugaagaucccgacccaccggcacaucgugggcaagagcugccccaagccccaccgccugaaccacauggggaucugcuccugcgggcuguacaagcagcccggcgucccggugaaguggaagcggugaggacuagucccuguucccagagcccacuuuuuuuucuuuuuuugaaauaaaauagccugucuuucagaucucaaaggcucuuuucagagccaccaaaaaaaaaaaaaaaaaaaaaaaaaaaaaaaaaaaaaaaaaaaaaaaaaaaaaaaaaaaaaaaaagaauu

SEQ ID NO: 40476 - RNA, 1736 nt, Artificial Sequence
  mRNA product Design a-2 (hSL-A64-N5) comprising derived and/or modified sequence from LASV(G1442-SLE-2011;Clade IV)__AIT17180__GPCmut12 (opt1)
aggagaguccgcucagccagguugcagaagcggcuuagcguguguccuaaucuucucucugcguguagguaggccugugccgcaaacaagcuuaccaugggccagaucgugaccuucuuccaggaggucccccacgugaucgaggaggugaugaacaucguccugaucgcccucagcauccuggccgugcugaaggggcucuacaacguggcgaccugcggccugaucgggcuggucacguuccuccugcugugcggccgcuccugcaccaccacccucuacaaggggguguacgagcugcagacgcuggagcucaacauggagacccugaacaugugcaugccgcugagcugcaccaagaacaacucccaccacuacauccgggugggcaacgagacgggccucgagcugacccugaccaacaccagcaucaucaaccacaaguucugcaaccucuccgacgcccacaagaagaaccuguacgaccacgcccugaugagcaucaucuccacguuccaccucagcauccccaacuucaaccaguacgaggccauguccugcgacuucaacgggggcaagaucagcguccaguacaaccugucccacagcuacgccggggacgcggccaaccacugcggcaccguggccaacggggugcugcagaccuucaugcgcauggccuggggcggcuccuacaucgcgcucgacagcgggcggggcaacugggacugcaucaugaccuccuaccaguaccugaucauccagaacacgaccugggacgaccacugccaguucagccgccccucccccaucggguaccugggccuccugagccagcggacccgcgacgucuacaucucccggcgccugcucggcaccuucacguggacccugagcgacagcgaggggaaggacaccccgggcggguacugccugacccgguggaugcucaucgaggccgagcugaagugcuucggcaacacggccguggccaagugcaacgagaagcacgacgaggaguucugcgacaugcugcgccucuucgacuucugcaagcaggccauccagcggcugaaggcggaggcccagauguccauccagcugaucaacaaggccgugaacgcccucaucaacgaccagcugaucaugaagaaccaccuccgcgacaucauggggauccccuacugcaacuacagcaaguacugcuaccugaacaacaccgccaccggcaagaccucccugcccaagugcugccugaucagcaacggcuccuaccucaacgagacgcacuucagcgacgacaucgagcaggaggcggacaacaugaucaccgagaugcugcagaaggaguacauggagcggcaggggaagacgccccugggccucgucgaccuguucguguucuccaccagcuucuaccugaucuccaucuuccugcaccucgugaagaucccgacccaccgccacaucgucggcaagagcugccccaagccccaccggcugaaccacauggggaucugcuccugcgggcuguacaagcagcccggcgugccggugcgcuggaagcggugaggacuagucccuguucccagagcccacuuuuuuuucuuuuuuugaaauaaaauagccugucuuucagaucucaaaggcucuuuucagagccaccaaaaaaaaaaaaaaaaaaaaaaaaaaaaaaaaaaaaaaaaaaaaaaaaaaaaaaaaaaaaaaaaagaauu

SEQ ID NO: 40477 - RNA, 1736 nt, Artificial Sequence
  mRNA product Design a-2 (hSL-A64-N5) comprising derived and/or modified sequence from LASV(G3010-SLE-2013;Clade IV)__AIT17344__GPCmut12 (opt1)
aggagaguccgcucagccagguugcagaagcggcuuagcguguguccuaaucuucucucugcguguagguaggccugugccgcaaacaagcuuaccaugggccagaucgugaccuucuuccaggaggucccccacgugaucgaggaggugaugaacaucguccugaucgcccucagcauccuggccgugcugaaggggcucuacaacuucgcgaccugcggccugguggggcuggucacguuccuccugcugugcggccgcuccugcaccaccagccucuacaaggggguguacgagcugcagacccuggagcucaacauggagacgcugaacaugugcaugccgcuguccugcaccaagaacaacagccaccacuacaucauggugggcaacgagaccggccucgagcugacgcugaccaacaccuccaucaucaaccacaaguucugcaaccucagcgacgcccacaagaagaaccuguacaaccacgcccugauguccaucaucagcaccuuccaccucuccauccccaacuucaaccaguacgaggccaugagcugcgacuucaacgggggcaagaucuccguccaguacaaccugagccacuccuacgccggggacgcggccagccacugcggcacgguggccaacggggugcugcagaccuucaugcggauggccuggggcggcuccuacaucgcgcucgacagcggguacggcaagugggacugcaucaugaccuccuaccaguaccugaucauccagaacaccacgugggaggaccacugccaguucagccgccccucccccaucggguaccugggccuccugagccagcggacccgcgacaucuacaucagccggcgccugcucggcaccuucaccuggacgcuguccgacagcgaggggaaggacaccccgggcggguacugccugacccgguggaugcucaucgaggccgagcugaagugcuucggcaacaccgccgucgccaagugcaacgagaagcacgacgaggaguucugcgacaugcugcgccucuucgacuucugcaagcaggccauccagcggcugaagacggaggcgcagauguccauccagcugaucaacaaggccgugaacgcccucaucaacgaccagcugaucaugaagaaccaccuccgcgacaucauggggauccccuacugcaacuacagcaaguacugcuaccugaaccacaccaccaccggcaagacgucccugcccaagugcugccuggugagcaacggcuccuaccucaacgagacccacuucagcgacgacaucgagcagcaggccgacaacaugaucaccgagaugcugcagaaggaguacauggagcggcaggggaagacgccccugggccucgucgaccuguucguguucuccaccagcuucuaccugaucuccaucuuccugcaccucgugaagaucccgacccaccgccacaucgucggcaagagcugccccaagccccaccggcugaaccacauggggaucugcuccugcgggcuguacaagcagcccggcgugccggugcgcuggaagcggugaggacuagucccuguucccagagcccacuuuuuuuucuuuuuuugaaauaaaauagccugucuuucagaucucaaaggcucuuuucagagccaccaaaaaaaaaaaaaaaaaaaaaaaaaaaaaaaaaaaaaaaaaaaaaaaaaaaaaaaaaaaaaaaaagaauu

SEQ ID NO: 40478 - RNA, 1736 nt, Artificial Sequence
  mRNA product Design a-2 (hSL-A64-N5) comprising derived and/or modified sequence from LASV(G502-SLE-2009;Clade IV)__AIT17126__GPCmut12 (opt1)
aggagaguccgcucagccagguugcagaagcggcuuagcguguguccuaaucuucucucugcguguagguaggccugugccgcaaacaagcuuaccaugggccagaucgugaccuucuuccaggaggucccccacgugaucgaggaggugaugaacaucguccugaucgcccucagcauccuggccgugcugaaggggcucuacaacuucgcgaccugcggccugguggggcugcucacguuccugcugcucugcggccgcuccugcaccaccgggcuguacaagggcgucuacgagcugcagacccucgagcugaacauggagacgcugaacaugugcaugccgcucagcugcaccaagaacaacucccaccacuacaucauggugggcaacgagaccgggcuggagcugacgcucaccaacaccagcaucaucaaccacaaguucugcaaccuguccgacgcccacaagaagaaccuguacgaccacgcccucaugagcaucaucuccaccuuccaccugagcauccccaacuucaaccaguacgaggccauguccugcgacuucaacggcgggaagaucagcgugcaguacaaccugucccacagcuacgccggcgacgcggccgaccacugcgggacggucgccaacggcgugcuccagaccuucaugcggauggccuggggcggguccuacaucgcgcuggacagcggccgcgggcggugggacugcaucaugaccuccuaccaguaccugaucauccagaacaccacgugggaggaccacugccaguucagccgccccucccccaucggcuaccucggccugcugagccagcggacccgcgacaucuacaucucccggcgccuccuggggaccuucaccuggacgcugagcgacagcgagggcaaggacacccccgggggcuacugccucacccgguggaugcugaucgaggccgagcugaagugcuucgggaacaccgccguggccaagugcaacgagaagcacgacgaggaguucugcgacaugcuccgccuguucgacuucugcaagcaggccauccagcggcugaaggcggaggcccagauguccauccagcucaucaacaaggccgucaacgcccugaucaacgaccagcuggugaugaagaaccaccuccgcgacaucaugggcauccccuacugcaacuacagccgguacugcuaccugaaccacacgaccaccggccgcaccucccugcccaagugcugccucgugagcaacggguccuaccugaacgagacgcacuucagcgacgacaucgagcagcaggccgacaacaugaucaccgagaugcugcagaaggaguacauggagcggcagggcaagaccccgcucgggcuggucgaccuguucguguucuccaccagcuucuaccugaucuccaucuuccuccaccuggugaagaucccgacgcaccgccacaucgucggcaagagcugccccaagccccaccggcugaaccacauggggaucugcuccugcggccucuacaagcagcccggcgugccggugaaguggaagcgcugaggacuagucccuguucccagagcccacuuuuuuuucuuuuuuugaaauaaaauagccugucuuucagaucucaaaggcucuuuucagagccaccaaaaaaaaaaaaaaaaaaaaaaaaaaaaaaaaaaaaaaaaaaaaaaaaaaaaaaaaaaaaaaaaagaauu

SEQ ID NO: 40479 - RNA, 1736 nt, Artificial Sequence
  mRNA product Design a-2 (hSL-A64-N5) comprising derived and/or modified sequence from LASV(G733-SLE-2010;Clade IV)__AIT17154__GPCmut12 (opt1)
aggagaguccgcucagccagguugcagaagcggcuuagcguguguccuaaucuucucucugcguguagguaggccugugccgcaaacaagcuuaccaugggccagaucgugaccuucuuccaggaggucccccacgugaucgaggaggugaugaacaucguccugaucgcccucagcauccuggccgugcugaaggggcucuacaacuucgcgaccugcggcaucguggggcuggucuccuuccugcuccugugcggccgcagcugcacgaccucccuguacaaggggguguacgagcuccagacccuggagcugaacauggagacccucaacaugugcaugccgcugagcugcaccaagaacaacucccaccacuacaucauggugggcaacgagaccggccuggagcucacccugacgaacaccagcaucaucaaccacaaguucugcaaccuguccgacgcccacaagaagaaccucuacgaccacgcccugaugagcaucaucuccaccuuccaccugagcauccccaacuucaaccaguacgaggccauguccugcgacuucaacgggggcaagaucagcguccaguacaaccucucccacagcuacgccggggacgcggccaaccacugcggcaccaucgccaacggggugcugcagacguucaugcggauggccuggggcggcuccuacaucgcgcuggacagcgggcgcgaccggugggacugcaucaugaccuccuaccaguaccucaucauccagaacaccaccugggaggaccacugccaguucagccgccccucccccaucggcuaccuggggcugcucagccagcggacgcgcgacaucuacaucagccggcgccugcugggcaccuucaccuggacccucuccgacagcgagggcaaggacacgcccgggggcuacugccugacccgguggaugcugaucgaggccgagcucaagugcuucgggaacaccgccguggccaagugcaacgagaagcacgacgaggaguucugcgacaugcugcgccuguucgacuucugcaagcaggccauccagcggcucaaggcggaggcccagauguccauccagcugaucaacaaggccgucaacgcccugaucaacgaccagcucaucaugaagaaccaccuccgcgacaucaugggcauccccuacugcaacuacagcaaguacugcuaccugaaccacaccacgaccgggaagaccucccugcccaagugcugccuggugagcaacggcuccuaccugaacgagacccacuucagcgacgacaucgagcagcaggccgacaacaugaucacggagaugcuccagaaggaguacauggagcggcagggcaagaccccgcuggggcugguggaccucuucgucuucuccaccagcuucuaccugaucuccaucuuccugcaccuggugaagaucccgacccaccgccacguggucggcaagagcugccccaagccccaccggcucaaccacauggggaucugcuccugcggccuguacgggcagcccggcgugccggugaaguggaagcgcugaggacuagucccuguucccagagcccacuuuuuuuucuuuuuuugaaauaaaauagccugucuuucagaucucaaaggcucuuuucagagccaccaaaaaaaaaaaaaaaaaaaaaaaaaaaaaaaaaaaaaaaaaaaaaaaaaaaaaaaaaaaaaaaaagaauu

SEQ ID NO: 40480 - RNA, 1736 nt, Artificial Sequence
  mRNA product Design a-2 (hSL-A64-N5) comprising derived and/or modified sequence from MOPV/LASV reassortant(IGS-1;Clade IV)__AFY05576__GPCmut12 (opt1)
aggagaguccgcucagccagguugcagaagcggcuuagcguguguccuaaucuucucucugcguguagguaggccugugccgcaaacaagcuuaccaugggccagaucgugaccuucuuccaggaggucccccacgugaucgaggaggugaugaacaucguccugaucgcccucagcgugcuggccgugcugaaggggcucuacaacuucgcgaccugcggccuggucgggcuggugacguuccuccugcugugcggccgcuccugcaccaccagccucuacaaggggguguacgagcugcagacccuggagcucaacauggagacgcugaacaugugcaugccgcuguccugcaccaagaacaacagccaccacuacaucauggucggcaacgagaccggccucgagcugacgcugaccaacaccuccaucaucaaccacaaguucugcaaccucagcgacgcccacaagaagaaccuguacgaccacgcccugauguccaucaucagcaccuuccaccucuccauccccaacuucaaccaguacgaggccaugagcugcgacuucaacgggggcaagaucuccgugcaguacaaccugagccacuccuacgccggggacgcggccaaccacugcggcacgguggccaacgggguccugcagaccuucaugcggauggccuggggcggcagcuacaucgcgcucgacuccgggcgcggcaacugggacugcaucaugaccagcuaccaguaccugaucauccagaacaccacgugggaggaccacugccaguucucccggcccagccccaucggguaccugggccuccugucccagcgcacccgggacaucuacaucagccgccggcugcucggcaccuucaccuggacgcugagcgacuccgagggggaggacaccccgggcggguacugccugacccgcuggaugcucaucgaggccgagcugaagugcuucggcaacaccgccguggccaagugcaacgagaagcacgacgaggaguucugcgacaugcugcggcuguucgacuucugcaagcaggccauccagcgccugaaggcggaggcccagaugagcauccagcugaucaacaaggccgugaacgcccucaucaacgaccagcugaucaugaagaaccaccuccgggacaucauggggauccccuacugcaacuacuccaaguacugcuaccucaaccacacgaccaccggccgcaccagccugcccaagugcugccuggucuccaacggcagcuaccucaacgagacgcacuucuccgacgacaucgagcagcaggccgacaacaugaucaccgagaugcugcagaaggaguacauggagcggcaggggaagacgccccugggccucguggaccuguucguguucagcaccuccuucuaccugaucagcaucuuccugcaccucgucaagaucccgacccaccgccacaucguggggaaguccugccccaagccccaccggcugaaccacaugggcaucugcagcugcgggcuguacaagcagcccggcgugccggucaaguggaagcgcugaggacuagucccuguucccagagcccacuuuuuuuucuuuuuuugaaauaaaauagccugucuuucagaucucaaaggcucuuuucagagccaccaaaaaaaaaaaaaaaaaaaaaaaaaaaaaaaaaaaaaaaaaaaaaaaaaaaaaaaaaaaaaaaaagaauu

SEQ ID NO: 40481 - RNA, 1736 nt, Artificial Sequence
  mRNA product Design a-2 (hSL-A64-N5) comprising derived and/or modified sequence from LASV(LM765-SLE-2012;Clade IV)__AIT17814__GPCmut12 (opt1)
aggagaguccgcucagccagguugcagaagcggcuuagcguguguccuaaucuucucucugcguguagguaggccugugccgcaaacaagcuuaccaugggccagaucgugaccuucuuccaggaggucccccacgugaucgaggaggugaugaacaucguccugaucgcccucagcauccuggccgugcugaaggggcucuacaacuucgcgaccugcggccugguggggcuggucacguuccuccugcugugcggccgcuccugcaccaccagccucuacaaggggguguacgagcugcagacccuggagcucaacauggagacgcugaacaugugcaugccgcuguccugcaccaagaacaacagccaccacuacaucauggugggcaacgagaccggccucgagcugacgcugaccaacaccuccaucaucgaccacaaguucugcaaccucagcgacgcccaccggaagaaccuguacgaccacgcccugauguccaucaucagcaccuuccaccucuccauccccaacuucaaccaguacgaggccaugagcugcgacuucaacgggggcaagaucuccguccaguacaaccugagccacuccuacgccaaggacgcggccgaccacugcgggacgguggccaacggcgugcugcagaccuucaugcgcauggccuggggcgggagcuacaucgcgcucgacuccggccgggggcgcugggacugcaucaugaccagcuaccaguaccugaucauccagaacaccacgugggaggaccacugccaguucucccggcccagccccaucggcuaccuggggcuccugucccagcgcacccgggacaucuacaucagccgccggcugcucggcaccuucaccuggacgcugagcgacuccgagggcaaggacacccccgggggcuacugccugacccgcuggaugcucaucgaggccgagcugaagugcuucgggaacaccgccgucgccaagugcaacgagaagcacgacgaggaguucugcgacaugcugcggcuguucgacuucugcaagcaggccauccagcgccugaaggcggaggcccagaugagcauccagcugaucaacaaggccgugaacgcccucaucaacgaccagcugaucaugaagaaccaccuccgggacaucaugggcauccccuacugcaacuacuccaaguacugcuaccucaaccacacgaccaccgggaagaccagccugcccaagugcugccugguguccaacggcagcuaccucaacgagacgcacuucuccgacgacaucgagcagcaggccgacaacaugaucaccgagaugcugcagaaggaguacauggagcgccagggcaagaccccgcuggggcucgucgaccuguucguguucagcaccuccuucuaccugaucagcaucuuccugcaccucgugaagaucccgacgcaccggcacaucgucggcaagcccugccccaagccccaccgccugaaccacauggggaucugcuccugcggccuguacaagcagccgggggugcccgugaaguggaagcggugaggacuagucccuguucccagagcccacuuuuuuuucuuuuuuugaaauaaaauagccugucuuucagaucucaaaggcucuuuucagagccaccaaaaaaaaaaaaaaaaaaaaaaaaaaaaaaaaaaaaaaaaaaaaaaaaaaaaaaaaaaaaaaaaagaauu

SEQ ID NO: 40482 - RNA, 1736 nt, Artificial Sequence
  mRNA product Design a-2 (hSL-A64-N5) comprising derived and/or modified sequence from LASV(LM776-SLE-2012;Clade IV)__AIT17824__GPCmut12 (opt1)
aggagaguccgcucagccagguugcagaagcggcuuagcguguguccuaaucuucucucugcguguagguaggccugugccgcaaacaagcuuaccaugggccagaucgugaccuucuuccaggaggucccccacgugaucgaggaggugaugaacaucguccugaucgcccucagcauccuggccgugcugaaggggcucuacaacuucgcgaccugcggccugguggggcuggucacguuccuccugcugugcggccgcuccugcaccaccagcguguacaaggggguguacgagcuccagacccuggagcugaacauggagacgcucaacaugugcaugccgcuguccugcaccaagaacaacagccaccacuacaucauggucggcaacgagaccggccuggagcucacgcugaccaacaccuccaucaucaaccacaaguucugcaaccugagcgacgcccacaagaagaaccucuacgaccacgcccugauguccaucaucagcaccuuccaccuguccauccccaacuucaaccaguacgaggccaugagcugcgacuucaacgggggcaagaucuccgugcaguacaaccucagccacuccuacgccggggacgcggccaaccacugcggcacgguggccaacgggguccugcagaccuucaugcggauggccuggggcggcagcuacaucgcgcuggacuccgggcacggcaagugggacugcaucaugaccagcuaccaguaccucaucauccagaacaccacgugggaggaccacugccaguucucccgccccagccccaucggguaccugggccugcucucccagcggacccgcgacaucuacaucagccggcgccugcugggcaccuucaccuggacgcucagcgacuccgaggggaaggacaccccgggcggguacugccugacccgguggaugcugaucgaggccgagcucaagugcuucggcaacaccgccguggccaagugcaacgagaagcacgacgaggaguucugcgacaugcugcgccuguucgacuucugcaagcaggccauccagcggcucaaggcggaggcccagaugagcauccagcugaucaacaaggccgugaacgcccugaucaacgaccagcucaucaugaagaaccaccuccgcgacaucauggggauccccuacugcaacuacuccaaguacugcuaccugaaccacacgaccaccggcaagaccagccugcccaagugcugccuggucuccaacggcagcuaccugaacgagacgcacuucuccgacgacaucgagcagcaggccgacaacaugaucaccgagaugcuccagaaggaguacauggagcggcaggggaagacgccccugggccugguggaccucuucguguucagcaccuccuucuaccugaucagcaucuuccugcaccuggucaagaucccgacccaccgccacaucguggggaaguccugccccaagccccaccggcucaaccacaugggcaucugcagcugcgggcuguacaagcagcccggcgugccgguccgcuggaagcggugaggacuagucccuguucccagagcccacuuuuuuuucuuuuuuugaaauaaaauagccugucuuucagaucucaaaggcucuuuucagagccaccaaaaaaaaaaaaaaaaaaaaaaaaaaaaaaaaaaaaaaaaaaaaaaaaaaaaaaaaaaaaaaaaagaauu

SEQ ID NO: 40483 - RNA, 1736 nt, Artificial Sequence
  mRNA product Design a-2 (hSL-A64-N5) comprising derived and/or modified sequence from LASV(Mad39;Clade IV)__ANH09722__GPCmut12 (opt1)
aggagaguccgcucagccagguugcagaagcggcuuagcguguguccuaaucuucucucugcguguagguaggccugugccgcaaacaagcuuaccaugggccagaucgugaccuucuuccaggaggucccccacgugaucgaggaggugaugaacaucguccugaucgcccucagcauccuggccgugcugaaggggcucuacaacguggcgaccugcggccugaucgggcuggucacguuccuccugcugugcggccgcuccugcaccaccacccucuacaaggggguguacgagcugcaggcccuggagcucaacauggagacgcugaacaugugcaugccgcugagcugcaccaagaacaacucccaccacuacauccgggugggcaacgagaccggccucgagcugacgcugaccaacaccagccucaucaaccacaaguucugcaaccuguccgacgcccacaagaagaaccuguacgaccacgcccucaugagcaucaucuccaccuuccaccugagcauccccaacuucaaccaguacgaggccauguccugcgacuucaacgacgggaagaucagcguccaguacaaccugucccacacguacgcgggcgacaccgccaaccacugcgggaccguggccaacggcgugcuccagaccuucaugcgcauggccuggggcgggagcuacaucgcgcuggacuccggccgcgggggcugggacugcaucaugacgagcuaccaguaccugaucauccagaacaccaccugggaggaccacugccaguucucccggcccagccccaucggguaccucggccugcugucccagcggacccgcgacaucuacaucagccggcgccuccugggcacguucaccuggacccuguccgacagcgaggggaaggacaccccgggcggguacugccucacgcgguggaugcugaucgaggccgagcugaagugcuucggcaacaccgccgucgccaagugcaacgagaagcacgacgaggaguucugcgacaugcuccgccuguucgacuucugcaagcaggccauccagcggcugaaggcggaggcccagaugagcauccagcucaucaacaaggccgugaacgcccugaucaacgaccagcugaucaugaagaaccaccuccgcgacaucauggggauccccuacugcaacuacuccaaguacugcuaccugaaccacaccgugaccggcaagacgagccugcccaagugcugccucgucuccaacggcagcuaccugaacgagacccacuucuccgacgacaucgagcagcaggccgacaacaugaucaccgagaugcugcagaaggaguacauggagcggcaggggaagacgccccucggccugguggaccuguucguguucagcaccuccuucuaccugaucagcaucuuccuccaccuggucaagaucccgacccaccgccacgugguggggaagcccugccccaagccccaccggcugaaccacaugggcaucugcuccugcggguucuacaagcagccgggcguccccgugcgcuggaagcggugaggacuagucccuguucccagagcccacuuuuuuuucuuuuuuugaaauaaaauagccugucuuucagaucucaaaggcucuuuucagagccaccaaaaaaaaaaaaaaaaaaaaaaaaaaaaaaaaaaaaaaaaaaaaaaaaaaaaaaaaaaaaaaaaagaauu

SEQ ID NO: 40484 - RNA, 1736 nt, Artificial Sequence
  mRNA product Design a-2 (hSL-A64-N5) comprising derived and/or modified sequence from LASV(Z0947-SLE-2011;Clade IV)__AIT17840__GPCmut12 (opt1)
aggagaguccgcucagccagguugcagaagcggcuuagcguguguccuaaucuucucucugcguguagguaggccugugccgcaaacaagcuuaccaugggccagaucgugaccuucuuccaggaggucccccacgugaucgaggaggugaugaacaucguccugaucgcccucagcauccuggccgugcugaaggggcucuacaacuucgcgaccugcggccugguggggcuggucacguuccuccugcugugcggccgcuccugcaccaucagccucuacaaggggguguacgagcugcagacccuggagcucaacauggagacccugaacaugugcaugccgcuguccugcaccaagaacaacagccaccacuacaucauggugggcaacgagaccggccucgagcugacccugacgaacaccuccaucaucaaccacaaguucugcaaccucagcgacgcccacaagaagaaccuguacgaccacgcccugauguccaucaucagcaccuuccaccucuccauccccaacuucaaccaguacgaggccaugagcugcgacuucaacgggggcaagaucuccguccaguacaaccugagccacuccuacgccggggacgcggccaaccacugcggcaccguggccaacggggugcugcagacguucaugcggauggccuggggcggcagcuacaucgcgcucgacuccgggcgcgaccggugggacugcaucaugaccagcuaccaguaccugaucauccagaacaccaccugggaggaccacugccaguucucccgccccagccccaucggcuaccuggggcuccugucccagcggacgcgcgacaucuacaucagccggcgccugcucggcaccuucaccuggacccugagcgacuccgagggcaaggacacgcccgggggcuacugccugacccgguggaugcucaucgaggccgagcugaagugcuucgggaacaccgccgucgccaagugcaacgagaagcacgacgaggaguucugcgacaugcugcgccucuucgacuucugcaagcaggccauccagcggcugaaggcggaggcccagaugagcauccagcugaucaacaaggccgugaacgcccucaucaacgaccagcugaucaugaagaaccaccuccgcgacaucaugggcauccccuacugcaacuacuccaaguacugcuaccugaaccacaccacgaccgggaagaccagccugcccaagugcugccugguguccaacggcagcuaccucaacgagacccacuucuccgacgacaucgagcagcaggccgacaacaugaucacggagaugcugcagaaggaguacauggagcggcagggcaagaccccgcuggggcucgucgaccuguucguguucagcaccuccuucuaccugaucagcaucuuccugcaccucgugaagaucccgacccaccgccacaucgucggcaagcccugccccaagccccaccggcugaaccacauggggaucugcuccugcggccuguacaagcagccgggggugcccgugaaguggaagcgcugaggacuagucccuguucccagagcccacuuuuuuuucuuuuuuugaaauaaaauagccugucuuucagaucucaaaggcucuuuucagagccaccaaaaaaaaaaaaaaaaaaaaaaaaaaaaaaaaaaaaaaaaaaaaaaaaaaaaaaaaaaaaaaaaagaauu

SEQ ID NO: 40485 - RNA, 1736 nt, Artificial Sequence
  mRNA product Design a-2 (hSL-A64-N5) comprising derived and/or modified sequence from LASV(Josiah;Clade IV)__NP_694870__GPCmut12 (opt1)
aggagaguccgcucagccagguugcagaagcggcuuagcguguguccuaaucuucucucugcguguagguaggccugugccgcaaacaagcuuaccaugggccagaucgugaccuucuuccaggaggucccccacgugaucgaggaggugaugaacaucguccugaucgcccucagcgugcuggccgugcugaaggggcucuacaacuucgcgaccugcggccuggucgggcuggugaccuuccuccugcugugcggccgcuccugcaccaccagccucuacaaggggguguacgagcugcagacccuggagcucaacauggagacgcugaacaugugcaugccgcuguccugcaccaagaacaacagccaccacuacaucauggucggcaacgagaccggccucgagcugacccugacgaacaccuccaucaucaaccacaaguucugcaaccucagcgacgcccacaagaagaaccuguacgaccacgcccugauguccaucaucagcaccuuccaccucuccauccccaacuucaaccaguacgaggccaugagcugcgacuucaacgggggcaagaucuccgugcaguacaaccugagccacuccuacgccggggacgcggccaaccacugcggcaccguggccaacgggguccugcagacguucaugcggauggccuggggcggcagcuacaucgcgcucgacuccgggcgcggcaacugggacugcaucaugaccagcuaccaguaccugaucauccagaacaccaccugggaggaccacugccaguucucccggcccagccccaucggguaccugggccuccugucccagcgcacgcgggacaucuacaucagccgccggcugcucggcaccuucaccuggacccugagcgacuccgaggggaaggacacgccgggcggguacugccugacccgcuggaugcucaucgaggccgagcugaagugcuucggcaacaccgccguggccaagugcaacgagaagcacgacgaggaguucugcgacaugcugcggcuguucgacuucugcaagcaggccauccagcgccugaaggcggaggcccagaugagcauccagcugaucaacaaggccgugaacgcccucaucaacgaccagcugaucaugaagaaccaccuccgggacaucauggggauccccuacugcaacuacuccaaguacugcuaccucaaccacaccacgaccggccgcaccagccugcccaagugcugccuggucuccaacggcagcuaccucaacgagacccacuucuccgacgacaucgagcagcaggccgacaacaugaucacggagaugcugcagaaggaguacauggagcggcaggggaagacgccccugggccugguggaccucuucguguucagcaccuccuucuaccugaucagcaucuuccugcaccucgucaagaucccgacccaccgccacaucguggggaaguccugccccaagccccaccggcugaaccacaugggcaucugcagcugcgggcuguacaagcagcccggcgugccggucaaguggaagcgcugaggacuagucccuguucccagagcccacuuuuuuuucuuuuuuugaaauaaaauagccugucuuucagaucucaaaggcucuuuucagagccaccaaaaaaaaaaaaaaaaaaaaaaaaaaaaaaaaaaaaaaaaaaaaaaaaaaaaaaaaaaaaaaaaagaauu

SEQ ID NO: 40486 - RNA, 1733 nt, Artificial Sequence
  mRNA product Design a-2 (hSL-A64-N5) comprising derived and/or modified sequence from LASV(LP;Clade I)__AAF86701__GPCmut12 (opt1)
aggagaguccgcucagccagguugcagaagcggcuuagcguguguccuaaucuucucucugcguguagguaggccugugccgcaaacaagcuuaccaugggccagaucaucaccuucuuccaggaggugccccacgucaucgaggaggugaugaacaucgugcugaucgcccucagccugcuggccauccucaaggggcuguacaacaucgcgaccugcggcaucaucgggcuggucgccuuccucuuccugugcggcaaguccugcagccugacgcucaagggcggguacgagcugcagacccuggagcucaacauggagacccugaacaugugcaugccgcuguccugcaccaagaacagcucccaccacuacauccgcgugggcaacgagacggggcucgagcugacccugaccaacaccagcaucaucaaccacaaguucugcaaccucuccgacgcccacaagaagaaccuguacgaccacgcccugaugagcaucaucuccacguuccaccucagcauccccaacuucaaccaguacgaggccauguccugcgacuucaacggcgggaagaucagcgugcaguacaaccugucccacagcuacgcgggcgacgccgccgagcacugcgggaccgucgccaacggcgugcugcagaccuucaugcggauggcguggggcgggcgcuacaucgcccucgacuccggcaaggggaacugggacugcaucaugaccagcuaccaguaccugaucauccagaacacgaccugggaggaccacugccaguucucccggcccagccccaucggcuaccugggccuccugucccagcgcacccgggacaucuacaucagccgccggcugcucgggaccuucacguggacccugagcgacuccgagggcaacgagacccccgggggcuacugccugacccgcuggaugcucaucgaggccgagcugaagugcuucgggaacacggccguggccaagugcaacgagaagcacgacgaggaguucugcgacaugcugcggcuguucgacuucugcaagcaggcgauccgccggcugaaggccgaggcccagaugagcauccagcugaucaacaaggccgucaacgcccucaucaacgaccagcugaucaugaagaaccaccuccgcgacaucaugggcauccccuacugcaacuacuccaaguacugcuaccucaaccacaccagcuccggccggaccagccugcccaagugcugccugaucuccaacgggagcuaccucaacgagacccaguucuccgacgacaucgagcagcaggcggacaacaugaucacggagaugcugcagaaggaguacaucgagcgccagggcaagaccccgcuggggcugguggacaucuucaucuucagcaccuccuucuaccucaucagcaucuuccugcaccugaucaagaucccgacccaccggcacaucgugggcaagcccugccccaagccccaccgccucaaccacaugggggucugcuccugcggccuguacaagcacccgggcgugcccacgaaguggaagcggugaggacuagucccuguucccagagcccacuuuuuuuucuuuuuuugaaauaaaauagccugucuuucagaucucaaaggcucuuuucagagccaccaaaaaaaaaaaaaaaaaaaaaaaaaaaaaaaaaaaaaaaaaaaaaaaaaaaaaaaaaaaaaaaaagaauu

SEQ ID NO: 40487 - RNA, 1733 nt, Artificial Sequence
  mRNA product Design a-2 (hSL-A64-N5) comprising derived and/or modified sequence from LASV(803213;Clade II)__AAF86703__GPCmut12 (opt1)
aggagaguccgcucagccagguugcagaagcggcuuagcguguguccuaaucuucucucugcguguagguaggccugugccgcaaacaagcuuaccaugggccagaucaucaccuucuuccaggaggugccccacgucaucgaggaggugaugaacaucgugcugaucgcccucagccugcuggccauccucaaggggaucuacaacgucgcgaccugcggccuguucgggcugaucuccuuccuccugcugugcggccgcagcugcuccgugacguacaaggggguguacgagcuccagacccuggagcugaacauggccaaccucaacaugugcaugccgcugagcugcaccaagaacaacucccaccacuacaucauggucggcaacgagaccggccuggagcucacgcugaccaacaccagcaucaucaaccacaaguucugcaaccuguccgacgcccacaagaagaaccucuacgaccacgcccugaugagcaucaucuccaccuuccaccugagcauccccaacuucaaccaguacgaggccauguccugcgacuucaacgggggcaagaucagcgugcaguacaaccucucccacagcuucgcgguggacgccgccaaccacugcgggacgaucgccaacggcguccugcagaccuucaugcggauggcguggggcggguccuacaucgcccuggacagcggcaaggggaacugggacugcaucaugaccuccuaccaguaccucaucauccagaacaccacgugggaggaccacugccaguucagccgccccucccccaucggcuaccuggggcugcucagccagcggacccgcgacaucuacaucagccggcgccugcugggcaccuucaccuggacgcucuccgacagcgagggcaacgaggcccccgggggcuacugccugacccgguggaugcugaucgaggccgagcucaagugcuucgggaacaccgccguggcgaagugcaacgagaagcacgacgaggaguucugcgacaugcugcgccuguucgacuucugcaagcaggccaucaagcggcucaagaccgaggcccagauguccauccagcugaucaacaaggccgugaacgcccugaucaacgaccagcucaucaugaagaaccaccuccgcgacaucaugggcauccccuacugcaacuacagccgguacugcuaccugaaccacacggucaccgggaagaccucccugccccgcugcugccuggugagcaacggcuccuaccugaacgagacccacuucagcgacgacaucgagcagcaggcggacaacaugaucacggagaugcuccagaaggaguacauggaccggcagggcaagaccccgcuggggcugguggaccuguucgucuucuccaccagcuucuaccucaucuccaucuuccugcaccuggugaagaucccgacccaccgccacaucgugggcaagcccugccccaagccccaccggcucaaccacauggggaucugcagcugcggccuguacaagcacccggggguccccgugaaguggaagcgcugaggacuagucccuguucccagagcccacuuuuuuuucuuuuuuugaaauaaaauagccugucuuucagaucucaaaggcucuuuucagagccaccaaaaaaaaaaaaaaaaaaaaaaaaaaaaaaaaaaaaaaaaaaaaaaaaaaaaaaaaaaaaaaaaagaauu

SEQ ID NO: 40488 - RNA, 1733 nt, Artificial Sequence
  mRNA product Design a-2 (hSL-A64-N5) comprising derived and/or modified sequence from LASV(GA391;Clade III)__CAA36645__GPCmut12 (opt1)
aggagaguccgcucagccagguugcagaagcggcuuagcguguguccuaaucuucucucugcguguagguaggccugugccgcaaacaagcuuaccaugggccagaucgugaccuucuuccaggaggucccccacgugaucgaggaggugaugaacaucguccugaucgcccucagcauccuggccauccugaaggggcucuacaacguggcgaccugcggccugaucgggcuggugaccuuccuccugcuguccggccgcagcugcucccucaucuacaaggggaccuacgagcugcagacccuggagcucaacauggagacccugaacaugugcaugccgcugagcugcacgaagaacaacucccaccacuacauccgggucggcaacgagaccggccucgagcugacccugaccaacacgagcauccucaaccacaaguucugcaaccuguccgacgcccacaagcgcaaccuguacgaccacagccucauguccaucaucagcaccuuccaccuguccauccccaacuucaaccaguacgaggccaugagcugcgacuucaacgggggcaagaucaccgugcaguacaaccugucccacagcuucgccguggacgccgcggggcacugcggcacccucgccaacgggguccugcagacguucaugcggauggccuggggcggcuccuacaucgcccuggacagcgggcgcggcaacugggacugcaucaugaccuccuaccaguaccucaucauccagaacaccaccugggacgaccacugccaguucagccggcccucccccaucggguaccugggccugcucagccagcgcacgcgggacaucuacaucagccgccggcugcugggcaccuucaccuggacccucuccgacagcgaggggaacgagacgccgggcggguacugccugacccgcuggaugcugaucgaggcggagcucaagugcuucggcaacaccgccguggccaagugcaacgagaagcacgacgaggaguucugcgacaugcugcggcuguucgacuucugcaagcaggccauccgccggcucaagaccgaggcccagauguccauccagcugaucaacaaggcggugaacgcccugaucaacgaccagcucaucaugaagaaccaccuccgcgacaucauggggauccccuacugcaacuacagccgguacugcuaccugaaccacacguccaccggcaagaccagccugccccgcugcugccugaucuccaacggcagcuaccugaacgagaccaaguucuccgacgacaucgagcagcaggccgacaacaugaucacggagaugcugcagaaggaguacaucgaccggcaggggaagacgccccucggccuggucgaccuguucguguucagcaccuccuucuaccucaucagcaucuuccugcaccuggugaagaucccgacccaccgccacaucgucgggaagcccugccccaagccccaccggcucaaccacaugggcaucugcuccugcgggcuguacaagcagccgggcgugcccgugcgcuggaagcggugaggacuagucccuguucccagagcccacuuuuuuuucuuuuuuugaaauaaaauagccugucuuucagaucucaaaggcucuuuucagagccaccaaaaaaaaaaaaaaaaaaaaaaaaaaaaaaaaaaaaaaaaaaaaaaaaaaaaaaaaaaaaaaaaagaauu

SEQ ID NO: 40489 - RNA, 1736 nt, Artificial Sequence
  mRNA product Design a-2 (hSL-A64-N5) comprising derived and/or modified sequence from LASV(AV;Clade V)__CCA30314__GPCmut12 (opt1)
aggagaguccgcucagccagguugcagaagcggcuuagcguguguccuaaucuucucucugcguguagguaggccugugccgcaaacaagcuuaccaugggccagaucgugaccuucuuccaggaggucccccacgugaucgaggaggugaugaacaucguccugaucgcccucagcauccuggccgugcugaaggggcucuacaacaucgcgaccugcggccugaucgggcugaucacguuccuccugcugugcggccgcuccugcagcuccaaccucuacaaggggguguacgagcugcagagccuggaccucaacauggagacccugaacaugugcaugccgcuguccugcaccaagaacaacagccaccacuacauccgggucggcaacgacaccggccucgagcugacgcugaccaacaccuccauccucaaccacaaguucugcaaccugagcgacgcccacaagaaggaccuguacgaccacgcccucauguccaucaucagcaccuuccaccuguccauccccaacuucaaccaguacgaggccaugagcugcgacuucaacgggggcaagaucuccgugcaguacaaccugagccacuccuacgccaucgacgcggccaaccacugcgggacgguggccaacggcauccuccagaccuucaugcgcauggccuggggcgggagcuacaucgcgcuggacuccggccgggggaacugggacugcaucaugaccagcuaccaguaccugaucauccagaacaccacgugggagaaccacugccaguucucccgccccagccccaucggcuaccucgggcugcugagccagcggacccgcgacaucuacaucucccggcgccuccugggcaccuucaccuggacgcugagcgacuccgagggcaacgccacccccgggggcuacugccucacccgguggaugcugaucgaggccgagcugaagugcuucgggaacaccgccgucgccaagugcaacgagaagcacgacgaggaguucugcgacaugcuccgccuguucgacuucugcaagcaggcgaucagccggcugaaguccgaggcccagaugagcauccagcucaucaacaaggccgugaacgcccugaucaacgaccagcugaucaugaagaaccaccuccgcgacaucaugggcauccccuacugcaacuacuccaaguacugcuaccugaaccacacgaucaccgggaagaccagccugcccaagugcugccucguguccaacggcagcuaccugaacgagacccacuucuccgacgacaucgagcagcaggccgacaacaugaucacggagaugcugcagaaggaguacauggagcggcagggcaagaccccgcuggggcucgucgaccuguucguguucagcaccuccuucuaccugaucagcaucuuccuccgccuggugaagaucccgacccaccggcacaucgucggcaagcccugccccaagccccaccgccugaaccacauggggaucugcuccugcggccucuacaagcagccgggggugcccgugcgguggaagcgcugaggacuagucccuguucccagagcccacuuuuuuuucuuuuuuugaaauaaaauagccugucuuucagaucucaaaggcucuuuucagagccaccaaaaaaaaaaaaaaaaaaaaaaaaaaaaaaaaaaaaaaaaaaaaaaaaaaaaaaaaaaaaaaaaagaauu

SEQ ID NO: 40490 - RNA, 1733 nt, Artificial Sequence
  mRNA product Design a-2 (hSL-A64-N5) comprising derived and/or modified sequence from LASV(Togo/2016/7082;Clade VI)__AMR44577__GPCmut12 (opt1)
aggagaguccgcucagccagguugcagaagcggcuuagcguguguccuaaucuucucucugcguguagguaggccugugccgcaaacaagcuuaccaugggccagaucaucaccuucuuccaggaggugccccacgucaucgaggaggugaugaacaucgugcugaucgcccucagccugcuggccauccucaagggggucuacaacguggcgaccugcggcaucaucgggcuggugacguuccuguuccucugcggccgcuccugcagccugaucuacaagggguccuacgagcugcagacccucgagcugaacauggagacccugaacaugugcaugccgcucagcugcaccaagaacuccagccaccacuacauccgggucggcaacgagacgggccuggagcugacccucaccaacaccuccaucaucaaccacaaguucugcaaccugagcgacgcccacaagcgcaaccuguacgaccacgcccucauguccauccugagcacguuccaccuguccauccccaacuucaaccaguacgaggccaugagcugcgacuucaacgggggcaagaucuccgugcaguacaaccucagccacgccuacgcgguggacgccgccgagcacugcgggaccgucgccaacggcgugcugcagaccuucaugcggauggcguggggcggguccuacaucgcccuggacagcggccgcgggaacugggacugcaucaugaccuccuaccaguaccucaucauccagaacacgaccugggaggaccacugccaguucagccggcccucccccaucggcuaccuggggcugcucagccagcgcacccgggacaucuacaucagccgccggcugcugggcaccuucacguggacccucuccgacagcgagggcaacgagacccccgggggcuacugccugacccgcuggaugcugaucgaggccgagcucaagugcuucgggaacacggccguggccaagugcaacgagaagcacgacgaggaguucugcgacaugcugcggcuguucgacuucugcaagcaggcgauccagcgccucaaguccgaggcccagaugagcauccagcugaucaacaaggccgucaacgcccugaucaacgaccagcucaucaugaagaaccaccuccgggacaugaugggcauccccuacugcaacuacuccaaguacugcuaccugaaccacaccagcuccgggcgcaccagccugcccaagugcugccugguguccaacggcagcuaccugaacgagacccacuucuccgacgacaucgagcagcaggccgacaacaugaucacggagaugcuccagaaggaguacaucgaccggcagggcaagaccccgcuggggcugguggaccuguucgucuucagcaccuccuucuaccucaucagcaucuuccugcaccugaucaagaucccgacccaccgccacaucgugggcaagcccugccccaagccccaccggcucaaccacauggggaucugcuccugcggccuguacaagcagccgggggugcccacgcgcuggaagcggugaggacuagucccuguucccagagcccacuuuuuuuucuuuuuuugaaauaaaauagccugucuuucagaucucaaaggcucuuuucagagccaccaaaaaaaaaaaaaaaaaaaaaaaaaaaaaaaaaaaaaaaaaaaaaaaaaaaaaaaaaaaaaaaaagaauu

SEQ ID NO: 40491 - RNA, 1733 nt, Artificial Sequence
  mRNA product Design a-2 (hSL-A64-N5) comprising derived and/or modified sequence from LASV(KAK-428;Clade n.d. (VII))__ANH09740__GPCmut12 (opt1)
aggagaguccgcucagccagguugcagaagcggcuuagcguguguccuaaucuucucucugcguguagguaggccugugccgcaaacaagcuuaccaugggccagaucgugaccuucuuccaggaggucccccacgugaucgaggaggugaugaacaucguccugaucgcccucagccugcuggccauccucaaggggcuguacaacuucgcgaccugcggcgugaucgggcugaucacguuccuccugcugugcggccgcuccugcagcgccaccuacaaggggcaguacgagcuccagacccuggagcugaacauggagucccucaacaugugcaugccgcugagcugcaccaagaacaacucccaccacuacauccgggccggcaacaacacgggccuggagcucacccugaccaacaccagcaucaucucccacaaguucugcaaccugagcgacgcccacaagaagaaccucuacgaccacacgcugauguccaucaucaccaccuuccaccugagcauccccaacuucaaccaguacgaggccauguccugcgacuucaacgggggcaagaucagcauccaguacaaccucucccacagcuacgcgggggacgccgcccagcacugcggcaccguggccaacgggguccugcagacguucaugcgcauggcguggggcggcuccuaccuggcccucgacagcgggcggcgcggcugggacugcaucaucuccagcuaccaguaccugaucauccagaacaccaccugggacgaccacugccaguucucccggcccagccccaucggguaccugggcuucgugagccagaagacccgcgacaucuacaucucccggcgccuccugggcacguucaccuggacccugagcgacuccgaggggcacgacaugccgggcggguacugccucacccgguggaugcugaucgaggccgaccugaagugcuucggcaacacggccguggccaagugcaacgagaagcacgacgaggaguucugcgacauguggcgccucuucgacuucugcaagcaggcgauccagcggcugaaggccgaggcccagaugaacauccagcugaucaacaaggccgucaacgcccucaucaacgaccagcugaugaugaagaaccaccuccgcgacaucauggggauccccuacugcaacuacagcaaguucugcuaccugaacaacaccaccaccggccggacgucccugccccgcugcugccugaucagcaacggcuccuaccucaacgagacccacuucagcgacgacaucgagcagcaggcggacaacaugaucaccgagaugcugcagaaggaguacauggaccggcaggggaagacgccccugggccucguggaccuguucguguucuccaccagcuucuaccugaucaccaucuuccugcaccucgucaagaucccgacccaccgccacaucguggggaagcccugccccaagccccaccggcugaaccacaugggcaucugcuccugcgggcuguacaagcagccgggcgugcccguccgcuggaagcggugaggacuagucccuguucccagagcccacuuuuuuuucuuuuuuugaaauaaaauagccugucuuucagaucucaaaggcucuuuucagagccaccaaaaaaaaaaaaaaaaaaaaaaaaaaaaaaaaaaaaaaaaaaaaaaaaaaaaaaaaaaaaaaaaagaauu

SEQ ID NO: 40492 - RNA, 1733 nt, Artificial Sequence; identical to SEQ ID NO: 40486
  mRNA product Design a-2 (hSL-A64-N5) comprising derived and/or modified sequence from LASV(Pinneo-NIG-1969;Clade I)__AIT17836__GPCmut12 (opt1)

SEQ ID NO: 40493 - RNA, 1733 nt, Artificial Sequence
  mRNA product Design a-2 (hSL-A64-N5) comprising derived and/or modified sequence from LASV(ISTH0009-NIG-2011;Clade II)__AIT17404__GPCmut12 (opt1)
aggagaguccgcucagccagguugcagaagcggcuuagcguguguccuaaucuucucucugcguguagguaggccugugccgcaaacaagcuuaccaugggccagaucaucaccuucuuccaggaggugccccacgucaucgaggaggugaugaacaucgugcugaucgcccucagccugcuggccauccucaaggggaucuacaacgucgcgaccugcggccuguucgggcugguguccuuccuccugcugugcggccgcagcugcuccacgaccuacaaggggguguacgagcuccagacccuggagcuggacauggccagccucaacaugugcaugccgcuguccugcaccaagaacaacagccaccacuacaucauggucggcaacgagacgggccuggagcucacccugaccaacaccuccaucaucaaccacaaguucugcaaccugagcgacgcccacaagaagaaccucuacgaccacgcccugauguccaucaucagcacguuccaccuguccauccccaacuucaaccaguacgaggccaugagcugcgacuucaacgggggcaagaucuccgugcaguacaaccucagccacgcguacgccguggacgccgccaaccacugcgggaccaucgcgaacggcguccugcagaccuucaugcggauggccuggggcggguccuacaucgcccuggacagcggcaagggguccugggacugcaucaugaccagcuaccaguaccucaucauccagaacacgaccugggaggaccacugccaguucucccgccccagccccaucggcuaccuggggcugcucagccagcggacccgcgacaucuacaucucccggcgccugcugggcaccuucacguggacccucagcgacuccgagggcaacgagacccccgggggcuacugccugacccgguggaugcugaucgaggccgagcucaagugcuucgggaacacggccguggcgaagugcaacgagaagcacgacgaggaguucugcgacaugcugcgccuguucgacuucugcaagcaggccauccggcgccucaagaccgaggcccagaugagcauccagcugaucaacaaggccgugaacgcccugaucaacgaccagcucaucaugaagaaccaccuccgggacaucaugggcauccccuacugcaacuacuccaaguacugcuaccugaaccacaccgucaccgggaagacgagccugccccgcugcugccugguguccaacggcagcuaccugaacgagacccacuucuccgacgacaucgagcagcaggcggacaacaugaucaccgagcuccugcagaaggaguacauggaccggcagggcaagaccccgcuggggcugguggaccucuucgucuucagcacguccuucuaccugaucagcaucuuccugcaccucaucaagaucccgacccaccgccacaucaccggcaagcccugccccaagccccaccggcugaaccacauggggaucugcuccugcggccuguacaagcacccgggggugcccgugaaguggaagcgcugaggacuagucccuguucccagagcccacuuuuuuuucuuuuuuugaaauaaaauagccugucuuucagaucucaaaggcucuuuucagagccaccaaaaaaaaaaaaaaaaaaaaaaaaaaaaaaaaaaaaaaaaaaaaaaaaaaaaaaaaaaaaaaaaagaauu

SEQ ID NO: 40494 - RNA, 1733 nt, Artificial Sequence
  mRNA product Design a-2 (hSL-A64-N5) comprising derived and/or modified sequence from LASV(ISTH2010-NIG-2012;Clade II)__AIT17482__GPCmut12 (opt1)
aggagaguccgcucagccagguugcagaagcggcuuagcguguguccuaaucuucucucugcguguagguaggccugugccgcaaacaagcuuaccaugggccagaucaucaccuucuuccaggaggugccccacgucaucgaggaggugaugaacaucgugcugaucgcccucagccugcuggccauccucaaggggaucuacaacgucgcgaccugcggccuguucgggcugguguccuuccuccugcugugcggccgcagcugcuccacgaccuacaaggggguguacgagcuccagacccuggagcuggacauggccagccucaacaugugcaugccgcuguccugcaccaagaacaacagccaccacuacaucauggucggcaacgagacgggccuggagcucacccugaccaacaccuccaucaucaaccacaaguucugcaaccugagcgacgcccacaagaagaaccucuacgaccacgcccugauguccaucaucagcacguuccaccuguccauccccaacuucaaccaguacgaggccaugagcugcgacuucaacgggggcaagaucuccgugcaguacaaccucagccacgcguacgccguggacgccgccaaccacugcgggaccaucgcgaacggcguccugcagaccuucaugcggauggccuggggcggguccuacaucgcccuggacagcggcaagggguccugggacugcaucaugaccagcuaccaguaccucaucauccagaacaucacgugggaggaccacugccaguucucccgccccagccccaucggcuaccuggggcugcucagccagcggacccgcgacaucuacaucucccggcgccugcugggcaccuucaccuggacgcucagcgacuccgagggcaacgagacccccgggggcuacugccugacccgguggaugcugaucgaggccgagcucaagugcuucgggaacaccgccguggcgaagugcaacgagaagcacgacgaggaguucugcgacaugcugcgccuguucgacuucugcaagcaggccauccggcgccucaagacggaggcccagaugagcauccagcugaucaacaaggccgugaacgcccugaucaacgaccagcucaucaugaagaaccaccuccgggacaucaugggcauccccuacugcaacuacuccaaguacugcuaccugaaccacaccgucaccgggaagaccagccugccccgcugcugccugguguccaacggcagcuaccugaacgagacgcacuucuccgacgacaucgagcagcaggcggacaacaugaucaccgagcuccugcagaaggaguacaucgaccggcagggcaagaccccgcuggggcugguggaccucuucgucuucagcaccuccuucuaccugaucagcaucuuccugcaccucgugaagaucccgacgcaccgccacguggucggcaagcccugccccaagccccaccggcugaaccacauggggaucugcuccugcggccuguacaagcacccgggggugcccgugaaguggaagcgcugaggacuagucccuguucccagagcccacuuuuuuuucuuuuuuugaaauaaaauagccugucuuucagaucucaaaggcucuuuucagagccaccaaaaaaaaaaaaaaaaaaaaaaaaaaaaaaaaaaaaaaaaaaaaaaaaaaaaaaaaaaaaaaaaagaauu

SEQ ID NO: 40495 - RNA, 1733 nt, Artificial Sequence
  mRNA product Design a-2 (hSL-A64-N5) comprising derived and/or modified sequence from LASV(Lassa virus/H.sapiens-wt/NGA/2015/ISTH_0543;Clade II)__AVO03639__GPCmut12 (opt1)
aggagaguccgcucagccagguugcagaagcggcuuagcguguguccuaaucuucucucugcguguagguaggccugugccgcaaacaagcuuaccaugggccagaucaucaccuucuuccaggaggugccccacgucaucgaggaggugaugaacaucgugcugaucgcccucagccugcuggccauccucaaggggaucuacaacgucgcgaccugcggccuguucgggcugguguccuuccuccugcugugcggccgcagcugcuccacgaccuacaaggggguguacgagcuccagacccuggagcuggacauggccaaccucaacaugugcaugccgcugagcugcaccaagaacaacucccaccacuacaucauggucggcaacgagacgggccuggagcucacccugaccaacaccagcaucaucaaccacaaguucugcaaccuguccgacgcccacaagaagaaccucuacgaccacgcccugaugagcaucaucuccacguuccaccugagcauccccaacuucaaccaguacgaggccauguccugcgacuucaacgggggcaagaucagcgugcaguacaaccucucccacaccuacgcgguggacgccgccaaccacugcgggaccaucgccaacggcguccugcagaccuucaugcggauggcguggggcgggagcuacaucgcccuggacuccggcaaggggagcugggacugcaucaugacguccuaccaguaccucgugauccagaacaccaccugggaggaccacugccaguucagccgccccucccccaucggcuaccuggggcugcucagccagcggacccgcgacaucuacaucagccggcgccugcugggcacguucaccuggacccucuccgacagcgagggcaacgagacccccgggggcuacugccugacgcgguggaugcugaucgaggccgagcucaagugcuucgggaacaccgccguggccaagugcaacgagaagcacgacgaggaguucugcgacaugcugcgccuguucgacuucugcaagcaggcgauccggcgccucaagaccgaggcccagauguccauccagcugaucaacaaggccgucaacgcccugaucaacgaccagcucaucaugaagaaccaccuccgggacaucaugggcaucccguacugcaacuacagcaaguacugcuaccugaaccacaccgugacggggaagaccucccugccccgcugcugccuggugagcaacggcuccuaccugaacgagacccacuucagcgacgacaucgagcagcaggccgacaacaugaucaccgagcuccugcagaaggaguacaucgaccggcagggcaagacgccccuggggcuggucgaccucuucguguucuccaccagcuucuaccugaucuccaucuuccugcaccucgugaagaucccgacccaccgccacaucaccggcaagcccugccccaagccccaccggcugaaccacauggggaucugcagcugcggccuguacaagcacccggggguccccgugaaguggaagcgcugaggacuagucccuguucccagagcccacuuuuuuuucuuuuuuugaaauaaaauagccugucuuucagaucucaaaggcucuuuucagagccaccaaaaaaaaaaaaaaaaaaaaaaaaaaaaaaaaaaaaaaaaaaaaaaaaaaaaaaaaaaaaaaaaagaauu

SEQ ID NO: 40496 - RNA, 1733 nt, Artificial Sequence
  mRNA product Design a-2 (hSL-A64-N5) comprising derived and/or modified sequence from LASV(Lassa virus/H.sapiens-wt/NGA/2016/ISTH_0009;Clade II)__AVO03571__GPCmut12 (opt1)
aggagaguccgcucagccagguugcagaagcggcuuagcguguguccuaaucuucucucugcguguagguaggccugugccgcaaacaagcuuaccaugggccagaucaucaccuucuuccaggaggugccccacgucaucgaggaggugaugaacaucgugcugaucgcccucagccugcuggccauccucaaggggaucuacaacgucgcgaccugcggccugcuggggcucguguccuuccugcugcucugcggccgcagcugcuccacgaccuacaaggggguguacgagcugcagacccuggagcucgacauggccagccugaacaugugcaugccgcuguccugcaccaagaacaacagccaccacuacaucauggucggcaacgagacgggccucgagcugacccugaccaacaccuccaucaucaaccacaaguucugcaaccucagcgacgcccacaagaagaaccuguacgaccacgcccugauguccaucaucagcacguuccaccucuccauccccaacuucaaccaguacgaggccaugagcugcgacuucaacgggggccggaucuccgugcaguacaaccugagccacuccuacgcgguggacgccgccaaccacugcgggaccaucgccaacggcguccugcagaccuucaugcgcauggcguggggcgggagcuacaucgcccucgacuccggcaaggggagcugggacugcaucaugaccuccuaccaguaccugaucauccagaacacgaccugggaggaccacugccaguucagccggcccagccccaucggcuaccuggggcuccugucccagcgcacccgggacaucuacaucagccgccggcugcucggcaccuucacguggacccuguccgacagcgagggcaacgagacccccgggggcuacugccugacccgcuggaugcucaucgaggccgagcugaagugcuucgggaacacggccguggccaagugcaacgagaagcacgacgaggaguucugcgacaugcugcggcuguucgacuucugcaagcaggcgauccgccggcugaagaccgaggcccagauguccauccagcugaucaacaaggccgugaacgcccucaucaacgaccagcugaucaugaagaaccaccuccgcgacaucaugggcauccccuacugcaacuacagcaaguacugcuaccucaaccacaccgucaccgggaagacgucccugccccggugcugccuggugagcaacggcuccuaccucaacgagacccacuucagcgacgacaucgagcagcaggccgacaacaugaucaccgagcugcugcagaaggaguacaucgaccgccagggcaagaccccgcuggggcucguggaccuguucgucuucuccacgagcuucuaccugaucuccaucuuccuccaccuggugaagaucccgacccaccggcacaucaccggcaagcccugccccaagccccaccgccugaaccacauggggaucugcagcugcggccucuacaaccacccgggggugcccgucaaguggaagcggugaggacuagucccuguucccagagcccacuuuuuuuucuuuuuuugaaauaaaauagccugucuuucagaucucaaaggcucuuuucagagccaccaaaaaaaaaaaaaaaaaaaaaaaaaaaaaaaaaaaaaaaaaaaaaaaaaaaaaaaaaaaaaaaaagaauu

SEQ ID NO: 40497 - RNA, 1733 nt, Artificial Sequence
  mRNA product Design a-2 (hSL-A64-N5) comprising derived and/or modified sequence from LASV(Lassa virus/H.sapiens-wt/NGA/2016/ISTH_0017;Clade II)__AVO03567__GPCmut12 (opt1)
aggagaguccgcucagccagguugcagaagcggcuuagcguguguccuaaucuucucucugcguguagguaggccugugccgcaaacaagcuuaccaugggccagaucaucaccuucuuccaggaggugccccacgucaucgaggaggugaugaacaucgugcugaucgcccucagccugcuggccauccucaaggggaucuacaacgucgcgaccugcggccuguucgggcugguguccuuccuccugcugugcggccgcagcugcuccacgaccuacaaggggguguacgagcuccagacccuggagcuggacauggccagccucaacaugugcaugccgcuguccugcaccaagaacaacagccaccacuacaucauggucggcaacgagacgggccuggagcucacccugaccaacaccuccaucaucaaccacaaguucugcaaccugagcgacgcccacaagaagaaccucuacgaccacgcccugauguccaucaucagcacguuccaccuguccauccccaacuucaaccaguacgaggccaugagcugcgacuucaacgggggcaagaucuccgugcaguacaaccucagccacaccuacgcgaucgacgccgccaaccacugcgggaccaucgccaacggcgugcugcagaccuucaugcggauggcguggggcggguccuacaucgcccuggacagcggcaagggguccugggacugcaucaugacgagcuaccaguaccucaucauccagaacaccaccugggaggaccacugccaguucucccgccccagccccaucggcuaccuggggcugcucagccagcggacccgcgacaucuacaucucccggcgccugcugggcacguucaccuggacccucagcgacuccgagggcaacgagacccccgggggcuacugccugacgcgguggaugcugaucgaggccgagcucaagugcuucgggaacaccgccgucgccaagugcaacgagaagcacgacgaggaguucugcgacaugcugcgccuguucgacuucugcaagcaggcgauccggcgccucaagaccgaggcccagaugagcauccagcugaucaacaaggccgugaacgcccugaucaacgaccagcucaucaugaagaaccaccuccgggacaucaugggcaucccguacugcaacuacuccaaguacugcuaccugaaccacaccgugacggggaagaccagccugccccgcugcugccuggucuccaacggcagcuaccugaacgagacccacuucuccgacgacaucgagcagcaggccgacaacaugaucaccgagcuccugcagaaggaguacauggaccggcagggcaagacgccccuggggcugguggaccucuucguguucagcaccuccuucuaccugaucagcaucuuccugcaccucguccgcaucccgacccaccggcacgugaucggcaagcccugccccaagccccaccgccugaaccacauggggaucugcuccugcggccuguacaagcacccgggggugcccgucaaguggaagcggugaggacuagucccuguucccagagcccacuuuuuuuucuuuuuuugaaauaaaauagccugucuuucagaucucaaaggcucuuuucagagccaccaaaaaaaaaaaaaaaaaaaaaaaaaaaaaaaaaaaaaaaaaaaaaaaaaaaaaaaaaaaaaaaaagaauu

SEQ ID NO: 40498 - RNA, 1733 nt, Artificial Sequence
  mRNA product Design a-2 (hSL-A64-N5) comprising derived and/or modified sequence from LASV(Lassa virus/H.sapiens-wt/NGA/2018/ISTH_0959;Clade II)__AVV65099__GPCmut12 (opt1)
aggagaguccgcucagccagguugcagaagcggcuuagcguguguccuaaucuucucucugcguguagguaggccugugccgcaaacaagcuuaccaugggccagaucaucaccuucuuccaggaggugccccacgucaucgaggaggugaugaacaucgugcugaucgcccucagccugcuggccauccucaaggggaucuacaacgucgugaccugcggccuguucgggcugguguccuuccuccugcugugcggccgcagcugcuccacgaccuacaagggggucuacgagcuccagacccuggagcuggacauggcgagccucaacaugugcaugccgcuguccugcaccaagaacaacagccaccacuacaucauggugggcaacgagacgggccuggagcucacccugaccaacaccuccaucaucaaccacaaguucugcaaccugagcgacgcccacaagaagaaccucuacgaccacgcccugauguccaucaucagcacguuccaccuguccauccccaacuucaaccaguacgaggccaugagcugcgacuucaacgggggcaagaucuccgugcaguacaaccucagccacgccuacgcgaucgacgccgccaaccacugcgggaccaucgccaacggcguccugcagaccuucaugcggauggcguggggcggguccuacaucgcccuggacagcggcaagggguccugggacugcaucaugaccagcuaccaguaccucaucauccagaacacgaccugggaggaccacugccaguucucccgccccagccccaucggcuaccuggggcugcucagccagcggacccgcgacaucuacaucucccggcgccugcugggcaccuucacguggacccucagcgacuccgagggcaacgagacccccgggggcuacugccugacccgguggaugcugaucgaggccgagcucaagugcuucgggaacacggccguggccaagugcaacgagaagcacgacgaggaguucugcgacaugcugcgccuguucgacuucugcaagcaggcgauccggcgccucaagaccgaggcccagaugagcauccagcugaucaacaaggccgugaacgcccugaucaacgaccagcucaucaugaagaaccaccuccgggacaucaugggcauccccuacugcaacuacuccaaguacugcuaccugaaccacaccgucaccgggaagacgagccugccccgcugcugccugguguccaacggcagcuaccugaacgagacccacuucuccgacgacaucgagcagcaggccgacaacaugaucaccgagcuccugcagaaggaguacaucgaccggcagggcaagaccccgcuggggcugguggaccucuucgucuucagcacguccuucuaccugaucagcaucuuccugcaccucgugaagaucccgacccaccgccacgugaucggcaagcccugccccaagccccaccggcugaaccacauggggaucugcuccugcggccuguacaagcacccggggguccccgugaaguggaagcgcugaggacuagucccuguucccagagcccacuuuuuuuucuuuuuuugaaauaaaauagccugucuuucagaucucaaaggcucuuuucagagccaccaaaaaaaaaaaaaaaaaaaaaaaaaaaaaaaaaaaaaaaaaaaaaaaaaaaaaaaaaaaaaaaaagaauu

SEQ ID NO: 40499 - RNA, 1733 nt, Artificial Sequence
  mRNA product Design a-2 (hSL-A64-N5) comprising derived and/or modified sequence from LASV(LASV003-NIG-2008;Clade II)__AIT17580__GPCmut12 (opt1)
aggagaguccgcucagccagguugcagaagcggcuuagcguguguccuaaucuucucucugcguguagguaggccugugccgcaaacaagcuuaccaugggccagaucaucaccuucuuccaggaggugccccacgucaucgaggaggugaugaacaucgugcugaucgcccucagccugcuggccauccucaaggggaucuacaacgucgcgaccugcggccuguucgggcugguguccuuccuccugcugugcggccgcagcugcuccacgaccuacaaggggguguacgagcuccagacccuggagcuggacauggccagccucaacaugugcaugccgcuguccugcaccaagaacaacagccaccacuacaucauggucggcaacgagacgggccuggagcucacccugaccaacaccuccaucaucaaccacaaguucugcaaccugagcgacgcccacaagaagaaccucuacgaccacgcccugauguccaucaucagcacguuccaccuguccauccccaacuucaaccaguacgaggccaugagcugcgacuucaacgggggcaagaucuccgugcaguacaaccucagccacaccuacgcgguggacgccgccaaccacugcgggaccaucgccaacggcguccugcagaccuucaugcggauggcguggggcggguccuacaucgcccuggacagcggcaagggguccugggacugcaucaugacgagcuaccaguaccucaucauccagaacaccaccugggaggaccacugccaguucucccgccccagccccaucggcuaccuggggcugcucagccagcggacccgcgacaucuacaucucccggcgccugcugggcacguucaccuggacccucagcgacuccgagagcaacgagaccccgggcggguacugccugacgcgguggaugcugaucgaggccgagcucaagugcuucggcaacaccgccguggccaagugcaacgagaagcacgacgaggaguucugcgacaugcugcgccuguucgacuucugcaagcaggcgauccggcgccucaaggccgaggcccagauguccauccagcugaucaacaaggccgugaacgcccugaucaacgaccagcucaucaugaagaaccaccuccgggacaucauggggauccccuacugcaacuacagcaaguacugcuaccugaaccacaccgucaccggccgcacgucccugccccggugcugccuggugagcaacggguccuaccugaacgagacccacuucagcgacgacaucgagcagcaggcggacaacaugaucaccgagcuccugcagaaggaguacauggaccgccagggcaagacgccccugggccugguggaccucuucgucuucuccaccagcuucuaccugaucuccaucuuccugcaccucgugaagaucccgacccaccggcacgugaucgggaagcccugccccaagccccaccgccugaaccacaugggcaucugcagcugcgggcuguacaagcacccgggcguccccgugaaguggaagcggugaggacuagucccuguucccagagcccacuuuuuuuucuuuuuuugaaauaaaauagccugucuuucagaucucaaaggcucuuuucagagccaccaaaaaaaaaaaaaaaaaaaaaaaaaaaaaaaaaaaaaaaaaaaaaaaaaaaaaaaaaaaaaaaaagaauu

SEQ ID NO: 40500 - RNA, 1733 nt, Artificial Sequence
  mRNA product Design a-2 (hSL-A64-N5) comprising derived and/or modified sequence from LASV(LASV035-NIG-2009;Clade II)__AIT17588__GPCmut12 (opt1)
aggagaguccgcucagccagguugcagaagcggcuuagcguguguccuaaucuucucucugcguguagguaggccugugccgcaaacaagcuuaccaugggccagaucaucaccuucuuccaggaggugccccacgucaucgaggaggugaugaacaucgugcugaucgcccucagccugcuggccauccucaaggggaucuacaacgucgcgaccugcggccuguucgggcugguguccuuccuccugcugugcggccgcagcugcuccacgaccuacaaggggguguacgagcuccagacccuggagcuggacauggccagccucaacaugugcaugccgcuguccugcaccaagaacaacagccaccacuacaucauggucggcaacgagacgggccuggagcucacccugaccaacaccuccaucaucaaccacaaguucugcaaccugagcgacgcccacaagaagaaccucuacgaccacgcccugauguccaucaucagcacguuccaccuguccauccccaacuucaaccaguacgaggccaugagcugcgacuucaacgggggcaagaucuccgugcaguacaaccucagccacgcguacgccguggacgccgccaaccacugcgggaccaucgcgaacggcguccugcagaccuucaugcggauggccuggggcggguccuacaucgcccuggacagcggcaagggguccugggacugcaucaugaccagcuaccaguaccucaucauccagaacacgaccugggaggaccacugccaguucucccgccccagccccaucggcuaccuggggcugcucagccagcggacccgcgacaucuacaucucccggcgccugcugggcaccuucacguggacccucagcgacuccgagggcaacgagacccccgggggcuacugccugacccgguggaugcugaucgaggccgagcucaagugcuucgggaacacggccguggcgaagugcaacgagaagcacgacgaggaguucugcgacaugcugcgccuguucgacuucugcaagcaggccauccggcgccucaaggccgaggcccagaugagcauccagcugaucaacaaggccgugaacgcgcugaucaacgaccagcucaucaugaagaaccaccuccgggacaucaugggcauccccuacugcaacuacuccaaguacugcuaccugaaccacaccgucaccgggaagaccagccugccccgcugcugccugguguccaacggcagcuaccugaacgagacgcacuucuccgacgacaucgagcagcaggccgacaacaugaucaccgagcuccugcagaaggaguacaucgaccggcagggcaagaccccgcuggggcugguggaccucuucgucuucagcaccuccuucuaccugaucagcaucuuccugcaccucgugaagaucccgacgcaccgccacgugaucggcaagcccugccccaagccccaccggcugaaccacauggggaucugcuccugcggccuguacaagcacccggggguccccgugaaguggaagcgcugaggacuagucccuguucccagagcccacuuuuuuuucuuuuuuugaaauaaaauagccugucuuucagaucucaaaggcucuuuucagagccaccaaaaaaaaaaaaaaaaaaaaaaaaaaaaaaaaaaaaaaaaaaaaaaaaaaaaaaaaaaaaaaaaagaauu

SEQ ID NO: 40501 - RNA, 1733 nt, Artificial Sequence
  mRNA product Design a-2 (hSL-A64-N5) comprising derived and/or modified sequence from LASV(LASV1000-NIG-2009;Clade II)__AIT17782__GPCmut12 (opt1)
aggagaguccgcucagccagguugcagaagcggcuuagcguguguccuaaucuucucucugcguguagguaggccugugccgcaaacaagcuuaccaugggccagaucaucaccuucuuccaggaggugccccacgucaucgaggaggugaugaacaucgugcugaucgcccucagccugcuggccauccucaaggggaucuacaacgucgcgaccugcggccuguucgggcugguguccuuccuccugcugugcggccgcagcugcuccacgaccuacaaggggguguacgagcuccagacccuggagcuggacauggccagccucaacaugugcaugccgcuguccugcaccaagaacaacagccaccacuacaucauggucggcaacgagacgggccuggagcucacccugaccaacaccuccaucaucaaccacaaguucugcaaccugagcgacgcccacaagaagaaccucuacgaccacgcccugauguccaucaucagcacguuccaccuguccauccccaacuucaaccaguacgaggccaugagcugcgacuucaacgggggcaagaucuccgugcaguacaaccucagccacaccuacgcgguggacgccgccaaccacugcgggaccaucgccaacggcguccugcagaccuucaugcggauggcguggggcggguccuacaucgcccuggacagcggcaagggguccugggacugcaucaugacgagcuaccaguaccucaucauccagaacaccaccugggaggaccacugccaguucucccgccccagccccaucggcuaccuggggcugcucagccagcggacccgcgacaucuacaucucccggcgccugcugggcacguucaccuggacccucagcgacuccgagggcaacgagacccccgggggcuacugccugacgcgguggaugcugaucgaggccgagcucaagugcuucgggaacaccgccguggccaagugcaacgagaagcacgacgaggaguucugcgacaugcugcgccuguucgacuucugcaagcaggcgaucaagcggcucaagaccgaggcccagaugagcauccagcugaucaacaaggccgugaacgcccugaucaacgaccagcucaucaugaagaaccaccuccgcgacaucaugggcaucccguacugcaacuacuccaaguacugcuaccugaaccacaccgucacggggaagaccagccugccccggugcugccugguguccaacggcagcuaccugaacgagacccacuucuccgacgacaucgagcagcaggccgacaacaugaucaccgagcuccugcagaaggaguacaucgaccgccagggcaagacgccccuggggcugguggaccucuucgucuucagcaccuccuucuaccugaucagcaucuuccugcaccucgugaagaucccgacccaccggcacguggucggcaagcccugccccaagccccaccgccugaaccacauggggaucugcuccugcggccuguacaagcacccgggggugcccgugaaguggaagcggugaggacuagucccuguucccagagcccacuuuuuuuucuuuuuuugaaauaaaauagccugucuuucagaucucaaaggcucuuuucagagccaccaaaaaaaaaaaaaaaaaaaaaaaaaaaaaaaaaaaaaaaaaaaaaaaaaaaaaaaaaaaaaaaaagaauu

SEQ ID NO: 40502 - RNA, 1733 nt, Artificial Sequence
  mRNA product Design a-2 (hSL-A64-N5) comprising derived and/or modified sequence from LASV(LASV221-NIG-2010;Clade II)__AIT17624__GPCmut12 (opt1)
aggagaguccgcucagccagguugcagaagcggcuuagcguguguccuaaucuucucucugcguguagguaggccugugccgcaaacaagcuuaccaugggccagaucaucaccuucuuccaggaggugccccacgucaucgaggaggugaugaacaucgugcugaucgcccucagccugcuggccauccucaaggggaucuacaacgucgcgaccugcggccuguucgggcugguguccuuccuccugcugugcggccgcagcugcuccacgaccuacaaggggguguacgagcuccagacccuggagcuggacauggccagccucaacaugugcaugccgcuguccugcaccaagaacaacagccaccacuacaucauggucggcaacgagacgggccuggagcucacccugaccaacaccuccaucaucaaccacaaguucugcaaccugagcgacgcccacaagaagaaccucuacgaccacgcccugauguccaucaucagcacguuccaccuguccauccccaacuucaaccaguacgaggccaugagcugcgacuucaacgggggcaagaucuccgugcaguacaaccucagccacaccuacgcgaucgacgccgccaaccacugcgggaccaucgccaacggcgugcugcagaccuucaugcggauggcguggggcggguccuacaucgcccuggacagcggcaagggguccugggacugcaucaugacgagcuaccaguaccucaucauccagaacaccaccugggaggaccacugccaguucucccgccccagccccaucggcuaccuggggcugcucagccagcggacccgcgacaucuacaucucccggcgccugcugggcacguucaccuggacccucagcgacuccgagggcaacgagacccccgggggcuacugccugacgcgguggaugcugaucgaggccgagcucaagugcuucgggaacaccgccgucgccaagugcaacgagaagcacgacgaggaguucugcgacaugcugcgccuguucgacuucugcaagcaggcgauccggcgccucaagaccgaggcccagaugagcauccagcugaucaacaaggccgugaacgcccugaucaacgaccagcucaucaugaagaaccaccuccgggacaucaugggcaucccguacugcaacuacuccaaguacugcuaccugaaccacaccgugacggggaagaccagccugccccgcugcugccuggucuccaacggcagcuaccugaacgagacccacuucuccgacgacaucgagcagcaggccgacaacaugaucaccgagaugcuccagaaggaguacauggaccggcagggcaagacgccccuggggcugguggaccuguucguguucagcaccuccuucuaccucaucagcaucuuccugcaccuggucaagaucccgacccaccgccacgugaucggcaagcccugccccaagccccaccggcucaaccacauggggaucugcuccugcggccuguacaagcacccgggggugcccgucaaguggaagcgcugaggacuagucccuguucccagagcccacuuuuuuuucuuuuuuugaaauaaaauagccugucuuucagaucucaaaggcucuuuucagagccaccaaaaaaaaaaaaaaaaaaaaaaaaaaaaaaaaaaaaaaaaaaaaaaaaaaaaaaaaaaaaaaaaagaauu

SEQ ID NO: 40503 - RNA, 1733 nt, Artificial Sequence
  mRNA product Design a-2 (hSL-A64-N5) comprising derived and/or modified sequence from LASV(LASV237-NIG-2010;Clade II)__AIT17638__GPCmut12 (opt1)
aggagaguccgcucagccagguugcagaagcggcuuagcguguguccuaaucuucucucugcguguagguaggccugugccgcaaacaagcuuaccaugggccagaucaucaccuucuuccaggaggugccccacgucaucgaggaggugaugaacaucgugcugaucgcccucagccugcuggccauccucaaggggaucuacaacgucgcgaccugcggccuguucgggcugguguccuuccuccugcugugcggccgcagcugcuccacgaccuacaaggggguguacgagcuccagacccuggagcuggacauggccagccucaacaugugcaugccgcuguccugcaccaagaacaacagccaccacuacaucauggucggcaacgagacgggccuggagcucacccugaccaacaccuccaucaucaaccacaaguucugcaaccugagcgacgcccacaagaaggaccucuacgaccacgcccugauguccaucaucagcacguuccaccuguccauccccaacuucaaccaguacgaggccaugagcugcgacuucaacgggggcaagaucuccgugcaguacaaccucagccacaccuacgcgguggacgccgccaaccacugcgggaccaucgccaacggcguccugcagaccuucaugcggauggcguggggcggguccuacaucgcccuggacagcggcaagggguccugggacugcaucaugacgagcuaccaguaccucaucauccagaacaccaccugggaggaccacugccaguucucccgccccagccccaucggcuaccuggggcugcucagccagcggacccgcgacaucuacaucucccggcgccugcugggcacguucaccuggacccucagcgacuccgagggcaacgagacccccgggggcuacugccugacgcgguggaugcugaucgaggccgagcucaagugcuucgggaacaccgccguggccaagugcaacgagaagcacgacgaggaguucugcgacaugcugcgccuguucgacuucugcaagcaggcgauccggcgccucaagaccgaggcccagaugagcauccagcugaucaacaaggccgugaacgcccugaucaacgaccagcucaucaugaagaaccaccuccgggacaucaugggcaucccguacugcaacuacuccaaguacugcuaccugaaccacaccgucacggggaagaccagccugccccgcugcugccugguguccaacggcagcuaccugaacgagacccacuucuccgacgacaucgagcagcaggccgacaacaugaucaccgagcuccugcagaaggaguacauggaccggcagggcaagacgccccuggggcugguggaccucuucgucuucagcaccuccuucuaccugaucagcaucuuccugcaccucaucaagaucccgacccaccgccacaucaccggcaagcccugccccaagccccaccggcugaaccacauggggaucugcuccugcggccuguacaagcacccgggggugcccgugaaguggaagcgcugaggacuagucccuguucccagagcccacuuuuuuuucuuuuuuugaaauaaaauagccugucuuucagaucucaaaggcucuuuucagagccaccaaaaaaaaaaaaaaaaaaaaaaaaaaaaaaaaaaaaaaaaaaaaaaaaaaaaaaaaaaaaaaaaagaauu

SEQ ID NO: 40504 - RNA, 1733 nt, Artificial Sequence
  mRNA product Design a-2 (hSL-A64-N5) comprising derived and/or modified sequence from LASV(LASV253-NIG-2011;Clade II)__AIT17670__GPCmut12 (opt1)
aggagaguccgcucagccagguugcagaagcggcuuagcguguguccuaaucuucucucugcguguagguaggccugugccgcaaacaagcuuaccaugggccagaucaucaccuucuuccaggaggugccccacgucaucgaggaggugaugaacaucgugcugaucgcccucagccugcuggccauccucaaggggaucuacaacgucgcgaccugcggccuguucgggcugguguccuuccuccugcugugcggccgcagcugcuccacgaccuacaaggggguguacgagcuccagacccuggagcuggacauggccagccucaacaugugcaugccgcuguccugcaccaagaacaacagccaccacuacaucauggucggcaacgagacgggccuggagcucacccugaccaacaccuccaucaucaaccacaaguucugcaaccugagcgacgcccacaagaagaaccucuacgaccacgcccugauguccaucaucagcacguuccaccuguccauccccaacuucaaccaguacgaggccaugagcugcgacuucaacgggggcaagaucuccgugcaguacaaccucagccacaccuacgcgguggacgccgccaaccacugcgggaccaucgccaacggcguccugcagaccuucaugcggauggcguggggcggguccuacaucgcccuggacagcggcaagggguccugggacugcaucaugacgagcuaccaguaccucaucauccagaacaccaccugggaggaccacugccaguucucccgccccagccccaucggcuaccuggggcugcucagccagcggacccgcgacaucuacaucucccggcgccugcugggcacguucaccuggacccucagcgacuccgagggcaacgagacccccgggggcuacugccugacgcgguggaugcugaucgaggccgagcucaagugcuucgggaacaccgccguggccaagugcaacgagaagcacgacgaggaguucugcgacaugcugcgccuguucgacuucugcaagcaggcgauccggcgccucaaggccgaggcccagaugagcauccagcugaucaacaaggccgugaacgcccugaucaacgaccagcucaucaugaagaaccaccuccgggacaucaugggcauccccuacugcaacuacuccaaguacugcuaccugaaccacaccgucaccgggcgcacgagccugccccggugcugccugguguccaacggcagcuaccugaacgagacccacuucuccgacgacaucgagcagcaggcggacaacaugaucaccgagcuccugcagaaggaguacaucgaccgccagggcaagaccccgcuggggcugguggaccucuucgucuucagcacguccuucuaccugaucagcaucuuccugcaccucgugaagaucccgacccaccggcacaucaucggcaagcccugccccaagccccaccgccugaaccacauggggaucugcuccugcggccuguacaagcacccgggggugcccgucaaguggaagcggugaggacuagucccuguucccagagcccacuuuuuuuucuuuuuuugaaauaaaauagccugucuuucagaucucaaaggcucuuuucagagccaccaaaaaaaaaaaaaaaaaaaaaaaaaaaaaaaaaaaaaaaaaaaaaaaaaaaaaaaaaaaaaaaaagaauu

SEQ ID NO: 40505 - RNA, 1733 nt, Artificial Sequence
  mRNA product Design a-2 (hSL-A64-N5) comprising derived and/or modified sequence from LASV(LASV254-NIG-2011;Clade II)__AIT17674__GPCmut12 (opt1)
aggagaguccgcucagccagguugcagaagcggcuuagcguguguccuaaucuucucucugcguguagguaggccugugccgcaaacaagcuuaccaugggccagaucaucaccuucuuccaggaggugccccacgucaucgaggaggugaugaacaucgugcugaucgcccucagccugcuggccauccucaaggggaucuacaacgucgcgaccugcggccuguucgggcugguguccuuccuccugcugugcggccgcagcugcuccacgaccuacaaggggguguacgagcuccagacccuggagcuggacaugaccaaccucaacaugugcaugccgcugagcugcacgaagaacaacucccaccacuacaucauggucggcaacgagaccggccuggagcucacccugaccaacacgagcaucaucaaccacaaguucugcaaccuguccgacgcccacaagaagaaccucuacaaccacgcccugaugagcaucaucuccaccuuccaccugagcauccccaacuucaaccaguacgaggccauguccugcgacuucaacgggggcaagaucagcgugcaguacaaccucucccacagcuacgccguggacgcggccaaccacugcgggaccaucgccaacggcguccugcagaccuucaugcggauggccuggggcggguccuacaucgcgcuggacagcggcaaggggaacugggacugcaucaugacguccuaccaguaccucaucauccagaacaccaccugggaggaccacugccaguucagccgccccucccccaucggcuaccuggggcugcucagccagcggacccgcgacaucuacaucagccggcgccugcugggcacguucaccuggacccucuccgacagcgagggcaacgagacccccgggggcuacugccugacgcgguggaugcugaucgaggccgagcucaagugcuucgggaacaccgccguggccaagugcaacgagaagcacgacgaggaguucugcgacaugcugcgccuguucgacuucugcaagcaggccauccggcgccucaagaccgaggcgcaggccaacauccagcugaucaacaaggccgugaacgcccugaucaacgaccagcucaucaugaagaaccaccuccgggacaucaugggcaucccguacugcaacuacuccaaguacugcuaccugaaccacaccgucacggggaagaccagccugccccgcugcugccugguguccaacggcagcuaccugaacgagacccacuucuccgacgacaucgagcagcaggccgacaacaugaucaccgagcuccugcagaaggaguacauggaccggcagggcaagacgccccuggggcugguggaccucuucgucuucagcaccuccuucuaccugaucagcaucuuccugcaccucgugaagaucccgacccaccgccacgugaucggcaagcccugccccaagccccaccggcugaaccacauggggaucugcuccugcggccuguacaagcacccggggguccccgugaaguggaagcgcugaggacuagucccuguucccagagcccacuuuuuuuucuuuuuuugaaauaaaauagccugucuuucagaucucaaaggcucuuuucagagccaccaaaaaaaaaaaaaaaaaaaaaaaaaaaaaaaaaaaaaaaaaaaaaaaaaaaaaaaaaaaaaaaaagaauu

SEQ ID NO: 40506 - RNA, 1733 nt, Artificial Sequence
  mRNA product Design a-2 (hSL-A64-N5) comprising derived and/or modified sequence from LASV(Nig08-A19;Clade III)__ADU56618__GPCmut12 (opt1)
aggagaguccgcucagccagguugcagaagcggcuuagcguguguccuaaucuucucucugcguguagguaggccugugccgcaaacaagcuuaccaugggccagaucgugaccuucuuccaggaggucccccacgugaucgaggaggugaugaacaucguccugaucgcccucagcauccuggccauccugaaggggcucuacaacaucgcgaccugcggccugaucgggcuggugacguuccuccugcuguccggccgcagcugcuccaugaccuacaaggggguguacgagcuccagacccuggagcugaacaugaacacccucaacaugugcaugccgcugagcugcacgaagaacaacucccaccacuacaucauggucggcaacgagaccggccuggagcucacccugaccaacacgagccugcuccaccacaaguucugcaaccuguccgacgcccacaagaagaaccuguacgaccacacccucaugagcaucaucuccaccuuccaccugagcauccccaacuucaaccaguacgaggccauguccugcgacuucaacgggggcaagaucaccgugcaguacaaccugagccacuccuacgccaucgacgccgcgaaccacugcgggacgguggccaacggcguccuccagaccuucaugcggauggccuggggcgggagcuacaucgcccuggacuccggccgcgggaagugggacugcaucaugaccagcuaccaguaccugaucauccagaacaccacgugggaggaccacugccaguucucccggcccagccccaucggcuaccucgggcugcugucccagcgcacccgggacaucuacaucagccgccggcuccugggcaccuucaccuggacgcugagcgacuccgagggcaacgagacccccgggggcuacugccucacccgcuggaugcugaucgaggcggagcugaagugcuucgggaacaccgccguggccaagugcaacgagaagcacgacgaggaguucugcgacaugcuccggcuguucgacuucugcaagcaggccauccgccggcugaaggccgaggcgcagaugagcauccagcucaucaacaaggccgugaacgcccugaucaacgaccagcugaucaugaagaaccaccuccgcgacaucaugggcauccccuacugcaacuacuccaaguacugcuaccugaaccacacgagcaccgggcggaccucccugccccgcugcugccucgucagcaacggcuccuaccugaacgagacccacuucagcgacgacaucgagcagcaggccgacaacaugaucacggagaugcugcagaaggaguaccuggaccggcagggcaagaccccgcucgggcugguggaccuguucguguucuccaccagcuucuaccucaucuccaucuuccugcaccuggucaagaucccgacccaccgccacaucgugggcaagcccugccccaagccccaccggcucaaccacauggggaucugcagcugcggccuguacaagcagccgggggugcccguccgcuggaagcggugaggacuagucccuguucccagagcccacuuuuuuuucuuuuuuugaaauaaaauagccugucuuucagaucucaaaggcucuuuucagagccaccaaaaaaaaaaaaaaaaaaaaaaaaaaaaaaaaaaaaaaaaaaaaaaaaaaaaaaaaaaaaaaaaagaauu

SEQ ID NO: 40507 - RNA, 1736 nt, Artificial Sequence
  mRNA product Design a-2 (hSL-A64-N5) comprising derived and/or modified sequence from LASV(G1180-SLE-2010;Clade IV)__AIT17168__GPCmut12 (opt1)
aggagaguccgcucagccagguugcagaagcggcuuagcguguguccuaaucuucucucugcguguagguaggccugugccgcaaacaagcuuaccaugggccagaucgugaccuucuuccaggaggucccccacgugaucgaggaggugaugaacaucguccugaucgcccucagcauccuggccgugcugaaggggcucuacaacuucgcgaccugcggccugguggggcugcucacguuccugcugcucugcggccgcuccugcaccgccagccgguacaagggggucuacgagcugcagacccuggagcucaacauggagacccugaacaugugcaugccgcuguccugcacgaagaacaacagccaccacuacaucauggugggcaacgagaccggccucgagcugacccugaccaacacguccaucaucaaccacaaguucugcaaccucagcgacgcccacaagaagaaccuguacgaccacgcccugauguccaucaucagcaccuuccaccucuccauccccaacuucaaccaguacgaggccaugagcugcgacuucaacgggggcaagaucuccgugcaguacaaccugagccacuccuacgcgggggacgccgccaaccacugcggcaccgucgccaacggggugcugcagaccuucaugcgcauggcguggggcggcagcuacaucgcccucgacuccgggcacggcagcugggacugcaucaugacguccuaccaguaccugaucauccagaacaccaccugggaggaccacugccaguucagccggcccucccccaucggguaccugggccuccugagccagcgcacccgggacaucuacaucagccgccggcugcucggcacguucaccuggacccuguccgacagcgaggggaaggacaccccgggcggguacugccugacgcgcuggaugcucaucgaggccgagcugaagugcuucggcaacaccgccguggccaagugcaacgagaagcacgacgaggaguucugcgacaugcugcggcuguucgacuucugcaagcaggcgauccagcgccugaaggccgaggcccagauguccauccagcugaucaacaaggccgucaacgcccucaucaacgaccagcugaucaugaagaaccaccuccgggacaucauggggauccccuacugcaacuacagcaaguacugcuaccucaaccacaccaccacgggcaagaccucccugcccaagugcugccuggugagcaacggcuccuaccucaacgagacccacuucagcgacgacaucgagcagcaggcggacaacaugaucaccgagaugcugcagaaggaguacauggagcgccaggggaagacgccccugggccugguggaccucuucgucuucuccaccagcuucuaccugaucuccaucuuccugcaccucgugaagaucccgacccaccggcacaucgugggcaagagcugccccaagccccaccgccugaaccacauggggaucugcuccugcgggcuguacaagcagcccggcgucccggugaaguggaagcggugaggacuagucccuguucccagagcccacuuuuuuuucuuuuuuugaaauaaaauagccugucuuucagaucucaaaggcucuuuucagagccaccaaaaaaaaaaaaaaaaaaaaaaaaaaaaaaaaaaaaaaaaaaaaaaaaaaaaaaaaaaaaaaaaagaauu

SEQ ID NO: 40508 - RNA, 1736 nt, Artificial Sequence
  mRNA product Design a-2 (hSL-A64-N5) comprising derived and/or modified sequence from LASV(G1442-SLE-2011;Clade IV)__AIT17180__GPCmut12 (opt1)
aggagaguccgcucagccagguugcagaagcggcuuagcguguguccuaaucuucucucugcguguagguaggccugugccgcaaacaagcuuaccaugggccagaucgugaccuucuuccaggaggucccccacgugaucgaggaggugaugaacaucguccugaucgcccucagcauccuggccgugcugaaggggcucuacaacguggcgaccugcggccugaucgggcuggucaccuuccuccugcugugcggccgcuccugcaccaccacccucuacaaggggguguacgagcugcagacgcuggagcucaacauggagacccugaacaugugcaugccgcugagcugcaccaagaacaacucccaccacuacauccgggugggcaacgagaccggccucgagcugacgcugaccaacaccagcaucaucaaccacaaguucugcaaccucuccgacgcccacaagaagaaccuguacgaccacgcccugaugagcaucaucuccaccuuccaccucagcauccccaacuucaaccaguacgaggccauguccugcgacuucaacgggggcaagaucagcguccaguacaaccugucccacagcuacgccggggacgcggccaaccacugcggcacgguggccaacggggugcugcagaccuucaugcgcauggccuggggcggcuccuacaucgcgcucgacagcgggcggggcaacugggacugcaucaugaccuccuaccaguaccugaucauccagaacaccacgugggacgaccacugccaguucagccgccccucccccaucggguaccugggccuccugagccagcggacccgcgacgucuacaucucccggcgccugcucggcaccuucaccuggacgcugagcgacagcgaggggaaggacaccccgggcggguacugccugacccgguggaugcucaucgaggccgagcugaagugcuucggcaacaccgccguggccaagugcaacgagaagcacgacgaggaguucugcgacaugcugcgccucuucgacuucugcaagcaggccauccagcggcugaaggcggaggcccagauguccauccagcugaucaacaaggccgugaacgcccucaucaacgaccagcugaucaugaagaaccaccuccgcgacaucauggggauccccuacugcaacuacagcaaguacugcuaccugaacaacacggccaccggcaagaccucccugcccaagugcugccugaucagcaacggcuccuaccucaacgagacccacuucagcgacgacaucgagcaggaggcggacaacaugaucacggagaugcugcagaaggaguacauggagcggcaggggaagacgccccugggccuggucgaccucuucguguucuccaccagcuucuaccugaucuccaucuuccugcaccucgugaagaucccgacccaccgccacaucgucggcaagagcugccccaagccccaccggcugaaccacauggggaucugcuccugcgggcuguacaagcagcccggcgugccggugcgcuggaagcggugaggacuagucccuguucccagagcccacuuuuuuuucuuuuuuugaaauaaaauagccugucuuucagaucucaaaggcucuuuucagagccaccaaaaaaaaaaaaaaaaaaaaaaaaaaaaaaaaaaaaaaaaaaaaaaaaaaaaaaaaaaaaaaaaagaauu

SEQ ID NO: 40509 - RNA, 1736 nt, Artificial Sequence
  mRNA product Design a-2 (hSL-A64-N5) comprising derived and/or modified sequence from LASV(G3010-SLE-2013;Clade IV)__AIT17344__GPCmut12 (opt1)
aggagaguccgcucagccagguugcagaagcggcuuagcguguguccuaaucuucucucugcguguagguaggccugugccgcaaacaagcuuaccaugggccagaucgugaccuucuuccaggaggucccccacgugaucgaggaggugaugaacaucguccugaucgcccucagcauccuggccgugcugaaggggcucuacaacuucgcgaccugcggccugguggggcuggucacguuccuccugcugugcggccgcuccugcaccaccagccucuacaaggggguguacgagcugcagacccuggagcucaacauggagacgcugaacaugugcaugccgcuguccugcaccaagaacaacagccaccacuacaucauggugggcaacgagaccggccucgagcugacccugacgaacaccuccaucaucaaccacaaguucugcaaccucagcgacgcccacaagaagaaccuguacaaccacgcccugauguccaucaucagcaccuuccaccucuccauccccaacuucaaccaguacgaggccaugagcugcgacuucaacgggggcaagaucuccguccaguacaaccugagccacuccuacgccggggacgcggccagccacugcggcaccguggccaacggggugcugcagacguucaugcggauggccuggggcggcuccuacaucgcgcucgacagcggguacggcaagugggacugcaucaugaccuccuaccaguaccugaucauccagaacaccaccugggaggaccacugccaguucagccgccccucccccaucggguaccugggccuccugagccagcggacgcgcgacaucuacaucagccggcgccugcucggcaccuucaccuggacccuguccgacagcgaggggaaggacacgccgggcggguacugccugacccgguggaugcucaucgaggccgagcugaagugcuucggcaacaccgccgucgccaagugcaacgagaagcacgacgaggaguucugcgacaugcugcgccucuucgacuucugcaagcaggccauccagcggcugaagaccgaggcgcagauguccauccagcugaucaacaaggccgugaacgcccucaucaacgaccagcugaucaugaagaaccaccuccgcgacaucauggggauccccuacugcaacuacagcaaguacugcuaccugaaccacacgaccaccggcaagaccucccugcccaagugcugccuggugagcaacggcuccuaccucaacgagacgcacuucagcgacgacaucgagcagcaggccgacaacaugaucaccgagaugcugcagaaggaguacauggagcggcaggggaagacgccccugggccuggucgaccucuucguguucuccaccagcuucuaccugaucuccaucuuccugcaccucgugaagaucccgacccaccgccacaucgucggcaagagcugccccaagccccaccggcugaaccacauggggaucugcuccugcgggcuguacaagcagcccggcgugccggugcgcuggaagcggugaggacuagucccuguucccagagcccacuuuuuuuucuuuuuuugaaauaaaauagccugucuuucagaucucaaaggcucuuuucagagccaccaaaaaaaaaaaaaaaaaaaaaaaaaaaaaaaaaaaaaaaaaaaaaaaaaaaaaaaaaaaaaaaaagaauu

SEQ ID NO: 40510 - RNA, 1736 nt, Artificial Sequence
  mRNA product Design a-2 (hSL-A64-N5) comprising derived and/or modified sequence from LASV(G502-SLE-2009;Clade IV)__AIT17126__GPCmut12 (opt1)
aggagaguccgcucagccagguugcagaagcggcuuagcguguguccuaaucuucucucugcguguagguaggccugugccgcaaacaagcuuaccaugggccagaucgugaccuucuuccaggaggucccccacgugaucgaggaggugaugaacaucguccugaucgcccucagcauccuggccgugcugaaggggcucuacaacuucgcgaccugcggccugguggggcugcucacguuccugcugcucugcggccgcuccugcaccaccgggcuguacaagggcgucuacgagcugcagacccucgagcugaacauggagacgcugaacaugugcaugccgcucagcugcaccaagaacaacucccaccacuacaucauggugggcaacgagaccgggcuggagcugacccucacgaacaccagcaucaucaaccacaaguucugcaaccuguccgacgcccacaagaagaaccuguacgaccacgcccucaugagcaucaucuccaccuuccaccugagcauccccaacuucaaccaguacgaggccauguccugcgacuucaacggcgggaagaucagcgugcaguacaaccugucccacagcuacgccggcgacgcggccgaccacugcgggaccgucgccaacggcgugcuccagacguucaugcggauggccuggggcggguccuacaucgcgcuggacagcggccgcgggcggugggacugcaucaugaccuccuaccaguaccugaucauccagaacaccaccugggaggaccacugccaguucagccgccccucccccaucggcuaccucggccugcugagccagcggacgcgcgacaucuacaucucccggcgccuccuggggaccuucaccuggacccugagcgacagcgagggcaaggacacgcccgggggcuacugccucacccgguggaugcugaucgaggccgagcugaagugcuucgggaacaccgccguggccaagugcaacgagaagcacgacgaggaguucugcgacaugcuccgccuguucgacuucugcaagcaggccauccagcggcugaaggcggaggcccagauguccauccagcucaucaacaaggccgucaacgcccugaucaacgaccagcuggugaugaagaaccaccuccgcgacaucaugggcauccccuacugcaacuacagccgguacugcuaccugaaccacaccacgaccggccgcaccucccugcccaagugcugccucgugagcaacggguccuaccugaacgagacccacuucagcgacgacaucgagcagcaggccgacaacaugaucacggagaugcugcagaaggaguacauggagcggcagggcaagaccccgcuggggcucgucgaccuguucguguucuccaccagcuucuaccugaucuccaucuuccuccaccuggugaagaucccgacccaccgccacaucgucggcaagagcugccccaagccccaccggcugaaccacauggggaucugcuccugcggccucuacaagcagcccggcgugccggugaaguggaagcgcugaggacuagucccuguucccagagcccacuuuuuuuucuuuuuuugaaauaaaauagccugucuuucagaucucaaaggcucuuuucagagccaccaaaaaaaaaaaaaaaaaaaaaaaaaaaaaaaaaaaaaaaaaaaaaaaaaaaaaaaaaaaaaaaaagaauu

SEQ ID NO: 40511 - RNA, 1736 nt, Artificial Sequence
  mRNA product Design a-2 (hSL-A64-N5) comprising derived and/or modified sequence from LASV(G733-SLE-2010;Clade IV)__AIT17154__GPCmut12 (opt1)
aggagaguccgcucagccagguugcagaagcggcuuagcguguguccuaaucuucucucugcguguagguaggccugugccgcaaacaagcuuaccaugggccagaucgugaccuucuuccaggaggucccccacgugaucgaggaggugaugaacaucguccugaucgcccucagcauccuggccgugcugaaggggcucuacaacuucgcgaccugcggcaucguggggcuggucuccuuccugcuccugugcggccgcagcugcacgaccucccuguacaaggggguguacgagcuccagacccuggagcugaacauggagacccucaacaugugcaugccgcugagcugcacgaagaacaacucccaccacuacaucauggugggcaacgagaccggccuggagcucacccugaccaacacgagcaucaucaaccacaaguucugcaaccuguccgacgcccacaagaagaaccucuacgaccacgcccugaugagcaucaucuccaccuuccaccugagcauccccaacuucaaccaguacgaggccauguccugcgacuucaacgggggcaagaucagcguccaguacaaccucucccacagcuacgccggggacgcggccaaccacugcggcaccaucgccaacggggugcugcagaccuucaugcggauggccuggggcggcuccuacaucgcgcuggacagcgggcgcgaccggugggacugcaucaugacguccuaccaguaccucaucauccagaacaccaccugggaggaccacugccaguucagccgccccucccccaucggcuaccuggggcugcucagccagcggacccgcgacaucuacaucagccggcgccugcugggcacguucaccuggacccucuccgacagcgagggcaaggacacccccgggggcuacugccugacgcgguggaugcugaucgaggccgagcucaagugcuucgggaacaccgccguggccaagugcaacgagaagcacgacgaggaguucugcgacaugcugcgccuguucgacuucugcaagcaggccauccagcggcucaaggcggaggcccagauguccauccagcugaucaacaaggccgucaacgcccugaucaacgaccagcucaucaugaagaaccaccuccgcgacaucaugggcaucccguacugcaacuacagcaaguacugcuaccugaaccacaccaccacggggaagaccucccugcccaagugcugccuggugagcaacggcuccuaccugaacgagacccacuucagcgacgacaucgagcagcaggccgacaacaugaucaccgagaugcuccagaaggaguacauggagcggcagggcaagacgccccuggggcugguggaccuguucgucuucuccaccagcuucuaccucaucuccaucuuccugcaccuggugaagaucccgacccaccgccacguggucggcaagagcugccccaagccccaccggcucaaccacauggggaucugcuccugcggccuguacgggcagcccggcgugccggugaaguggaagcgcugaggacuagucccuguucccagagcccacuuuuuuuucuuuuuuugaaauaaaauagccugucuuucagaucucaaaggcucuuuucagagccaccaaaaaaaaaaaaaaaaaaaaaaaaaaaaaaaaaaaaaaaaaaaaaaaaaaaaaaaaaaaaaaaaagaauu

SEQ ID NO: 40512 - RNA, 1736 nt, Artificial Sequence
  mRNA product Design a-2 (hSL-A64-N5) comprising derived and/or modified sequence from MOPV/LASV reassortant(IGS-1;Clade IV)__AFY05576__GPCmut12 (opt1)
aggagaguccgcucagccagguugcagaagcggcuuagcguguguccuaaucuucucucugcguguagguaggccugugccgcaaacaagcuuaccaugggccagaucgugaccuucuuccaggaggucccccacgugaucgaggaggugaugaacaucguccugaucgcccucagcgugcuggccgugcugaaggggcucuacaacuucgcgaccugcggccuggucgggcuggugaccuuccuccugcugugcggccgcuccugcaccaccagccucuacaaggggguguacgagcugcagacccuggagcucaacauggagacgcugaacaugugcaugccgcuguccugcaccaagaacaacagccaccacuacaucauggucggcaacgagaccggccucgagcugacccugacgaacaccuccaucaucaaccacaaguucugcaaccucagcgacgcccacaagaagaaccuguacgaccacgcccugauguccaucaucagcaccuuccaccucuccauccccaacuucaaccaguacgaggccaugagcugcgacuucaacgggggcaagaucuccgugcaguacaaccugagccacuccuacgccggggacgcggccaaccacugcggcaccguggccaacgggguccugcagacguucaugcggauggccuggggcggcagcuacaucgcgcucgacuccgggcgcggcaacugggacugcaucaugaccagcuaccaguaccugaucauccagaacaccaccugggaggaccacugccaguucucccggcccagccccaucggguaccugggccuccugucccagcgcacgcgggacaucuacaucagccgccggcugcucggcaccuucaccuggacccugagcgacuccgagggggaggacacgccgggcggguacugccugacccgcuggaugcucaucgaggccgagcugaagugcuucggcaacaccgccguggccaagugcaacgagaagcacgacgaggaguucugcgacaugcugcggcuguucgacuucugcaagcaggccauccagcgccugaaggcggaggcccagaugagcauccagcugaucaacaaggccgugaacgcccucaucaacgaccagcugaucaugaagaaccaccuccgggacaucauggggauccccuacugcaacuacuccaaguacugcuaccucaaccacaccacgaccggccgcaccagccugcccaagugcugccuggucuccaacggcagcuaccucaacgagacccacuucuccgacgacaucgagcagcaggccgacaacaugaucacggagaugcugcagaaggaguacauggagcggcaggggaagacgccccugggccugguggaccucuucguguucagcaccuccuucuaccugaucagcaucuuccugcaccucgucaagaucccgacccaccgccacaucguggggaaguccugccccaagccccaccggcugaaccacaugggcaucugcagcugcgggcuguacaagcagcccggcgugccggucaaguggaagcgcugaggacuagucccuguucccagagcccacuuuuuuuucuuuuuuugaaauaaaauagccugucuuucagaucucaaaggcucuuuucagagccaccaaaaaaaaaaaaaaaaaaaaaaaaaaaaaaaaaaaaaaaaaaaaaaaaaaaaaaaaaaaaaaaaagaauu

SEQ ID NO: 40513 - RNA, 1736 nt, Artificial Sequence
  mRNA product Design a-2 (hSL-A64-N5) comprising derived and/or modified sequence from LASV(LM765-SLE-2012;Clade IV)__AIT17814__GPCmut12 (opt1)
aggagaguccgcucagccagguugcagaagcggcuuagcguguguccuaaucuucucucugcguguagguaggccugugccgcaaacaagcuuaccaugggccagaucgugaccuucuuccaggaggucccccacgugaucgaggaggugaugaacaucguccugaucgcccucagcauccuggccgugcugaaggggcucuacaacuucgcgaccugcggccugguggggcuggucacguuccuccugcugugcggccgcuccugcaccaccagccucuacaaggggguguacgagcugcagacccuggagcucaacauggagacgcugaacaugugcaugccgcuguccugcaccaagaacaacagccaccacuacaucauggugggcaacgagaccggccucgagcugacccugacgaacaccuccaucaucgaccacaaguucugcaaccucagcgacgcccaccggaagaaccuguacgaccacgcccugauguccaucaucagcaccuuccaccucuccauccccaacuucaaccaguacgaggccaugagcugcgacuucaacgggggcaagaucuccguccaguacaaccugagccacuccuacgccaaggacgcggccgaccacugcgggaccguggccaacggcgugcugcagacguucaugcgcauggccuggggcgggagcuacaucgcgcucgacuccggccgggggcgcugggacugcaucaugaccagcuaccaguaccugaucauccagaacaccaccugggaggaccacugccaguucucccggcccagccccaucggcuaccuggggcuccugucccagcgcacgcgggacaucuacaucagccgccggcugcucggcaccuucaccuggacccugagcgacuccgagggcaaggacacgcccgggggcuacugccugacccgcuggaugcucaucgaggccgagcugaagugcuucgggaacaccgccgucgccaagugcaacgagaagcacgacgaggaguucugcgacaugcugcggcuguucgacuucugcaagcaggccauccagcgccugaaggcggaggcccagaugagcauccagcugaucaacaaggccgugaacgcccucaucaacgaccagcugaucaugaagaaccaccuccgggacaucaugggcauccccuacugcaacuacuccaaguacugcuaccucaaccacaccacgaccgggaagaccagccugcccaagugcugccugguguccaacggcagcuaccucaacgagacccacuucuccgacgacaucgagcagcaggccgacaacaugaucacggagaugcugcagaaggaguacauggagcgccagggcaagaccccgcuggggcuggucgaccucuucguguucagcaccuccuucuaccugaucagcaucuuccugcaccucgugaagaucccgacccaccggcacaucgucggcaagcccugccccaagccccaccgccugaaccacauggggaucugcuccugcggccuguacaagcagccgggggugcccgugaaguggaagcggugaggacuagucccuguucccagagcccacuuuuuuuucuuuuuuugaaauaaaauagccugucuuucagaucucaaaggcucuuuucagagccaccaaaaaaaaaaaaaaaaaaaaaaaaaaaaaaaaaaaaaaaaaaaaaaaaaaaaaaaaaaaaaaaaagaauu

SEQ ID NO: 40514 - RNA, 1736 nt, Artificial Sequence
  mRNA product Design a-2 (hSL-A64-N5) comprising derived and/or modified sequence from LASV(LM776-SLE-2012;Clade IV)__AIT17824__GPCmut12 (opt1)
aggagaguccgcucagccagguugcagaagcggcuuagcguguguccuaaucuucucucugcguguagguaggccugugccgcaaacaagcuuaccaugggccagaucgugaccuucuuccaggaggucccccacgugaucgaggaggugaugaacaucguccugaucgcccucagcauccuggccgugcugaaggggcucuacaacuucgcgaccugcggccugguggggcuggucaccuuccuccugcugugcggccgcuccugcaccaccagcguguacaaggggguguacgagcuccagacccuggagcugaacauggagacgcucaacaugugcaugccgcuguccugcaccaagaacaacagccaccacuacaucauggucggcaacgagaccggccuggagcucacccugacgaacaccuccaucaucaaccacaaguucugcaaccugagcgacgcccacaagaagaaccucuacgaccacgcccugauguccaucaucagcaccuuccaccuguccauccccaacuucaaccaguacgaggccaugagcugcgacuucaacgggggcaagaucuccgugcaguacaaccucagccacuccuacgccggggacgcggccaaccacugcggcaccguggccaacgggguccugcagacguucaugcggauggccuggggcggcagcuacaucgcgcuggacuccgggcacggcaagugggacugcaucaugaccagcuaccaguaccucaucauccagaacaccaccugggaggaccacugccaguucucccgccccagccccaucggguaccugggccugcucucccagcggacgcgcgacaucuacaucagccggcgccugcugggcaccuucaccuggacccucagcgacuccgaggggaaggacacgccgggcggguacugccugacccgguggaugcugaucgaggccgagcucaagugcuucggcaacaccgccguggccaagugcaacgagaagcacgacgaggaguucugcgacaugcugcgccuguucgacuucugcaagcaggccauccagcggcucaaggcggaggcccagaugagcauccagcugaucaacaaggccgugaacgcccugaucaacgaccagcucaucaugaagaaccaccuccgcgacaucauggggauccccuacugcaacuacuccaaguacugcuaccugaaccacaccacgaccggcaagaccagccugcccaagugcugccuggucuccaacggcagcuaccugaacgagacccacuucuccgacgacaucgagcagcaggccgacaacaugaucacggagaugcuccagaaggaguacauggagcggcaggggaagacgccccugggccugguggaccuguucguguucagcaccuccuucuaccucaucagcaucuuccugcaccuggucaagaucccgacccaccgccacaucguggggaaguccugccccaagccccaccggcucaaccacaugggcaucugcagcugcgggcuguacaagcagcccggcgugccgguccgcuggaagcggugaggacuagucccuguucccagagcccacuuuuuuuucuuuuuuugaaauaaaauagccugucuuucagaucucaaaggcucuuuucagagccaccaaaaaaaaaaaaaaaaaaaaaaaaaaaaaaaaaaaaaaaaaaaaaaaaaaaaaaaaaaaaaaaaagaauu

SEQ ID NO: 40515 - RNA, 1736 nt, Artificial Sequence
  mRNA product Design a-2 (hSL-A64-N5) comprising derived and/or modified sequence from LASV(Mad39;Clade IV)__ANH09722__GPCmut12 (opt1)
aggagaguccgcucagccagguugcagaagcggcuuagcguguguccuaaucuucucucugcguguagguaggccugugccgcaaacaagcuuaccaugggccagaucgugaccuucuuccaggaggucccccacgugaucgaggaggugaugaacaucguccugaucgcccucagcauccuggccgugcugaaggggcucuacaacguggcgaccugcggccugaucgggcuggucacguuccuccugcugugcggccgcuccugcaccaccacccucuacaaggggguguacgagcugcaggcccuggagcucaacauggagacgcugaacaugugcaugccgcugagcugcaccaagaacaacucccaccacuacauccgggugggcaacgagaccggccucgagcugacccugacgaacaccagccucaucaaccacaaguucugcaaccuguccgacgcccacaagaagaaccuguacgaccacgcccucaugagcaucaucuccaccuuccaccugagcauccccaacuucaaccaguacgaggccauguccugcgacuucaacgacgggaagaucagcguccaguacaaccugucccacaccuacgcgggcgacacggccaaccacugcgggaccguggccaacggcgugcuccagaccuucaugcgcauggccuggggcgggagcuacaucgcgcuggacuccggccgcgggggcugggacugcaucaugaccagcuaccaguaccugaucauccagaacacgaccugggaggaccacugccaguucucccggcccagccccaucggguaccucggccugcugucccagcggacccgcgacaucuacaucagccggcgccuccugggcaccuucacguggacccuguccgacagcgaggggaaggacaccccgggcggguacugccucacccgguggaugcugaucgaggccgagcugaagugcuucggcaacacggccgucgccaagugcaacgagaagcacgacgaggaguucugcgacaugcuccgccuguucgacuucugcaagcaggccauccagcggcugaaggcggaggcccagaugagcauccagcucaucaacaaggccgugaacgcccugaucaacgaccagcugaucaugaagaaccaccuccgcgacaucauggggauccccuacugcaacuacuccaaguacugcuaccugaaccacaccgugaccggcaagaccagccugcccaagugcugccucgucuccaacggcagcuaccugaacgagacgcacuucuccgacgacaucgagcagcaggccgacaacaugaucaccgagaugcugcagaaggaguacauggagcggcaggggaagacgccccugggccucguggaccuguucguguucagcaccuccuucuaccugaucagcaucuuccuccaccuggucaagaucccgacccaccgccacgugguggggaagcccugccccaagccccaccggcugaaccacaugggcaucugcuccugcggguucuacaagcagccgggcguccccgugcgcuggaagcggugaggacuagucccuguucccagagcccacuuuuuuuucuuuuuuugaaauaaaauagccugucuuucagaucucaaaggcucuuuucagagccaccaaaaaaaaaaaaaaaaaaaaaaaaaaaaaaaaaaaaaaaaaaaaaaaaaaaaaaaaaaaaaaaaagaauu

SEQ ID NO: 40516 - RNA, 1736 nt, Artificial Sequence
  mRNA product Design a-2 (hSL-A64-N5) comprising derived and/or modified sequence from LASV(Z0947-SLE-2011;Clade IV)__AIT17840__GPCmut12 (opt1)
aggagaguccgcucagccagguugcagaagcggcuuagcguguguccuaaucuucucucugcguguagguaggccugugccgcaaacaagcuuaccaugggccagaucgugaccuucuuccaggaggucccccacgugaucgaggaggugaugaacaucguccugaucgcccucagcauccuggccgugcugaaggggcucuacaacuucgcgaccugcggccugguggggcuggucacguuccuccugcugugcggccgcuccugcaccaucagccucuacaaggggguguacgagcugcagacccuggagcucaacauggagacccugaacaugugcaugccgcuguccugcacgaagaacaacagccaccacuacaucauggugggcaacgagaccggccucgagcugacccugaccaacacguccaucaucaaccacaaguucugcaaccucagcgacgcccacaagaagaaccuguacgaccacgcccugauguccaucaucagcaccuuccaccucuccauccccaacuucaaccaguacgaggccaugagcugcgacuucaacgggggcaagaucuccguccaguacaaccugagccacuccuacgccggggacgcggccaaccacugcggcaccguggccaacggggugcugcagaccuucaugcggauggccuggggcggcagcuacaucgcgcucgacuccgggcgcgaccggugggacugcaucaugacgagcuaccaguaccugaucauccagaacaccaccugggaggaccacugccaguucucccgccccagccccaucggcuaccuggggcuccugucccagcggacccgcgacaucuacaucagccggcgccugcucggcacguucaccuggacccugagcgacuccgagggcaaggacacccccgggggcuacugccugacgcgguggaugcucaucgaggccgagcugaagugcuucgggaacaccgccgucgccaagugcaacgagaagcacgacgaggaguucugcgacaugcugcgccucuucgacuucugcaagcaggccauccagcggcugaaggcggaggcccagaugagcauccagcugaucaacaaggccgugaacgcccucaucaacgaccagcugaucaugaagaaccaccuccgcgacaucaugggcaucccguacugcaacuacuccaaguacugcuaccugaaccacaccaccacggggaagaccagccugcccaagugcugccugguguccaacggcagcuaccucaacgagacccacuucuccgacgacaucgagcagcaggccgacaacaugaucaccgagaugcugcagaaggaguacauggagcggcagggcaagacgccccuggggcuggucgaccucuucguguucagcaccuccuucuaccugaucagcaucuuccugcaccucgugaagaucccgacccaccgccacaucgucggcaagcccugccccaagccccaccggcugaaccacauggggaucugcuccugcggccuguacaagcagccgggggugcccgugaaguggaagcgcugaggacuagucccuguucccagagcccacuuuuuuuucuuuuuuugaaauaaaauagccugucuuucagaucucaaaggcucuuuucagagccaccaaaaaaaaaaaaaaaaaaaaaaaaaaaaaaaaaaaaaaaaaaaaaaaaaaaaaaaaaaaaaaaaagaauu

SEQ ID NO: 40517 - RNA, 1736 nt, Artificial Sequence
  mRNA product Design a-2 (hSL-A64-N5) comprising derived and/or modified sequence from LASV(Josiah;Clade IV)__NP_694870__GPCmut12 (opt4)
aggagaguccgcucagccagguugcagaagcggcuuagcguguguccuaaucuucucucugcguguagguaggccugugccgcaaacaagcuuaccaugggccagaucgugaccuucuuccaggaggugccccacgugaucgaggaggugaugaacaucgugcugaucgcccugagcgugcuggccgugcugaagggccuguacaacuucgccaccugcggccuggugggccuggugaccuuccugcugcugugcggcagaagcugcaccaccagccuguacaagggcguguacgagcugcagacccuggagcugaacauggagacccugaacaugugcaugccccugagcugcaccaagaacaacagccaccacuacaucauggugggcaacgagaccggccuggagcugacccugaccaacaccagcaucaucaaccacaaguucugcaaccugagcgacgcccacaagaagaaccuguacgaccacgcccugaugagcaucaucagcaccuuccaccugagcauccccaacuucaaccaguacgaggccaugagcugcgacuucaacggcggcaagaucagcgugcaguacaaccugagccacagcuacgccggcgacgccgccaaccacugcggcaccguggccaacggcgugcugcagaccuucaugagaauggccuggggcggcagcuacaucgcccuggacagcggcagaggcaacugggacugcaucaugaccagcuaccaguaccugaucauccagaacaccaccugggaggaccacugccaguucagcagacccagccccaucggcuaccugggccugcugagccagagaaccagagacaucuacaucagcagaagacugcugggcaccuucaccuggacccugagcgacagcgagggcaaggacacccccggcggcuacugccugaccagauggaugcugaucgaggccgagcugaagugcuucggcaacaccgccguggccaagugcaacgagaagcacgacgaggaguucugcgacaugcugagacuguucgacuucugcaagcaggccauccagagacugaaggccgaggcccagaugagcauccagcugaucaacaaggccgugaacgcccugaucaacgaccagcugaucaugaagaaccaccugagagacaucaugggcauccccuacugcaacuacagcaaguacugcuaccugaaccacaccaccaccggcagaaccagccugcccaagugcugccuggugagcaacggcagcuaccugaacgagacccacuucagcgacgacaucgagcagcaggccgacaacaugaucaccgagaugcugcagaaggaguacauggagagacagggcaagaccccccugggccugguggaccuguucguguucagcaccagcuucuaccugaucagcaucuuccugcaccuggugaagauccccacccacagacacaucgugggcaagagcugccccaagccccacagacugaaccacaugggcaucugcagcugcggccuguacaagcagcccggcgugcccgugaaguggaagagaugaggacuagucccuguucccagagcccacuuuuuuuucuuuuuuugaaauaaaauagccugucuuucagaucucaaaggcucuuuucagagccaccaaaaaaaaaaaaaaaaaaaaaaaaaaaaaaaaaaaaaaaaaaaaaaaaaaaaaaaaaaaaaaaaagaauu

SEQ ID NO: 40518 - RNA, 1733 nt, Artificial Sequence
  mRNA product Design a-2 (hSL-A64-N5) comprising derived and/or modified sequence from LASV(LP;Clade I)__AAF86701__GPCmut12 (opt4)
aggagaguccgcucagccagguugcagaagcggcuuagcguguguccuaaucuucucucugcguguagguaggccugugccgcaaacaagcuuaccaugggccagaucaucaccuucuuccaggaggugccccacgugaucgaggaggugaugaacaucgugcugaucgcccugagccugcuggccauccugaagggccuguacaacaucgccaccugcggcaucaucggccugguggccuuccuguuccugugcggcaagagcugcagccugacccugaagggcggcuacgagcugcagacccuggagcugaacauggagacccugaacaugugcaugccccugagcugcaccaagaacagcagccaccacuacaucagagugggcaacgagaccggccuggagcugacccugaccaacaccagcaucaucaaccacaaguucugcaaccugagcgacgcccacaagaagaaccuguacgaccacgcccugaugagcaucaucagcaccuuccaccugagcauccccaacuucaaccaguacgaggccaugagcugcgacuucaacggcggcaagaucagcgugcaguacaaccugagccacagcuacgccggcgacgccgccgagcacugcggcaccguggccaacggcgugcugcagaccuucaugagaauggccuggggcggcagauacaucgcccuggacagcggcaagggcaacugggacugcaucaugaccagcuaccaguaccugaucauccagaacaccaccugggaggaccacugccaguucagcagacccagccccaucggcuaccugggccugcugagccagagaaccagagacaucuacaucagcagaagacugcugggcaccuucaccuggacccugagcgacagcgagggcaacgagacccccggcggcuacugccugaccagauggaugcugaucgaggccgagcugaagugcuucggcaacaccgccguggccaagugcaacgagaagcacgacgaggaguucugcgacaugcugagacuguucgacuucugcaagcaggccaucagaagacugaaggccgaggcccagaugagcauccagcugaucaacaaggccgugaacgcccugaucaacgaccagcugaucaugaagaaccaccugagagacaucaugggcauccccuacugcaacuacagcaaguacugcuaccugaaccacaccagcagcggcagaaccagccugcccaagugcugccugaucagcaacggcagcuaccugaacgagacccaguucagcgacgacaucgagcagcaggccgacaacaugaucaccgagaugcugcagaaggaguacaucgagagacagggcaagaccccccugggccugguggacaucuucaucuucagcaccagcuucuaccugaucagcaucuuccugcaccugaucaagauccccacccacagacacaucgugggcaagcccugccccaagccccacagacugaaccacaugggcgugugcagcugcggccuguacaagcaccccggcgugcccaccaaguggaagagaugaggacuagucccuguucccagagcccacuuuuuuuucuuuuuuugaaauaaaauagccugucuuucagaucucaaaggcucuuuucagagccaccaaaaaaaaaaaaaaaaaaaaaaaaaaaaaaaaaaaaaaaaaaaaaaaaaaaaaaaaaaaaaaaaagaauu

SEQ ID NO: 40519 - RNA, 1733 nt, Artificial Sequence
  mRNA product Design a-2 (hSL-A64-N5) comprising derived and/or modified sequence from LASV(803213;Clade II)__AAF86703__GPCmut12 (opt4)
aggagaguccgcucagccagguugcagaagcggcuuagcguguguccuaaucuucucucugcguguagguaggccugugccgcaaacaagcuuaccaugggccagaucaucaccuucuuccaggaggugccccacgugaucgaggaggugaugaacaucgugcugaucgcccugagccugcuggccauccugaagggcaucuacaacguggccaccugcggccuguucggccugaucagcuuccugcugcugugcggcagaagcugcagcgugaccuacaagggcguguacgagcugcagacccuggagcugaacauggccaaccugaacaugugcaugccccugagcugcaccaagaacaacagccaccacuacaucauggugggcaacgagaccggccuggagcugacccugaccaacaccagcaucaucaaccacaaguucugcaaccugagcgacgcccacaagaagaaccuguacgaccacgcccugaugagcaucaucagcaccuuccaccugagcauccccaacuucaaccaguacgaggccaugagcugcgacuucaacggcggcaagaucagcgugcaguacaaccugagccacagcuucgccguggacgccgccaaccacugcggcaccaucgccaacggcgugcugcagaccuucaugagaauggccuggggcggcagcuacaucgcccuggacagcggcaagggcaacugggacugcaucaugaccagcuaccaguaccugaucauccagaacaccaccugggaggaccacugccaguucagcagacccagccccaucggcuaccugggccugcugagccagagaaccagagacaucuacaucagcagaagacugcugggcaccuucaccuggacccugagcgacagcgagggcaacgaggcccccggcggcuacugccugaccagauggaugcugaucgaggccgagcugaagugcuucggcaacaccgccguggccaagugcaacgagaagcacgacgaggaguucugcgacaugcugagacuguucgacuucugcaagcaggccaucaagagacugaagaccgaggcccagaugagcauccagcugaucaacaaggccgugaacgcccugaucaacgaccagcugaucaugaagaaccaccugagagacaucaugggcauccccuacugcaacuacagcagauacugcuaccugaaccacaccgugaccggcaagaccagccugcccagaugcugccuggugagcaacggcagcuaccugaacgagacccacuucagcgacgacaucgagcagcaggccgacaacaugaucaccgagaugcugcagaaggaguacauggacagacagggcaagaccccccugggccugguggaccuguucguguucagcaccagcuucuaccugaucagcaucuuccugcaccuggugaagauccccacccacagacacaucgugggcaagcccugccccaagccccacagacugaaccacaugggcaucugcagcugcggccuguacaagcaccccggcgugcccgugaaguggaagagaugaggacuagucccuguucccagagcccacuuuuuuuucuuuuuuugaaauaaaauagccugucuuucagaucucaaaggcucuuuucagagccaccaaaaaaaaaaaaaaaaaaaaaaaaaaaaaaaaaaaaaaaaaaaaaaaaaaaaaaaaaaaaaaaaagaauu

SEQ ID NO: 40520 - RNA, 1733 nt, Artificial Sequence
  mRNA product Design a-2 (hSL-A64-N5) comprising derived and/or modified sequence from LASV(GA391;Clade III)__CAA36645__GPCmut12 (opt4)
aggagaguccgcucagccagguugcagaagcggcuuagcguguguccuaaucuucucucugcguguagguaggccugugccgcaaacaagcuuaccaugggccagaucgugaccuucuuccaggaggugccccacgugaucgaggaggugaugaacaucgugcugaucgcccugagcauccuggccauccugaagggccuguacaacguggccaccugcggccugaucggccuggugaccuuccugcugcugagcggcagaagcugcagccugaucuacaagggcaccuacgagcugcagacccuggagcugaacauggagacccugaacaugugcaugccccugagcugcaccaagaacaacagccaccacuacaucagagugggcaacgagaccggccuggagcugacccugaccaacaccagcauccugaaccacaaguucugcaaccugagcgacgcccacaagagaaaccuguacgaccacagccugaugagcaucaucagcaccuuccaccugagcauccccaacuucaaccaguacgaggccaugagcugcgacuucaacggcggcaagaucaccgugcaguacaaccugagccacagcuucgccguggacgccgccggccacugcggcacccuggccaacggcgugcugcagaccuucaugagaauggccuggggcggcagcuacaucgcccuggacagcggcagaggcaacugggacugcaucaugaccagcuaccaguaccugaucauccagaacaccaccugggacgaccacugccaguucagcagacccagccccaucggcuaccugggccugcugagccagagaaccagagacaucuacaucagcagaagacugcugggcaccuucaccuggacccugagcgacagcgagggcaacgagacccccggcggcuacugccugaccagauggaugcugaucgaggccgagcugaagugcuucggcaacaccgccguggccaagugcaacgagaagcacgacgaggaguucugcgacaugcugagacuguucgacuucugcaagcaggccaucagaagacugaagaccgaggcccagaugagcauccagcugaucaacaaggccgugaacgcccugaucaacgaccagcugaucaugaagaaccaccugagagacaucaugggcauccccuacugcaacuacagcagauacugcuaccugaaccacaccagcaccggcaagaccagccugcccagaugcugccugaucagcaacggcagcuaccugaacgagaccaaguucagcgacgacaucgagcagcaggccgacaacaugaucaccgagaugcugcagaaggaguacaucgacagacagggcaagaccccccugggccugguggaccuguucguguucagcaccagcuucuaccugaucagcaucuuccugcaccuggugaagauccccacccacagacacaucgugggcaagcccugccccaagccccacagacugaaccacaugggcaucugcagcugcggccuguacaagcagcccggcgugcccgugagauggaagagaugaggacuagucccuguucccagagcccacuuuuuuuucuuuuuuugaaauaaaauagccugucuuucagaucucaaaggcucuuuucagagccaccaaaaaaaaaaaaaaaaaaaaaaaaaaaaaaaaaaaaaaaaaaaaaaaaaaaaaaaaaaaaaaaaagaauu

SEQ ID NO: 40521 - RNA, 1736 nt, Artificial Sequence
  mRNA product Design a-2 (hSL-A64-N5) comprising derived and/or modified sequence from LASV(AV;Clade V)__CCA30314__GPCmut12 (opt4)
aggagaguccgcucagccagguugcagaagcggcuuagcguguguccuaaucuucucucugcguguagguaggccugugccgcaaacaagcuuaccaugggccagaucgugaccuucuuccaggaggugccccacgugaucgaggaggugaugaacaucgugcugaucgcccugagcauccuggccgugcugaagggccuguacaacaucgccaccugcggccugaucggccugaucaccuuccugcugcugugcggcagaagcugcagcagcaaccuguacaagggcguguacgagcugcagagccuggaccugaacauggagacccugaacaugugcaugccccugagcugcaccaagaacaacagccaccacuacaucagagugggcaacgacaccggccuggagcugacccugaccaacaccagcauccugaaccacaaguucugcaaccugagcgacgcccacaagaaggaccuguacgaccacgcccugaugagcaucaucagcaccuuccaccugagcauccccaacuucaaccaguacgaggccaugagcugcgacuucaacggcggcaagaucagcgugcaguacaaccugagccacagcuacgccaucgacgccgccaaccacugcggcaccguggccaacggcauccugcagaccuucaugagaauggccuggggcggcagcuacaucgcccuggacagcggcagaggcaacugggacugcaucaugaccagcuaccaguaccugaucauccagaacaccaccugggagaaccacugccaguucagcagacccagccccaucggcuaccugggccugcugagccagagaaccagagacaucuacaucagcagaagacugcugggcaccuucaccuggacccugagcgacagcgagggcaacgccacccccggcggcuacugccugaccagauggaugcugaucgaggccgagcugaagugcuucggcaacaccgccguggccaagugcaacgagaagcacgacgaggaguucugcgacaugcugagacuguucgacuucugcaagcaggccaucagcagacugaagagcgaggcccagaugagcauccagcugaucaacaaggccgugaacgcccugaucaacgaccagcugaucaugaagaaccaccugagagacaucaugggcauccccuacugcaacuacagcaaguacugcuaccugaaccacaccaucaccggcaagaccagccugcccaagugcugccuggugagcaacggcagcuaccugaacgagacccacuucagcgacgacaucgagcagcaggccgacaacaugaucaccgagaugcugcagaaggaguacauggagagacagggcaagaccccccugggccugguggaccuguucguguucagcaccagcuucuaccugaucagcaucuuccugagacuggugaagauccccacccacagacacaucgugggcaagcccugccccaagccccacagacugaaccacaugggcaucugcagcugcggccuguacaagcagcccggcgugcccgugagauggaagagaugaggacuagucccuguucccagagcccacuuuuuuuucuuuuuuugaaauaaaauagccugucuuucagaucucaaaggcucuuuucagagccaccaaaaaaaaaaaaaaaaaaaaaaaaaaaaaaaaaaaaaaaaaaaaaaaaaaaaaaaaaaaaaaaaagaauu

SEQ ID NO: 40522 - RNA, 1733 nt, Artificial Sequence
  mRNA product Design a-2 (hSL-A64-N5) comprising derived and/or modified sequence from LASV(Togo/2016/7082;Clade VI)__AMR44577__GPCmut12 (opt4)
aggagaguccgcucagccagguugcagaagcggcuuagcguguguccuaaucuucucucugcguguagguaggccugugccgcaaacaagcuuaccaugggccagaucaucaccuucuuccaggaggugccccacgugaucgaggaggugaugaacaucgugcugaucgcccugagccugcuggccauccugaagggcguguacaacguggccaccugcggcaucaucggccuggugaccuuccuguuccugugcggcagaagcugcagccugaucuacaagggcagcuacgagcugcagacccuggagcugaacauggagacccugaacaugugcaugccccugagcugcaccaagaacagcagccaccacuacaucagagugggcaacgagaccggccuggagcugacccugaccaacaccagcaucaucaaccacaaguucugcaaccugagcgacgcccacaagagaaaccuguacgaccacgcccugaugagcauccugagcaccuuccaccugagcauccccaacuucaaccaguacgaggccaugagcugcgacuucaacggcggcaagaucagcgugcaguacaaccugagccacgccuacgccguggacgccgccgagcacugcggcaccguggccaacggcgugcugcagaccuucaugagaauggccuggggcggcagcuacaucgcccuggacagcggcagaggcaacugggacugcaucaugaccagcuaccaguaccugaucauccagaacaccaccugggaggaccacugccaguucagcagacccagccccaucggcuaccugggccugcugagccagagaaccagagacaucuacaucagcagaagacugcugggcaccuucaccuggacccugagcgacagcgagggcaacgagacccccggcggcuacugccugaccagauggaugcugaucgaggccgagcugaagugcuucggcaacaccgccguggccaagugcaacgagaagcacgacgaggaguucugcgacaugcugagacuguucgacuucugcaagcaggccauccagagacugaagagcgaggcccagaugagcauccagcugaucaacaaggccgugaacgcccugaucaacgaccagcugaucaugaagaaccaccugagagacaugaugggcauccccuacugcaacuacagcaaguacugcuaccugaaccacaccagcagcggcagaaccagccugcccaagugcugccuggugagcaacggcagcuaccugaacgagacccacuucagcgacgacaucgagcagcaggccgacaacaugaucaccgagaugcugcagaaggaguacaucgacagacagggcaagaccccccugggccugguggaccuguucguguucagcaccagcuucuaccugaucagcaucuuccugcaccugaucaagauccccacccacagacacaucgugggcaagcccugccccaagccccacagacugaaccacaugggcaucugcagcugcggccuguacaagcagcccggcgugcccaccagauggaagagaugaggacuagucccuguucccagagcccacuuuuuuuucuuuuuuugaaauaaaauagccugucuuucagaucucaaaggcucuuuucagagccaccaaaaaaaaaaaaaaaaaaaaaaaaaaaaaaaaaaaaaaaaaaaaaaaaaaaaaaaaaaaaaaaaagaauu

SEQ ID NO: 40523 - RNA, 1733 nt, Artificial Sequence
  mRNA product Design a-2 (hSL-A64-N5) comprising derived and/or modified sequence from LASV(KAK-428;Clade n.d. (VII))__ANH09740__GPCmut12 (opt4)
aggagaguccgcucagccagguugcagaagcggcuuagcguguguccuaaucuucucucugcguguagguaggccugugccgcaaacaagcuuaccaugggccagaucgugaccuucuuccaggaggugccccacgugaucgaggaggugaugaacaucgugcugaucgcccugagccugcuggccauccugaagggccuguacaacuucgccaccugcggcgugaucggccugaucaccuuccugcugcugugcggcagaagcugcagcgccaccuacaagggccaguacgagcugcagacccuggagcugaacauggagagccugaacaugugcaugccccugagcugcaccaagaacaacagccaccacuacaucagagccggcaacaacaccggccuggagcugacccugaccaacaccagcaucaucagccacaaguucugcaaccugagcgacgcccacaagaagaaccuguacgaccacacccugaugagcaucaucaccaccuuccaccugagcauccccaacuucaaccaguacgaggccaugagcugcgacuucaacggcggcaagaucagcauccaguacaaccugagccacagcuacgccggcgacgccgcccagcacugcggcaccguggccaacggcgugcugcagaccuucaugagaauggccuggggcggcagcuaccuggcccuggacagcggcagaagaggcugggacugcaucaucagcagcuaccaguaccugaucauccagaacaccaccugggacgaccacugccaguucagcagacccagccccaucggcuaccugggcuucgugagccagaagaccagagacaucuacaucagcagaagacugcugggcaccuucaccuggacccugagcgacagcgagggccacgacaugcccggcggcuacugccugaccagauggaugcugaucgaggccgaccugaagugcuucggcaacaccgccguggccaagugcaacgagaagcacgacgaggaguucugcgacauguggagacuguucgacuucugcaagcaggccauccagagacugaaggccgaggcccagaugaacauccagcugaucaacaaggccgugaacgcccugaucaacgaccagcugaugaugaagaaccaccugagagacaucaugggcauccccuacugcaacuacagcaaguucugcuaccugaacaacaccaccaccggcagaaccagccugcccagaugcugccugaucagcaacggcagcuaccugaacgagacccacuucagcgacgacaucgagcagcaggccgacaacaugaucaccgagaugcugcagaaggaguacauggacagacagggcaagaccccccugggccugguggaccuguucguguucagcaccagcuucuaccugaucaccaucuuccugcaccuggugaagauccccacccacagacacaucgugggcaagcccugccccaagccccacagacugaaccacaugggcaucugcagcugcggccuguacaagcagcccggcgugcccgugagauggaagagaugaggacuagucccuguucccagagcccacuuuuuuuucuuuuuuugaaauaaaauagccugucuuucagaucucaaaggcucuuuucagagccaccaaaaaaaaaaaaaaaaaaaaaaaaaaaaaaaaaaaaaaaaaaaaaaaaaaaaaaaaaaaaaaaaagaauu

SEQ ID NO: 40524 - RNA, 1733 nt, Artificial Sequence; identical to SEQ ID NO: 40518
  mRNA product Design a-2 (hSL-A64-N5) comprising derived and/or modified sequence from LASV(Pinneo-NIG-1969;Clade I)__AIT17836__GPCmut12 (opt4)

SEQ ID NO: 40525 - RNA, 1733 nt, Artificial Sequence
  mRNA product Design a-2 (hSL-A64-N5) comprising derived and/or modified sequence from LASV(ISTH0009-NIG-2011;Clade II)__AIT17404__GPCmut12 (opt4)
aggagaguccgcucagccagguugcagaagcggcuuagcguguguccuaaucuucucucugcguguagguaggccugugccgcaaacaagcuuaccaugggccagaucaucaccuucuuccaggaggugccccacgugaucgaggaggugaugaacaucgugcugaucgcccugagccugcuggccauccugaagggcaucuacaacguggccaccugcggccuguucggccuggugagcuuccugcugcugugcggcagaagcugcagcaccaccuacaagggcguguacgagcugcagacccuggagcuggacauggccagccugaacaugugcaugccccugagcugcaccaagaacaacagccaccacuacaucauggugggcaacgagaccggccuggagcugacccugaccaacaccagcaucaucaaccacaaguucugcaaccugagcgacgcccacaagaagaaccuguacgaccacgcccugaugagcaucaucagcaccuuccaccugagcauccccaacuucaaccaguacgaggccaugagcugcgacuucaacggcggcaagaucagcgugcaguacaaccugagccacgccuacgccguggacgccgccaaccacugcggcaccaucgccaacggcgugcugcagaccuucaugagaauggccuggggcggcagcuacaucgcccuggacagcggcaagggcagcugggacugcaucaugaccagcuaccaguaccugaucauccagaacaccaccugggaggaccacugccaguucagcagacccagccccaucggcuaccugggccugcugagccagagaaccagagacaucuacaucagcagaagacugcugggcaccuucaccuggacccugagcgacagcgagggcaacgagacccccggcggcuacugccugaccagauggaugcugaucgaggccgagcugaagugcuucggcaacaccgccguggccaagugcaacgagaagcacgacgaggaguucugcgacaugcugagacuguucgacuucugcaagcaggccaucagaagacugaagaccgaggcccagaugagcauccagcugaucaacaaggccgugaacgcccugaucaacgaccagcugaucaugaagaaccaccugagagacaucaugggcauccccuacugcaacuacagcaaguacugcuaccugaaccacaccgugaccggcaagaccagccugcccagaugcugccuggugagcaacggcagcuaccugaacgagacccacuucagcgacgacaucgagcagcaggccgacaacaugaucaccgagcugcugcagaaggaguacauggacagacagggcaagaccccccugggccugguggaccuguucguguucagcaccagcuucuaccugaucagcaucuuccugcaccugaucaagauccccacccacagacacaucaccggcaagcccugccccaagccccacagacugaaccacaugggcaucugcagcugcggccuguacaagcaccccggcgugcccgugaaguggaagagaugaggacuagucccuguucccagagcccacuuuuuuuucuuuuuuugaaauaaaauagccugucuuucagaucucaaaggcucuuuucagagccaccaaaaaaaaaaaaaaaaaaaaaaaaaaaaaaaaaaaaaaaaaaaaaaaaaaaaaaaaaaaaaaaaagaauu

SEQ ID NO: 40526 - RNA, 1733 nt, Artificial Sequence
  mRNA product Design a-2 (hSL-A64-N5) comprising derived and/or modified sequence from LASV(ISTH2010-NIG-2012;Clade II)__AIT17482__GPCmut12 (opt4)
aggagaguccgcucagccagguugcagaagcggcuuagcguguguccuaaucuucucucugcguguagguaggccugugccgcaaacaagcuuaccaugggccagaucaucaccuucuuccaggaggugccccacgugaucgaggaggugaugaacaucgugcugaucgcccugagccugcuggccauccugaagggcaucuacaacguggccaccugcggccuguucggccuggugagcuuccugcugcugugcggcagaagcugcagcaccaccuacaagggcguguacgagcugcagacccuggagcuggacauggccagccugaacaugugcaugccccugagcugcaccaagaacaacagccaccacuacaucauggugggcaacgagaccggccuggagcugacccugaccaacaccagcaucaucaaccacaaguucugcaaccugagcgacgcccacaagaagaaccuguacgaccacgcccugaugagcaucaucagcaccuuccaccugagcauccccaacuucaaccaguacgaggccaugagcugcgacuucaacggcggcaagaucagcgugcaguacaaccugagccacgccuacgccguggacgccgccaaccacugcggcaccaucgccaacggcgugcugcagaccuucaugagaauggccuggggcggcagcuacaucgcccuggacagcggcaagggcagcugggacugcaucaugaccagcuaccaguaccugaucauccagaacaucaccugggaggaccacugccaguucagcagacccagccccaucggcuaccugggccugcugagccagagaaccagagacaucuacaucagcagaagacugcugggcaccuucaccuggacccugagcgacagcgagggcaacgagacccccggcggcuacugccugaccagauggaugcugaucgaggccgagcugaagugcuucggcaacaccgccguggccaagugcaacgagaagcacgacgaggaguucugcgacaugcugagacuguucgacuucugcaagcaggccaucagaagacugaagaccgaggcccagaugagcauccagcugaucaacaaggccgugaacgcccugaucaacgaccagcugaucaugaagaaccaccugagagacaucaugggcauccccuacugcaacuacagcaaguacugcuaccugaaccacaccgugaccggcaagaccagccugcccagaugcugccuggugagcaacggcagcuaccugaacgagacccacuucagcgacgacaucgagcagcaggccgacaacaugaucaccgagcugcugcagaaggaguacaucgacagacagggcaagaccccccugggccugguggaccuguucguguucagcaccagcuucuaccugaucagcaucuuccugcaccuggugaagauccccacccacagacacguggugggcaagcccugccccaagccccacagacugaaccacaugggcaucugcagcugcggccuguacaagcaccccggcgugcccgugaaguggaagagaugaggacuagucccuguucccagagcccacuuuuuuuucuuuuuuugaaauaaaauagccugucuuucagaucucaaaggcucuuuucagagccaccaaaaaaaaaaaaaaaaaaaaaaaaaaaaaaaaaaaaaaaaaaaaaaaaaaaaaaaaaaaaaaaaagaauu

SEQ ID NO: 40527 - RNA, 1733 nt, Artificial Sequence
  mRNA product Design a-2 (hSL-A64-N5) comprising derived and/or modified sequence from LASV(Lassa virus/H.sapiens-wt/NGA/2015/ISTH_0543;Clade II)__AVO03639__GPCmut12 (opt4)
aggagaguccgcucagccagguugcagaagcggcuuagcguguguccuaaucuucucucugcguguagguaggccugugccgcaaacaagcuuaccaugggccagaucaucaccuucuuccaggaggugccccacgugaucgaggaggugaugaacaucgugcugaucgcccugagccugcuggccauccugaagggcaucuacaacguggccaccugcggccuguucggccuggugagcuuccugcugcugugcggcagaagcugcagcaccaccuacaagggcguguacgagcugcagacccuggagcuggacauggccaaccugaacaugugcaugccccugagcugcaccaagaacaacagccaccacuacaucauggugggcaacgagaccggccuggagcugacccugaccaacaccagcaucaucaaccacaaguucugcaaccugagcgacgcccacaagaagaaccuguacgaccacgcccugaugagcaucaucagcaccuuccaccugagcauccccaacuucaaccaguacgaggccaugagcugcgacuucaacggcggcaagaucagcgugcaguacaaccugagccacaccuacgccguggacgccgccaaccacugcggcaccaucgccaacggcgugcugcagaccuucaugagaauggccuggggcggcagcuacaucgcccuggacagcggcaagggcagcugggacugcaucaugaccagcuaccaguaccuggugauccagaacaccaccugggaggaccacugccaguucagcagacccagccccaucggcuaccugggccugcugagccagagaaccagagacaucuacaucagcagaagacugcugggcaccuucaccuggacccugagcgacagcgagggcaacgagacccccggcggcuacugccugaccagauggaugcugaucgaggccgagcugaagugcuucggcaacaccgccguggccaagugcaacgagaagcacgacgaggaguucugcgacaugcugagacuguucgacuucugcaagcaggccaucagaagacugaagaccgaggcccagaugagcauccagcugaucaacaaggccgugaacgcccugaucaacgaccagcugaucaugaagaaccaccugagagacaucaugggcauccccuacugcaacuacagcaaguacugcuaccugaaccacaccgugaccggcaagaccagccugcccagaugcugccuggugagcaacggcagcuaccugaacgagacccacuucagcgacgacaucgagcagcaggccgacaacaugaucaccgagcugcugcagaaggaguacaucgacagacagggcaagaccccccugggccugguggaccuguucguguucagcaccagcuucuaccugaucagcaucuuccugcaccuggugaagauccccacccacagacacaucaccggcaagcccugccccaagccccacagacugaaccacaugggcaucugcagcugcggccuguacaagcaccccggcgugcccgugaaguggaagagaugaggacuagucccuguucccagagcccacuuuuuuuucuuuuuuugaaauaaaauagccugucuuucagaucucaaaggcucuuuucagagccaccaaaaaaaaaaaaaaaaaaaaaaaaaaaaaaaaaaaaaaaaaaaaaaaaaaaaaaaaaaaaaaaaagaauu

SEQ ID NO: 40528 - RNA, 1733 nt, Artificial Sequence
  mRNA product Design a-2 (hSL-A64-N5) comprising derived and/or modified sequence from LASV(Lassa virus/H.sapiens-wt/NGA/2016/ISTH_0009;Clade II)__AVO03571__GPCmut12 (opt4)
aggagaguccgcucagccagguugcagaagcggcuuagcguguguccuaaucuucucucugcguguagguaggccugugccgcaaacaagcuuaccaugggccagaucaucaccuucuuccaggaggugccccacgugaucgaggaggugaugaacaucgugcugaucgcccugagccugcuggccauccugaagggcaucuacaacguggccaccugcggccugcugggccuggugagcuuccugcugcugugcggcagaagcugcagcaccaccuacaagggcguguacgagcugcagacccuggagcuggacauggccagccugaacaugugcaugccccugagcugcaccaagaacaacagccaccacuacaucauggugggcaacgagaccggccuggagcugacccugaccaacaccagcaucaucaaccacaaguucugcaaccugagcgacgcccacaagaagaaccuguacgaccacgcccugaugagcaucaucagcaccuuccaccugagcauccccaacuucaaccaguacgaggccaugagcugcgacuucaacggcggcagaaucagcgugcaguacaaccugagccacagcuacgccguggacgccgccaaccacugcggcaccaucgccaacggcgugcugcagaccuucaugagaauggccuggggcggcagcuacaucgcccuggacagcggcaagggcagcugggacugcaucaugaccagcuaccaguaccugaucauccagaacaccaccugggaggaccacugccaguucagcagacccagccccaucggcuaccugggccugcugagccagagaaccagagacaucuacaucagcagaagacugcugggcaccuucaccuggacccugagcgacagcgagggcaacgagacccccggcggcuacugccugaccagauggaugcugaucgaggccgagcugaagugcuucggcaacaccgccguggccaagugcaacgagaagcacgacgaggaguucugcgacaugcugagacuguucgacuucugcaagcaggccaucagaagacugaagaccgaggcccagaugagcauccagcugaucaacaaggccgugaacgcccugaucaacgaccagcugaucaugaagaaccaccugagagacaucaugggcauccccuacugcaacuacagcaaguacugcuaccugaaccacaccgugaccggcaagaccagccugcccagaugcugccuggugagcaacggcagcuaccugaacgagacccacuucagcgacgacaucgagcagcaggccgacaacaugaucaccgagcugcugcagaaggaguacaucgacagacagggcaagaccccccugggccugguggaccuguucguguucagcaccagcuucuaccugaucagcaucuuccugcaccuggugaagauccccacccacagacacaucaccggcaagcccugccccaagccccacagacugaaccacaugggcaucugcagcugcggccuguacaaccaccccggcgugcccgugaaguggaagagaugaggacuagucccuguucccagagcccacuuuuuuuucuuuuuuugaaauaaaauagccugucuuucagaucucaaaggcucuuuucagagccaccaaaaaaaaaaaaaaaaaaaaaaaaaaaaaaaaaaaaaaaaaaaaaaaaaaaaaaaaaaaaaaaaagaauu

SEQ ID NO: 40529 - RNA, 1733 nt, Artificial Sequence
  mRNA product Design a-2 (hSL-A64-N5) comprising derived and/or modified sequence from LASV(Lassa virus/H.sapiens-wt/NGA/2016/ISTH_0017;Clade II)__AVO03567__GPCmut12 (opt4)
aggagaguccgcucagccagguugcagaagcggcuuagcguguguccuaaucuucucucugcguguagguaggccugugccgcaaacaagcuuaccaugggccagaucaucaccuucuuccaggaggugccccacgugaucgaggaggugaugaacaucgugcugaucgcccugagccugcuggccauccugaagggcaucuacaacguggccaccugcggccuguucggccuggugagcuuccugcugcugugcggcagaagcugcagcaccaccuacaagggcguguacgagcugcagacccuggagcuggacauggccagccugaacaugugcaugccccugagcugcaccaagaacaacagccaccacuacaucauggugggcaacgagaccggccuggagcugacccugaccaacaccagcaucaucaaccacaaguucugcaaccugagcgacgcccacaagaagaaccuguacgaccacgcccugaugagcaucaucagcaccuuccaccugagcauccccaacuucaaccaguacgaggccaugagcugcgacuucaacggcggcaagaucagcgugcaguacaaccugagccacaccuacgccaucgacgccgccaaccacugcggcaccaucgccaacggcgugcugcagaccuucaugagaauggccuggggcggcagcuacaucgcccuggacagcggcaagggcagcugggacugcaucaugaccagcuaccaguaccugaucauccagaacaccaccugggaggaccacugccaguucagcagacccagccccaucggcuaccugggccugcugagccagagaaccagagacaucuacaucagcagaagacugcugggcaccuucaccuggacccugagcgacagcgagggcaacgagacccccggcggcuacugccugaccagauggaugcugaucgaggccgagcugaagugcuucggcaacaccgccguggccaagugcaacgagaagcacgacgaggaguucugcgacaugcugagacuguucgacuucugcaagcaggccaucagaagacugaagaccgaggcccagaugagcauccagcugaucaacaaggccgugaacgcccugaucaacgaccagcugaucaugaagaaccaccugagagacaucaugggcauccccuacugcaacuacagcaaguacugcuaccugaaccacaccgugaccggcaagaccagccugcccagaugcugccuggugagcaacggcagcuaccugaacgagacccacuucagcgacgacaucgagcagcaggccgacaacaugaucaccgagcugcugcagaaggaguacauggacagacagggcaagaccccccugggccugguggaccuguucguguucagcaccagcuucuaccugaucagcaucuuccugcaccuggugagaauccccacccacagacacgugaucggcaagcccugccccaagccccacagacugaaccacaugggcaucugcagcugcggccuguacaagcaccccggcgugcccgugaaguggaagagaugaggacuagucccuguucccagagcccacuuuuuuuucuuuuuuugaaauaaaauagccugucuuucagaucucaaaggcucuuuucagagccaccaaaaaaaaaaaaaaaaaaaaaaaaaaaaaaaaaaaaaaaaaaaaaaaaaaaaaaaaaaaaaaaaagaauu

SEQ ID NO: 40530 - RNA, 1733 nt, Artificial Sequence
  mRNA product Design a-2 (hSL-A64-N5) comprising derived and/or modified sequence from LASV(Lassa virus/H.sapiens-wt/NGA/2018/ISTH_0959;Clade II)__AVV65099__GPCmut12 (opt4)
aggagaguccgcucagccagguugcagaagcggcuuagcguguguccuaaucuucucucugcguguagguaggccugugccgcaaacaagcuuaccaugggccagaucaucaccuucuuccaggaggugccccacgugaucgaggaggugaugaacaucgugcugaucgcccugagccugcuggccauccugaagggcaucuacaacguggugaccugcggccuguucggccuggugagcuuccugcugcugugcggcagaagcugcagcaccaccuacaagggcguguacgagcugcagacccuggagcuggacauggccagccugaacaugugcaugccccugagcugcaccaagaacaacagccaccacuacaucauggugggcaacgagaccggccuggagcugacccugaccaacaccagcaucaucaaccacaaguucugcaaccugagcgacgcccacaagaagaaccuguacgaccacgcccugaugagcaucaucagcaccuuccaccugagcauccccaacuucaaccaguacgaggccaugagcugcgacuucaacggcggcaagaucagcgugcaguacaaccugagccacgccuacgccaucgacgccgccaaccacugcggcaccaucgccaacggcgugcugcagaccuucaugagaauggccuggggcggcagcuacaucgcccuggacagcggcaagggcagcugggacugcaucaugaccagcuaccaguaccugaucauccagaacaccaccugggaggaccacugccaguucagcagacccagccccaucggcuaccugggccugcugagccagagaaccagagacaucuacaucagcagaagacugcugggcaccuucaccuggacccugagcgacagcgagggcaacgagacccccggcggcuacugccugaccagauggaugcugaucgaggccgagcugaagugcuucggcaacaccgccguggccaagugcaacgagaagcacgacgaggaguucugcgacaugcugagacuguucgacuucugcaagcaggccaucagaagacugaagaccgaggcccagaugagcauccagcugaucaacaaggccgugaacgcccugaucaacgaccagcugaucaugaagaaccaccugagagacaucaugggcauccccuacugcaacuacagcaaguacugcuaccugaaccacaccgugaccggcaagaccagccugcccagaugcugccuggugagcaacggcagcuaccugaacgagacccacuucagcgacgacaucgagcagcaggccgacaacaugaucaccgagcugcugcagaaggaguacaucgacagacagggcaagaccccccugggccugguggaccuguucguguucagcaccagcuucuaccugaucagcaucuuccugcaccuggugaagauccccacccacagacacgugaucggcaagcccugccccaagccccacagacugaaccacaugggcaucugcagcugcggccuguacaagcaccccggcgugcccgugaaguggaagagaugaggacuagucccuguucccagagcccacuuuuuuuucuuuuuuugaaauaaaauagccugucuuucagaucucaaaggcucuuuucagagccaccaaaaaaaaaaaaaaaaaaaaaaaaaaaaaaaaaaaaaaaaaaaaaaaaaaaaaaaaaaaaaaaaagaauu

SEQ ID NO: 40531 - RNA, 1733 nt, Artificial Sequence
  mRNA product Design a-2 (hSL-A64-N5) comprising derived and/or modified sequence from LASV(LASV003-NIG-2008;Clade II)__AIT17580__GPCmut12 (opt4)
aggagaguccgcucagccagguugcagaagcggcuuagcguguguccuaaucuucucucugcguguagguaggccugugccgcaaacaagcuuaccaugggccagaucaucaccuucuuccaggaggugccccacgugaucgaggaggugaugaacaucgugcugaucgcccugagccugcuggccauccugaagggcaucuacaacguggccaccugcggccuguucggccuggugagcuuccugcugcugugcggcagaagcugcagcaccaccuacaagggcguguacgagcugcagacccuggagcuggacauggccagccugaacaugugcaugccccugagcugcaccaagaacaacagccaccacuacaucauggugggcaacgagaccggccuggagcugacccugaccaacaccagcaucaucaaccacaaguucugcaaccugagcgacgcccacaagaagaaccuguacgaccacgcccugaugagcaucaucagcaccuuccaccugagcauccccaacuucaaccaguacgaggccaugagcugcgacuucaacggcggcaagaucagcgugcaguacaaccugagccacaccuacgccguggacgccgccaaccacugcggcaccaucgccaacggcgugcugcagaccuucaugagaauggccuggggcggcagcuacaucgcccuggacagcggcaagggcagcugggacugcaucaugaccagcuaccaguaccugaucauccagaacaccaccugggaggaccacugccaguucagcagacccagccccaucggcuaccugggccugcugagccagagaaccagagacaucuacaucagcagaagacugcugggcaccuucaccuggacccugagcgacagcgagagcaacgagacccccggcggcuacugccugaccagauggaugcugaucgaggccgagcugaagugcuucggcaacaccgccguggccaagugcaacgagaagcacgacgaggaguucugcgacaugcugagacuguucgacuucugcaagcaggccaucagaagacugaaggccgaggcccagaugagcauccagcugaucaacaaggccgugaacgcccugaucaacgaccagcugaucaugaagaaccaccugagagacaucaugggcauccccuacugcaacuacagcaaguacugcuaccugaaccacaccgugaccggcagaaccagccugcccagaugcugccuggugagcaacggcagcuaccugaacgagacccacuucagcgacgacaucgagcagcaggccgacaacaugaucaccgagcugcugcagaaggaguacauggacagacagggcaagaccccccugggccugguggaccuguucguguucagcaccagcuucuaccugaucagcaucuuccugcaccuggugaagauccccacccacagacacgugaucggcaagcccugccccaagccccacagacugaaccacaugggcaucugcagcugcggccuguacaagcaccccggcgugcccgugaaguggaagagaugaggacuagucccuguucccagagcccacuuuuuuuucuuuuuuugaaauaaaauagccugucuuucagaucucaaaggcucuuuucagagccaccaaaaaaaaaaaaaaaaaaaaaaaaaaaaaaaaaaaaaaaaaaaaaaaaaaaaaaaaaaaaaaaaagaauu

SEQ ID NO: 40532 - RNA, 1733 nt, Artificial Sequence
  mRNA product Design a-2 (hSL-A64-N5) comprising derived and/or modified sequence from LASV(LASV035-NIG-2009;Clade II)__AIT17588__GPCmut12 (opt4)
aggagaguccgcucagccagguugcagaagcggcuuagcguguguccuaaucuucucucugcguguagguaggccugugccgcaaacaagcuuaccaugggccagaucaucaccuucuuccaggaggugccccacgugaucgaggaggugaugaacaucgugcugaucgcccugagccugcuggccauccugaagggcaucuacaacguggccaccugcggccuguucggccuggugagcuuccugcugcugugcggcagaagcugcagcaccaccuacaagggcguguacgagcugcagacccuggagcuggacauggccagccugaacaugugcaugccccugagcugcaccaagaacaacagccaccacuacaucauggugggcaacgagaccggccuggagcugacccugaccaacaccagcaucaucaaccacaaguucugcaaccugagcgacgcccacaagaagaaccuguacgaccacgcccugaugagcaucaucagcaccuuccaccugagcauccccaacuucaaccaguacgaggccaugagcugcgacuucaacggcggcaagaucagcgugcaguacaaccugagccacgccuacgccguggacgccgccaaccacugcggcaccaucgccaacggcgugcugcagaccuucaugagaauggccuggggcggcagcuacaucgcccuggacagcggcaagggcagcugggacugcaucaugaccagcuaccaguaccugaucauccagaacaccaccugggaggaccacugccaguucagcagacccagccccaucggcuaccugggccugcugagccagagaaccagagacaucuacaucagcagaagacugcugggcaccuucaccuggacccugagcgacagcgagggcaacgagacccccggcggcuacugccugaccagauggaugcugaucgaggccgagcugaagugcuucggcaacaccgccguggccaagugcaacgagaagcacgacgaggaguucugcgacaugcugagacuguucgacuucugcaagcaggccaucagaagacugaaggccgaggcccagaugagcauccagcugaucaacaaggccgugaacgcccugaucaacgaccagcugaucaugaagaaccaccugagagacaucaugggcauccccuacugcaacuacagcaaguacugcuaccugaaccacaccgugaccggcaagaccagccugcccagaugcugccuggugagcaacggcagcuaccugaacgagacccacuucagcgacgacaucgagcagcaggccgacaacaugaucaccgagcugcugcagaaggaguacaucgacagacagggcaagaccccccugggccugguggaccuguucguguucagcaccagcuucuaccugaucagcaucuuccugcaccuggugaagauccccacccacagacacgugaucggcaagcccugccccaagccccacagacugaaccacaugggcaucugcagcugcggccuguacaagcaccccggcgugcccgugaaguggaagagaugaggacuagucccuguucccagagcccacuuuuuuuucuuuuuuugaaauaaaauagccugucuuucagaucucaaaggcucuuuucagagccaccaaaaaaaaaaaaaaaaaaaaaaaaaaaaaaaaaaaaaaaaaaaaaaaaaaaaaaaaaaaaaaaaagaauu

SEQ ID NO: 40533 - RNA, 1733 nt, Artificial Sequence
  mRNA product Design a-2 (hSL-A64-N5) comprising derived and/or modified sequence from LASV(LASV1000-NIG-2009;Clade II)__AIT17782__GPCmut12 (opt4)
aggagaguccgcucagccagguugcagaagcggcuuagcguguguccuaaucuucucucugcguguagguaggccugugccgcaaacaagcuuaccaugggccagaucaucaccuucuuccaggaggugccccacgugaucgaggaggugaugaacaucgugcugaucgcccugagccugcuggccauccugaagggcaucuacaacguggccaccugcggccuguucggccuggugagcuuccugcugcugugcggcagaagcugcagcaccaccuacaagggcguguacgagcugcagacccuggagcuggacauggccagccugaacaugugcaugccccugagcugcaccaagaacaacagccaccacuacaucauggugggcaacgagaccggccuggagcugacccugaccaacaccagcaucaucaaccacaaguucugcaaccugagcgacgcccacaagaagaaccuguacgaccacgcccugaugagcaucaucagcaccuuccaccugagcauccccaacuucaaccaguacgaggccaugagcugcgacuucaacggcggcaagaucagcgugcaguacaaccugagccacaccuacgccguggacgccgccaaccacugcggcaccaucgccaacggcgugcugcagaccuucaugagaauggccuggggcggcagcuacaucgcccuggacagcggcaagggcagcugggacugcaucaugaccagcuaccaguaccugaucauccagaacaccaccugggaggaccacugccaguucagcagacccagccccaucggcuaccugggccugcugagccagagaaccagagacaucuacaucagcagaagacugcugggcaccuucaccuggacccugagcgacagcgagggcaacgagacccccggcggcuacugccugaccagauggaugcugaucgaggccgagcugaagugcuucggcaacaccgccguggccaagugcaacgagaagcacgacgaggaguucugcgacaugcugagacuguucgacuucugcaagcaggccaucaagagacugaagaccgaggcccagaugagcauccagcugaucaacaaggccgugaacgcccugaucaacgaccagcugaucaugaagaaccaccugagagacaucaugggcauccccuacugcaacuacagcaaguacugcuaccugaaccacaccgugaccggcaagaccagccugcccagaugcugccuggugagcaacggcagcuaccugaacgagacccacuucagcgacgacaucgagcagcaggccgacaacaugaucaccgagcugcugcagaaggaguacaucgacagacagggcaagaccccccugggccugguggaccuguucguguucagcaccagcuucuaccugaucagcaucuuccugcaccuggugaagauccccacccacagacacguggugggcaagcccugccccaagccccacagacugaaccacaugggcaucugcagcugcggccuguacaagcaccccggcgugcccgugaaguggaagagaugaggacuagucccuguucccagagcccacuuuuuuuucuuuuuuugaaauaaaauagccugucuuucagaucucaaaggcucuuuucagagccaccaaaaaaaaaaaaaaaaaaaaaaaaaaaaaaaaaaaaaaaaaaaaaaaaaaaaaaaaaaaaaaaaagaauu

SEQ ID NO: 40534 - RNA, 1733 nt, Artificial Sequence
  mRNA product Design a-2 (hSL-A64-N5) comprising derived and/or modified sequence from LASV(LASV221-NIG-2010;Clade II)__AIT17624__GPCmut12 (opt4)
aggagaguccgcucagccagguugcagaagcggcuuagcguguguccuaaucuucucucugcguguagguaggccugugccgcaaacaagcuuaccaugggccagaucaucaccuucuuccaggaggugccccacgugaucgaggaggugaugaacaucgugcugaucgcccugagccugcuggccauccugaagggcaucuacaacguggccaccugcggccuguucggccuggugagcuuccugcugcugugcggcagaagcugcagcaccaccuacaagggcguguacgagcugcagacccuggagcuggacauggccagccugaacaugugcaugccccugagcugcaccaagaacaacagccaccacuacaucauggugggcaacgagaccggccuggagcugacccugaccaacaccagcaucaucaaccacaaguucugcaaccugagcgacgcccacaagaagaaccuguacgaccacgcccugaugagcaucaucagcaccuuccaccugagcauccccaacuucaaccaguacgaggccaugagcugcgacuucaacggcggcaagaucagcgugcaguacaaccugagccacaccuacgccaucgacgccgccaaccacugcggcaccaucgccaacggcgugcugcagaccuucaugagaauggccuggggcggcagcuacaucgcccuggacagcggcaagggcagcugggacugcaucaugaccagcuaccaguaccugaucauccagaacaccaccugggaggaccacugccaguucagcagacccagccccaucggcuaccugggccugcugagccagagaaccagagacaucuacaucagcagaagacugcugggcaccuucaccuggacccugagcgacagcgagggcaacgagacccccggcggcuacugccugaccagauggaugcugaucgaggccgagcugaagugcuucggcaacaccgccguggccaagugcaacgagaagcacgacgaggaguucugcgacaugcugagacuguucgacuucugcaagcaggccaucagaagacugaagaccgaggcccagaugagcauccagcugaucaacaaggccgugaacgcccugaucaacgaccagcugaucaugaagaaccaccugagagacaucaugggcauccccuacugcaacuacagcaaguacugcuaccugaaccacaccgugaccggcaagaccagccugcccagaugcugccuggugagcaacggcagcuaccugaacgagacccacuucagcgacgacaucgagcagcaggccgacaacaugaucaccgagaugcugcagaaggaguacauggacagacagggcaagaccccccugggccugguggaccuguucguguucagcaccagcuucuaccugaucagcaucuuccugcaccuggugaagauccccacccacagacacgugaucggcaagcccugccccaagccccacagacugaaccacaugggcaucugcagcugcggccuguacaagcaccccggcgugcccgugaaguggaagagaugaggacuagucccuguucccagagcccacuuuuuuuucuuuuuuugaaauaaaauagccugucuuucagaucucaaaggcucuuuucagagccaccaaaaaaaaaaaaaaaaaaaaaaaaaaaaaaaaaaaaaaaaaaaaaaaaaaaaaaaaaaaaaaaaagaauu

SEQ ID NO: 40535 - RNA, 1733 nt, Artificial Sequence
  mRNA product Design a-2 (hSL-A64-N5) comprising derived and/or modified sequence from LASV(LASV237-NIG-2010;Clade II)__AIT17638__GPCmut12 (opt4)
aggagaguccgcucagccagguugcagaagcggcuuagcguguguccuaaucuucucucugcguguagguaggccugugccgcaaacaagcuuaccaugggccagaucaucaccuucuuccaggaggugccccacgugaucgaggaggugaugaacaucgugcugaucgcccugagccugcuggccauccugaagggcaucuacaacguggccaccugcggccuguucggccuggugagcuuccugcugcugugcggcagaagcugcagcaccaccuacaagggcguguacgagcugcagacccuggagcuggacauggccagccugaacaugugcaugccccugagcugcaccaagaacaacagccaccacuacaucauggugggcaacgagaccggccuggagcugacccugaccaacaccagcaucaucaaccacaaguucugcaaccugagcgacgcccacaagaaggaccuguacgaccacgcccugaugagcaucaucagcaccuuccaccugagcauccccaacuucaaccaguacgaggccaugagcugcgacuucaacggcggcaagaucagcgugcaguacaaccugagccacaccuacgccguggacgccgccaaccacugcggcaccaucgccaacggcgugcugcagaccuucaugagaauggccuggggcggcagcuacaucgcccuggacagcggcaagggcagcugggacugcaucaugaccagcuaccaguaccugaucauccagaacaccaccugggaggaccacugccaguucagcagacccagccccaucggcuaccugggccugcugagccagagaaccagagacaucuacaucagcagaagacugcugggcaccuucaccuggacccugagcgacagcgagggcaacgagacccccggcggcuacugccugaccagauggaugcugaucgaggccgagcugaagugcuucggcaacaccgccguggccaagugcaacgagaagcacgacgaggaguucugcgacaugcugagacuguucgacuucugcaagcaggccaucagaagacugaagaccgaggcccagaugagcauccagcugaucaacaaggccgugaacgcccugaucaacgaccagcugaucaugaagaaccaccugagagacaucaugggcauccccuacugcaacuacagcaaguacugcuaccugaaccacaccgugaccggcaagaccagccugcccagaugcugccuggugagcaacggcagcuaccugaacgagacccacuucagcgacgacaucgagcagcaggccgacaacaugaucaccgagcugcugcagaaggaguacauggacagacagggcaagaccccccugggccugguggaccuguucguguucagcaccagcuucuaccugaucagcaucuuccugcaccugaucaagauccccacccacagacacaucaccggcaagcccugccccaagccccacagacugaaccacaugggcaucugcagcugcggccuguacaagcaccccggcgugcccgugaaguggaagagaugaggacuagucccuguucccagagcccacuuuuuuuucuuuuuuugaaauaaaauagccugucuuucagaucucaaaggcucuuuucagagccaccaaaaaaaaaaaaaaaaaaaaaaaaaaaaaaaaaaaaaaaaaaaaaaaaaaaaaaaaaaaaaaaaagaauu

SEQ ID NO: 40536 - RNA, 1733 nt, Artificial Sequence
  mRNA product Design a-2 (hSL-A64-N5) comprising derived and/or modified sequence from LASV(LASV253-NIG-2011;Clade II)__AIT17670__GPCmut12 (opt4)
aggagaguccgcucagccagguugcagaagcggcuuagcguguguccuaaucuucucucugcguguagguaggccugugccgcaaacaagcuuaccaugggccagaucaucaccuucuuccaggaggugccccacgugaucgaggaggugaugaacaucgugcugaucgcccugagccugcuggccauccugaagggcaucuacaacguggccaccugcggccuguucggccuggugagcuuccugcugcugugcggcagaagcugcagcaccaccuacaagggcguguacgagcugcagacccuggagcuggacauggccagccugaacaugugcaugccccugagcugcaccaagaacaacagccaccacuacaucauggugggcaacgagaccggccuggagcugacccugaccaacaccagcaucaucaaccacaaguucugcaaccugagcgacgcccacaagaagaaccuguacgaccacgcccugaugagcaucaucagcaccuuccaccugagcauccccaacuucaaccaguacgaggccaugagcugcgacuucaacggcggcaagaucagcgugcaguacaaccugagccacaccuacgccguggacgccgccaaccacugcggcaccaucgccaacggcgugcugcagaccuucaugagaauggccuggggcggcagcuacaucgcccuggacagcggcaagggcagcugggacugcaucaugaccagcuaccaguaccugaucauccagaacaccaccugggaggaccacugccaguucagcagacccagccccaucggcuaccugggccugcugagccagagaaccagagacaucuacaucagcagaagacugcugggcaccuucaccuggacccugagcgacagcgagggcaacgagacccccggcggcuacugccugaccagauggaugcugaucgaggccgagcugaagugcuucggcaacaccgccguggccaagugcaacgagaagcacgacgaggaguucugcgacaugcugagacuguucgacuucugcaagcaggccaucagaagacugaaggccgaggcccagaugagcauccagcugaucaacaaggccgugaacgcccugaucaacgaccagcugaucaugaagaaccaccugagagacaucaugggcauccccuacugcaacuacagcaaguacugcuaccugaaccacaccgugaccggcagaaccagccugcccagaugcugccuggugagcaacggcagcuaccugaacgagacccacuucagcgacgacaucgagcagcaggccgacaacaugaucaccgagcugcugcagaaggaguacaucgacagacagggcaagaccccccugggccugguggaccuguucguguucagcaccagcuucuaccugaucagcaucuuccugcaccuggugaagauccccacccacagacacaucaucggcaagcccugccccaagccccacagacugaaccacaugggcaucugcagcugcggccuguacaagcaccccggcgugcccgugaaguggaagagaugaggacuagucccuguucccagagcccacuuuuuuuucuuuuuuugaaauaaaauagccugucuuucagaucucaaaggcucuuuucagagccaccaaaaaaaaaaaaaaaaaaaaaaaaaaaaaaaaaaaaaaaaaaaaaaaaaaaaaaaaaaaaaaaaagaauu

SEQ ID NO: 40537 - RNA, 1733 nt, Artificial Sequence
  mRNA product Design a-2 (hSL-A64-N5) comprising derived and/or modified sequence from LASV(LASV254-NIG-2011;Clade II)__AIT17674__GPCmut12 (opt4)
aggagaguccgcucagccagguugcagaagcggcuuagcguguguccuaaucuucucucugcguguagguaggccugugccgcaaacaagcuuaccaugggccagaucaucaccuucuuccaggaggugccccacgugaucgaggaggugaugaacaucgugcugaucgcccugagccugcuggccauccugaagggcaucuacaacguggccaccugcggccuguucggccuggugagcuuccugcugcugugcggcagaagcugcagcaccaccuacaagggcguguacgagcugcagacccuggagcuggacaugaccaaccugaacaugugcaugccccugagcugcaccaagaacaacagccaccacuacaucauggugggcaacgagaccggccuggagcugacccugaccaacaccagcaucaucaaccacaaguucugcaaccugagcgacgcccacaagaagaaccuguacaaccacgcccugaugagcaucaucagcaccuuccaccugagcauccccaacuucaaccaguacgaggccaugagcugcgacuucaacggcggcaagaucagcgugcaguacaaccugagccacagcuacgccguggacgccgccaaccacugcggcaccaucgccaacggcgugcugcagaccuucaugagaauggccuggggcggcagcuacaucgcccuggacagcggcaagggcaacugggacugcaucaugaccagcuaccaguaccugaucauccagaacaccaccugggaggaccacugccaguucagcagacccagccccaucggcuaccugggccugcugagccagagaaccagagacaucuacaucagcagaagacugcugggcaccuucaccuggacccugagcgacagcgagggcaacgagacccccggcggcuacugccugaccagauggaugcugaucgaggccgagcugaagugcuucggcaacaccgccguggccaagugcaacgagaagcacgacgaggaguucugcgacaugcugagacuguucgacuucugcaagcaggccaucagaagacugaagaccgaggcccaggccaacauccagcugaucaacaaggccgugaacgcccugaucaacgaccagcugaucaugaagaaccaccugagagacaucaugggcauccccuacugcaacuacagcaaguacugcuaccugaaccacaccgugaccggcaagaccagccugcccagaugcugccuggugagcaacggcagcuaccugaacgagacccacuucagcgacgacaucgagcagcaggccgacaacaugaucaccgagcugcugcagaaggaguacauggacagacagggcaagaccccccugggccugguggaccuguucguguucagcaccagcuucuaccugaucagcaucuuccugcaccuggugaagauccccacccacagacacgugaucggcaagcccugccccaagccccacagacugaaccacaugggcaucugcagcugcggccuguacaagcaccccggcgugcccgugaaguggaagagaugaggacuagucccuguucccagagcccacuuuuuuuucuuuuuuugaaauaaaauagccugucuuucagaucucaaaggcucuuuucagagccaccaaaaaaaaaaaaaaaaaaaaaaaaaaaaaaaaaaaaaaaaaaaaaaaaaaaaaaaaaaaaaaaaagaauu

SEQ ID NO: 40538 - RNA, 1733 nt, Artificial Sequence
  mRNA product Design a-2 (hSL-A64-N5) comprising derived and/or modified sequence from LASV(Nig08-A19;Clade III)__ADU56618__GPCmut12 (opt4)
aggagaguccgcucagccagguugcagaagcggcuuagcguguguccuaaucuucucucugcguguagguaggccugugccgcaaacaagcuuaccaugggccagaucgugaccuucuuccaggaggugccccacgugaucgaggaggugaugaacaucgugcugaucgcccugagcauccuggccauccugaagggccuguacaacaucgccaccugcggccugaucggccuggugaccuuccugcugcugagcggcagaagcugcagcaugaccuacaagggcguguacgagcugcagacccuggagcugaacaugaacacccugaacaugugcaugccccugagcugcaccaagaacaacagccaccacuacaucauggugggcaacgagaccggccuggagcugacccugaccaacaccagccugcugcaccacaaguucugcaaccugagcgacgcccacaagaagaaccuguacgaccacacccugaugagcaucaucagcaccuuccaccugagcauccccaacuucaaccaguacgaggccaugagcugcgacuucaacggcggcaagaucaccgugcaguacaaccugagccacagcuacgccaucgacgccgccaaccacugcggcaccguggccaacggcgugcugcagaccuucaugagaauggccuggggcggcagcuacaucgcccuggacagcggcagaggcaagugggacugcaucaugaccagcuaccaguaccugaucauccagaacaccaccugggaggaccacugccaguucagcagacccagccccaucggcuaccugggccugcugagccagagaaccagagacaucuacaucagcagaagacugcugggcaccuucaccuggacccugagcgacagcgagggcaacgagacccccggcggcuacugccugaccagauggaugcugaucgaggccgagcugaagugcuucggcaacaccgccguggccaagugcaacgagaagcacgacgaggaguucugcgacaugcugagacuguucgacuucugcaagcaggccaucagaagacugaaggccgaggcccagaugagcauccagcugaucaacaaggccgugaacgcccugaucaacgaccagcugaucaugaagaaccaccugagagacaucaugggcauccccuacugcaacuacagcaaguacugcuaccugaaccacaccagcaccggcagaaccagccugcccagaugcugccuggugagcaacggcagcuaccugaacgagacccacuucagcgacgacaucgagcagcaggccgacaacaugaucaccgagaugcugcagaaggaguaccuggacagacagggcaagaccccccugggccugguggaccuguucguguucagcaccagcuucuaccugaucagcaucuuccugcaccuggugaagauccccacccacagacacaucgugggcaagcccugccccaagccccacagacugaaccacaugggcaucugcagcugcggccuguacaagcagcccggcgugcccgugagauggaagagaugaggacuagucccuguucccagagcccacuuuuuuuucuuuuuuugaaauaaaauagccugucuuucagaucucaaaggcucuuuucagagccaccaaaaaaaaaaaaaaaaaaaaaaaaaaaaaaaaaaaaaaaaaaaaaaaaaaaaaaaaaaaaaaaaagaauu

SEQ ID NO: 40539 - RNA, 1736 nt, Artificial Sequence
  mRNA product Design a-2 (hSL-A64-N5) comprising derived and/or modified sequence from LASV(G1180-SLE-2010;Clade IV)__AIT17168__GPCmut12 (opt4)
aggagaguccgcucagccagguugcagaagcggcuuagcguguguccuaaucuucucucugcguguagguaggccugugccgcaaacaagcuuaccaugggccagaucgugaccuucuuccaggaggugccccacgugaucgaggaggugaugaacaucgugcugaucgcccugagcauccuggccgugcugaagggccuguacaacuucgccaccugcggccuggugggccugcugaccuuccugcugcugugcggcagaagcugcaccgccagcagauacaagggcguguacgagcugcagacccuggagcugaacauggagacccugaacaugugcaugccccugagcugcaccaagaacaacagccaccacuacaucauggugggcaacgagaccggccuggagcugacccugaccaacaccagcaucaucaaccacaaguucugcaaccugagcgacgcccacaagaagaaccuguacgaccacgcccugaugagcaucaucagcaccuuccaccugagcauccccaacuucaaccaguacgaggccaugagcugcgacuucaacggcggcaagaucagcgugcaguacaaccugagccacagcuacgccggcgacgccgccaaccacugcggcaccguggccaacggcgugcugcagaccuucaugagaauggccuggggcggcagcuacaucgcccuggacagcggccacggcagcugggacugcaucaugaccagcuaccaguaccugaucauccagaacaccaccugggaggaccacugccaguucagcagacccagccccaucggcuaccugggccugcugagccagagaaccagagacaucuacaucagcagaagacugcugggcaccuucaccuggacccugagcgacagcgagggcaaggacacccccggcggcuacugccugaccagauggaugcugaucgaggccgagcugaagugcuucggcaacaccgccguggccaagugcaacgagaagcacgacgaggaguucugcgacaugcugagacuguucgacuucugcaagcaggccauccagagacugaaggccgaggcccagaugagcauccagcugaucaacaaggccgugaacgcccugaucaacgaccagcugaucaugaagaaccaccugagagacaucaugggcauccccuacugcaacuacagcaaguacugcuaccugaaccacaccaccaccggcaagaccagccugcccaagugcugccuggugagcaacggcagcuaccugaacgagacccacuucagcgacgacaucgagcagcaggccgacaacaugaucaccgagaugcugcagaaggaguacauggagagacagggcaagaccccccugggccugguggaccuguucguguucagcaccagcuucuaccugaucagcaucuuccugcaccuggugaagauccccacccacagacacaucgugggcaagagcugccccaagccccacagacugaaccacaugggcaucugcagcugcggccuguacaagcagcccggcgugcccgugaaguggaagagaugaggacuagucccuguucccagagcccacuuuuuuuucuuuuuuugaaauaaaauagccugucuuucagaucucaaaggcucuuuucagagccaccaaaaaaaaaaaaaaaaaaaaaaaaaaaaaaaaaaaaaaaaaaaaaaaaaaaaaaaaaaaaaaaaagaauu

SEQ ID NO: 40540 - RNA, 1736 nt, Artificial Sequence
  mRNA product Design a-2 (hSL-A64-N5) comprising derived and/or modified sequence from LASV(G1442-SLE-2011;Clade IV)__AIT17180__GPCmut12 (opt4)
aggagaguccgcucagccagguugcagaagcggcuuagcguguguccuaaucuucucucugcguguagguaggccugugccgcaaacaagcuuaccaugggccagaucgugaccuucuuccaggaggugccccacgugaucgaggaggugaugaacaucgugcugaucgcccugagcauccuggccgugcugaagggccuguacaacguggccaccugcggccugaucggccuggugaccuuccugcugcugugcggcagaagcugcaccaccacccuguacaagggcguguacgagcugcagacccuggagcugaacauggagacccugaacaugugcaugccccugagcugcaccaagaacaacagccaccacuacaucagagugggcaacgagaccggccuggagcugacccugaccaacaccagcaucaucaaccacaaguucugcaaccugagcgacgcccacaagaagaaccuguacgaccacgcccugaugagcaucaucagcaccuuccaccugagcauccccaacuucaaccaguacgaggccaugagcugcgacuucaacggcggcaagaucagcgugcaguacaaccugagccacagcuacgccggcgacgccgccaaccacugcggcaccguggccaacggcgugcugcagaccuucaugagaauggccuggggcggcagcuacaucgcccuggacagcggcagaggcaacugggacugcaucaugaccagcuaccaguaccugaucauccagaacaccaccugggacgaccacugccaguucagcagacccagccccaucggcuaccugggccugcugagccagagaaccagagacguguacaucagcagaagacugcugggcaccuucaccuggacccugagcgacagcgagggcaaggacacccccggcggcuacugccugaccagauggaugcugaucgaggccgagcugaagugcuucggcaacaccgccguggccaagugcaacgagaagcacgacgaggaguucugcgacaugcugagacuguucgacuucugcaagcaggccauccagagacugaaggccgaggcccagaugagcauccagcugaucaacaaggccgugaacgcccugaucaacgaccagcugaucaugaagaaccaccugagagacaucaugggcauccccuacugcaacuacagcaaguacugcuaccugaacaacaccgccaccggcaagaccagccugcccaagugcugccugaucagcaacggcagcuaccugaacgagacccacuucagcgacgacaucgagcaggaggccgacaacaugaucaccgagaugcugcagaaggaguacauggagagacagggcaagaccccccugggccugguggaccuguucguguucagcaccagcuucuaccugaucagcaucuuccugcaccuggugaagauccccacccacagacacaucgugggcaagagcugccccaagccccacagacugaaccacaugggcaucugcagcugcggccuguacaagcagcccggcgugcccgugagauggaagagaugaggacuagucccuguucccagagcccacuuuuuuuucuuuuuuugaaauaaaauagccugucuuucagaucucaaaggcucuuuucagagccaccaaaaaaaaaaaaaaaaaaaaaaaaaaaaaaaaaaaaaaaaaaaaaaaaaaaaaaaaaaaaaaaaagaauu

SEQ ID NO: 40541 - RNA, 1736 nt, Artificial Sequence
  mRNA product Design a-2 (hSL-A64-N5) comprising derived and/or modified sequence from LASV(G3010-SLE-2013;Clade IV)__AIT17344__GPCmut12 (opt4)
aggagaguccgcucagccagguugcagaagcggcuuagcguguguccuaaucuucucucugcguguagguaggccugugccgcaaacaagcuuaccaugggccagaucgugaccuucuuccaggaggugccccacgugaucgaggaggugaugaacaucgugcugaucgcccugagcauccuggccgugcugaagggccuguacaacuucgccaccugcggccuggugggccuggugaccuuccugcugcugugcggcagaagcugcaccaccagccuguacaagggcguguacgagcugcagacccuggagcugaacauggagacccugaacaugugcaugccccugagcugcaccaagaacaacagccaccacuacaucauggugggcaacgagaccggccuggagcugacccugaccaacaccagcaucaucaaccacaaguucugcaaccugagcgacgcccacaagaagaaccuguacaaccacgcccugaugagcaucaucagcaccuuccaccugagcauccccaacuucaaccaguacgaggccaugagcugcgacuucaacggcggcaagaucagcgugcaguacaaccugagccacagcuacgccggcgacgccgccagccacugcggcaccguggccaacggcgugcugcagaccuucaugagaauggccuggggcggcagcuacaucgcccuggacagcggcuacggcaagugggacugcaucaugaccagcuaccaguaccugaucauccagaacaccaccugggaggaccacugccaguucagcagacccagccccaucggcuaccugggccugcugagccagagaaccagagacaucuacaucagcagaagacugcugggcaccuucaccuggacccugagcgacagcgagggcaaggacacccccggcggcuacugccugaccagauggaugcugaucgaggccgagcugaagugcuucggcaacaccgccguggccaagugcaacgagaagcacgacgaggaguucugcgacaugcugagacuguucgacuucugcaagcaggccauccagagacugaagaccgaggcccagaugagcauccagcugaucaacaaggccgugaacgcccugaucaacgaccagcugaucaugaagaaccaccugagagacaucaugggcauccccuacugcaacuacagcaaguacugcuaccugaaccacaccaccaccggcaagaccagccugcccaagugcugccuggugagcaacggcagcuaccugaacgagacccacuucagcgacgacaucgagcagcaggccgacaacaugaucaccgagaugcugcagaaggaguacauggagagacagggcaagaccccccugggccugguggaccuguucguguucagcaccagcuucuaccugaucagcaucuuccugcaccuggugaagauccccacccacagacacaucgugggcaagagcugccccaagccccacagacugaaccacaugggcaucugcagcugcggccuguacaagcagcccggcgugcccgugagauggaagagaugaggacuagucccuguucccagagcccacuuuuuuuucuuuuuuugaaauaaaauagccugucuuucagaucucaaaggcucuuuucagagccaccaaaaaaaaaaaaaaaaaaaaaaaaaaaaaaaaaaaaaaaaaaaaaaaaaaaaaaaaaaaaaaaaagaauu

SEQ ID NO: 40542 - RNA, 1736 nt, Artificial Sequence
  mRNA product Design a-2 (hSL-A64-N5) comprising derived and/or modified sequence from LASV(G502-SLE-2009;Clade IV)__AIT17126__GPCmut12 (opt4)
aggagaguccgcucagccagguugcagaagcggcuuagcguguguccuaaucuucucucugcguguagguaggccugugccgcaaacaagcuuaccaugggccagaucgugaccuucuuccaggaggugccccacgugaucgaggaggugaugaacaucgugcugaucgcccugagcauccuggccgugcugaagggccuguacaacuucgccaccugcggccuggugggccugcugaccuuccugcugcugugcggcagaagcugcaccaccggccuguacaagggcguguacgagcugcagacccuggagcugaacauggagacccugaacaugugcaugccccugagcugcaccaagaacaacagccaccacuacaucauggugggcaacgagaccggccuggagcugacccugaccaacaccagcaucaucaaccacaaguucugcaaccugagcgacgcccacaagaagaaccuguacgaccacgcccugaugagcaucaucagcaccuuccaccugagcauccccaacuucaaccaguacgaggccaugagcugcgacuucaacggcggcaagaucagcgugcaguacaaccugagccacagcuacgccggcgacgccgccgaccacugcggcaccguggccaacggcgugcugcagaccuucaugagaauggccuggggcggcagcuacaucgcccuggacagcggcagaggcagaugggacugcaucaugaccagcuaccaguaccugaucauccagaacaccaccugggaggaccacugccaguucagcagacccagccccaucggcuaccugggccugcugagccagagaaccagagacaucuacaucagcagaagacugcugggcaccuucaccuggacccugagcgacagcgagggcaaggacacccccggcggcuacugccugaccagauggaugcugaucgaggccgagcugaagugcuucggcaacaccgccguggccaagugcaacgagaagcacgacgaggaguucugcgacaugcugagacuguucgacuucugcaagcaggccauccagagacugaaggccgaggcccagaugagcauccagcugaucaacaaggccgugaacgcccugaucaacgaccagcuggugaugaagaaccaccugagagacaucaugggcauccccuacugcaacuacagcagauacugcuaccugaaccacaccaccaccggcagaaccagccugcccaagugcugccuggugagcaacggcagcuaccugaacgagacccacuucagcgacgacaucgagcagcaggccgacaacaugaucaccgagaugcugcagaaggaguacauggagagacagggcaagaccccccugggccugguggaccuguucguguucagcaccagcuucuaccugaucagcaucuuccugcaccuggugaagauccccacccacagacacaucgugggcaagagcugccccaagccccacagacugaaccacaugggcaucugcagcugcggccuguacaagcagcccggcgugcccgugaaguggaagagaugaggacuagucccuguucccagagcccacuuuuuuuucuuuuuuugaaauaaaauagccugucuuucagaucucaaaggcucuuuucagagccaccaaaaaaaaaaaaaaaaaaaaaaaaaaaaaaaaaaaaaaaaaaaaaaaaaaaaaaaaaaaaaaaaagaauu

SEQ ID NO: 40543 - RNA, 1736 nt, Artificial Sequence
  mRNA product Design a-2 (hSL-A64-N5) comprising derived and/or modified sequence from LASV(G733-SLE-2010;Clade IV)__AIT17154__GPCmut12 (opt4)
aggagaguccgcucagccagguugcagaagcggcuuagcguguguccuaaucuucucucugcguguagguaggccugugccgcaaacaagcuuaccaugggccagaucgugaccuucuuccaggaggugccccacgugaucgaggaggugaugaacaucgugcugaucgcccugagcauccuggccgugcugaagggccuguacaacuucgccaccugcggcaucgugggccuggugagcuuccugcugcugugcggcagaagcugcaccaccagccuguacaagggcguguacgagcugcagacccuggagcugaacauggagacccugaacaugugcaugccccugagcugcaccaagaacaacagccaccacuacaucauggugggcaacgagaccggccuggagcugacccugaccaacaccagcaucaucaaccacaaguucugcaaccugagcgacgcccacaagaagaaccuguacgaccacgcccugaugagcaucaucagcaccuuccaccugagcauccccaacuucaaccaguacgaggccaugagcugcgacuucaacggcggcaagaucagcgugcaguacaaccugagccacagcuacgccggcgacgccgccaaccacugcggcaccaucgccaacggcgugcugcagaccuucaugagaauggccuggggcggcagcuacaucgcccuggacagcggcagagacagaugggacugcaucaugaccagcuaccaguaccugaucauccagaacaccaccugggaggaccacugccaguucagcagacccagccccaucggcuaccugggccugcugagccagagaaccagagacaucuacaucagcagaagacugcugggcaccuucaccuggacccugagcgacagcgagggcaaggacacccccggcggcuacugccugaccagauggaugcugaucgaggccgagcugaagugcuucggcaacaccgccguggccaagugcaacgagaagcacgacgaggaguucugcgacaugcugagacuguucgacuucugcaagcaggccauccagagacugaaggccgaggcccagaugagcauccagcugaucaacaaggccgugaacgcccugaucaacgaccagcugaucaugaagaaccaccugagagacaucaugggcauccccuacugcaacuacagcaaguacugcuaccugaaccacaccaccaccggcaagaccagccugcccaagugcugccuggugagcaacggcagcuaccugaacgagacccacuucagcgacgacaucgagcagcaggccgacaacaugaucaccgagaugcugcagaaggaguacauggagagacagggcaagaccccccugggccugguggaccuguucguguucagcaccagcuucuaccugaucagcaucuuccugcaccuggugaagauccccacccacagacacguggugggcaagagcugccccaagccccacagacugaaccacaugggcaucugcagcugcggccuguacggccagcccggcgugcccgugaaguggaagagaugaggacuagucccuguucccagagcccacuuuuuuuucuuuuuuugaaauaaaauagccugucuuucagaucucaaaggcucuuuucagagccaccaaaaaaaaaaaaaaaaaaaaaaaaaaaaaaaaaaaaaaaaaaaaaaaaaaaaaaaaaaaaaaaaagaauu

SEQ ID NO: 40544 - RNA, 1736 nt, Artificial Sequence
  mRNA product Design a-2 (hSL-A64-N5) comprising derived and/or modified sequence from MOPV/LASV reassortant(IGS-1;Clade IV)__AFY05576__GPCmut12 (opt4)
aggagaguccgcucagccagguugcagaagcggcuuagcguguguccuaaucuucucucugcguguagguaggccugugccgcaaacaagcuuaccaugggccagaucgugaccuucuuccaggaggugccccacgugaucgaggaggugaugaacaucgugcugaucgcccugagcgugcuggccgugcugaagggccuguacaacuucgccaccugcggccuggugggccuggugaccuuccugcugcugugcggcagaagcugcaccaccagccuguacaagggcguguacgagcugcagacccuggagcugaacauggagacccugaacaugugcaugccccugagcugcaccaagaacaacagccaccacuacaucauggugggcaacgagaccggccuggagcugacccugaccaacaccagcaucaucaaccacaaguucugcaaccugagcgacgcccacaagaagaaccuguacgaccacgcccugaugagcaucaucagcaccuuccaccugagcauccccaacuucaaccaguacgaggccaugagcugcgacuucaacggcggcaagaucagcgugcaguacaaccugagccacagcuacgccggcgacgccgccaaccacugcggcaccguggccaacggcgugcugcagaccuucaugagaauggccuggggcggcagcuacaucgcccuggacagcggcagaggcaacugggacugcaucaugaccagcuaccaguaccugaucauccagaacaccaccugggaggaccacugccaguucagcagacccagccccaucggcuaccugggccugcugagccagagaaccagagacaucuacaucagcagaagacugcugggcaccuucaccuggacccugagcgacagcgagggcgaggacacccccggcggcuacugccugaccagauggaugcugaucgaggccgagcugaagugcuucggcaacaccgccguggccaagugcaacgagaagcacgacgaggaguucugcgacaugcugagacuguucgacuucugcaagcaggccauccagagacugaaggccgaggcccagaugagcauccagcugaucaacaaggccgugaacgcccugaucaacgaccagcugaucaugaagaaccaccugagagacaucaugggcauccccuacugcaacuacagcaaguacugcuaccugaaccacaccaccaccggcagaaccagccugcccaagugcugccuggugagcaacggcagcuaccugaacgagacccacuucagcgacgacaucgagcagcaggccgacaacaugaucaccgagaugcugcagaaggaguacauggagagacagggcaagaccccccugggccugguggaccuguucguguucagcaccagcuucuaccugaucagcaucuuccugcaccuggugaagauccccacccacagacacaucgugggcaagagcugccccaagccccacagacugaaccacaugggcaucugcagcugcggccuguacaagcagcccggcgugcccgugaaguggaagagaugaggacuagucccuguucccagagcccacuuuuuuuucuuuuuuugaaauaaaauagccugucuuucagaucucaaaggcucuuuucagagccaccaaaaaaaaaaaaaaaaaaaaaaaaaaaaaaaaaaaaaaaaaaaaaaaaaaaaaaaaaaaaaaaaagaauu

SEQ ID NO: 40545 - RNA, 1736 nt, Artificial Sequence
  mRNA product Design a-2 (hSL-A64-N5) comprising derived and/or modified sequence from LASV(LM765-SLE-2012;Clade IV)__AIT17814__GPCmut12 (opt4)
aggagaguccgcucagccagguugcagaagcggcuuagcguguguccuaaucuucucucugcguguagguaggccugugccgcaaacaagcuuaccaugggccagaucgugaccuucuuccaggaggugccccacgugaucgaggaggugaugaacaucgugcugaucgcccugagcauccuggccgugcugaagggccuguacaacuucgccaccugcggccuggugggccuggugaccuuccugcugcugugcggcagaagcugcaccaccagccuguacaagggcguguacgagcugcagacccuggagcugaacauggagacccugaacaugugcaugccccugagcugcaccaagaacaacagccaccacuacaucauggugggcaacgagaccggccuggagcugacccugaccaacaccagcaucaucgaccacaaguucugcaaccugagcgacgcccacagaaagaaccuguacgaccacgcccugaugagcaucaucagcaccuuccaccugagcauccccaacuucaaccaguacgaggccaugagcugcgacuucaacggcggcaagaucagcgugcaguacaaccugagccacagcuacgccaaggacgccgccgaccacugcggcaccguggccaacggcgugcugcagaccuucaugagaauggccuggggcggcagcuacaucgcccuggacagcggcagaggcagaugggacugcaucaugaccagcuaccaguaccugaucauccagaacaccaccugggaggaccacugccaguucagcagacccagccccaucggcuaccugggccugcugagccagagaaccagagacaucuacaucagcagaagacugcugggcaccuucaccuggacccugagcgacagcgagggcaaggacacccccggcggcuacugccugaccagauggaugcugaucgaggccgagcugaagugcuucggcaacaccgccguggccaagugcaacgagaagcacgacgaggaguucugcgacaugcugagacuguucgacuucugcaagcaggccauccagagacugaaggccgaggcccagaugagcauccagcugaucaacaaggccgugaacgcccugaucaacgaccagcugaucaugaagaaccaccugagagacaucaugggcauccccuacugcaacuacagcaaguacugcuaccugaaccacaccaccaccggcaagaccagccugcccaagugcugccuggugagcaacggcagcuaccugaacgagacccacuucagcgacgacaucgagcagcaggccgacaacaugaucaccgagaugcugcagaaggaguacauggagagacagggcaagaccccccugggccugguggaccuguucguguucagcaccagcuucuaccugaucagcaucuuccugcaccuggugaagauccccacccacagacacaucgugggcaagcccugccccaagccccacagacugaaccacaugggcaucugcagcugcggccuguacaagcagcccggcgugcccgugaaguggaagagaugaggacuagucccuguucccagagcccacuuuuuuuucuuuuuuugaaauaaaauagccugucuuucagaucucaaaggcucuuuucagagccaccaaaaaaaaaaaaaaaaaaaaaaaaaaaaaaaaaaaaaaaaaaaaaaaaaaaaaaaaaaaaaaaaagaauu

SEQ ID NO: 40546 - RNA, 1736 nt, Artificial Sequence
  mRNA product Design a-2 (hSL-A64-N5) comprising derived and/or modified sequence from LASV(LM776-SLE-2012;Clade IV)__AIT17824__GPCmut12 (opt4)
aggagaguccgcucagccagguugcagaagcggcuuagcguguguccuaaucuucucucugcguguagguaggccugugccgcaaacaagcuuaccaugggccagaucgugaccuucuuccaggaggugccccacgugaucgaggaggugaugaacaucgugcugaucgcccugagcauccuggccgugcugaagggccuguacaacuucgccaccugcggccuggugggccuggugaccuuccugcugcugugcggcagaagcugcaccaccagcguguacaagggcguguacgagcugcagacccuggagcugaacauggagacccugaacaugugcaugccccugagcugcaccaagaacaacagccaccacuacaucauggugggcaacgagaccggccuggagcugacccugaccaacaccagcaucaucaaccacaaguucugcaaccugagcgacgcccacaagaagaaccuguacgaccacgcccugaugagcaucaucagcaccuuccaccugagcauccccaacuucaaccaguacgaggccaugagcugcgacuucaacggcggcaagaucagcgugcaguacaaccugagccacagcuacgccggcgacgccgccaaccacugcggcaccguggccaacggcgugcugcagaccuucaugagaauggccuggggcggcagcuacaucgcccuggacagcggccacggcaagugggacugcaucaugaccagcuaccaguaccugaucauccagaacaccaccugggaggaccacugccaguucagcagacccagccccaucggcuaccugggccugcugagccagagaaccagagacaucuacaucagcagaagacugcugggcaccuucaccuggacccugagcgacagcgagggcaaggacacccccggcggcuacugccugaccagauggaugcugaucgaggccgagcugaagugcuucggcaacaccgccguggccaagugcaacgagaagcacgacgaggaguucugcgacaugcugagacuguucgacuucugcaagcaggccauccagagacugaaggccgaggcccagaugagcauccagcugaucaacaaggccgugaacgcccugaucaacgaccagcugaucaugaagaaccaccugagagacaucaugggcauccccuacugcaacuacagcaaguacugcuaccugaaccacaccaccaccggcaagaccagccugcccaagugcugccuggugagcaacggcagcuaccugaacgagacccacuucagcgacgacaucgagcagcaggccgacaacaugaucaccgagaugcugcagaaggaguacauggagagacagggcaagaccccccugggccugguggaccuguucguguucagcaccagcuucuaccugaucagcaucuuccugcaccuggugaagauccccacccacagacacaucgugggcaagagcugccccaagccccacagacugaaccacaugggcaucugcagcugcggccuguacaagcagcccggcgugcccgugagauggaagagaugaggacuagucccuguucccagagcccacuuuuuuuucuuuuuuugaaauaaaauagccugucuuucagaucucaaaggcucuuuucagagccaccaaaaaaaaaaaaaaaaaaaaaaaaaaaaaaaaaaaaaaaaaaaaaaaaaaaaaaaaaaaaaaaaagaauu

SEQ ID NO: 40547 - RNA, 1736 nt, Artificial Sequence
  mRNA product Design a-2 (hSL-A64-N5) comprising derived and/or modified sequence from LASV(Mad39;Clade IV)__ANH09722__GPCmut12 (opt4)
aggagaguccgcucagccagguugcagaagcggcuuagcguguguccuaaucuucucucugcguguagguaggccugugccgcaaacaagcuuaccaugggccagaucgugaccuucuuccaggaggugccccacgugaucgaggaggugaugaacaucgugcugaucgcccugagcauccuggccgugcugaagggccuguacaacguggccaccugcggccugaucggccuggugaccuuccugcugcugugcggcagaagcugcaccaccacccuguacaagggcguguacgagcugcaggcccuggagcugaacauggagacccugaacaugugcaugccccugagcugcaccaagaacaacagccaccacuacaucagagugggcaacgagaccggccuggagcugacccugaccaacaccagccugaucaaccacaaguucugcaaccugagcgacgcccacaagaagaaccuguacgaccacgcccugaugagcaucaucagcaccuuccaccugagcauccccaacuucaaccaguacgaggccaugagcugcgacuucaacgacggcaagaucagcgugcaguacaaccugagccacaccuacgccggcgacaccgccaaccacugcggcaccguggccaacggcgugcugcagaccuucaugagaauggccuggggcggcagcuacaucgcccuggacagcggcagaggcggcugggacugcaucaugaccagcuaccaguaccugaucauccagaacaccaccugggaggaccacugccaguucagcagacccagccccaucggcuaccugggccugcugagccagagaaccagagacaucuacaucagcagaagacugcugggcaccuucaccuggacccugagcgacagcgagggcaaggacacccccggcggcuacugccugaccagauggaugcugaucgaggccgagcugaagugcuucggcaacaccgccguggccaagugcaacgagaagcacgacgaggaguucugcgacaugcugagacuguucgacuucugcaagcaggccauccagagacugaaggccgaggcccagaugagcauccagcugaucaacaaggccgugaacgcccugaucaacgaccagcugaucaugaagaaccaccugagagacaucaugggcauccccuacugcaacuacagcaaguacugcuaccugaaccacaccgugaccggcaagaccagccugcccaagugcugccuggugagcaacggcagcuaccugaacgagacccacuucagcgacgacaucgagcagcaggccgacaacaugaucaccgagaugcugcagaaggaguacauggagagacagggcaagaccccccugggccugguggaccuguucguguucagcaccagcuucuaccugaucagcaucuuccugcaccuggugaagauccccacccacagacacguggugggcaagcccugccccaagccccacagacugaaccacaugggcaucugcagcugcggcuucuacaagcagcccggcgugcccgugagauggaagagaugaggacuagucccuguucccagagcccacuuuuuuuucuuuuuuugaaauaaaauagccugucuuucagaucucaaaggcucuuuucagagccaccaaaaaaaaaaaaaaaaaaaaaaaaaaaaaaaaaaaaaaaaaaaaaaaaaaaaaaaaaaaaaaaaagaauu

SEQ ID NO: 40548 - RNA, 1736 nt, Artificial Sequence
  mRNA product Design a-2 (hSL-A64-N5) comprising derived and/or modified sequence from LASV(Z0947-SLE-2011;Clade IV)__AIT17840__GPCmut12 (opt4)
aggagaguccgcucagccagguugcagaagcggcuuagcguguguccuaaucuucucucugcguguagguaggccugugccgcaaacaagcuuaccaugggccagaucgugaccuucuuccaggaggugccccacgugaucgaggaggugaugaacaucgugcugaucgcccugagcauccuggccgugcugaagggccuguacaacuucgccaccugcggccuggugggccuggugaccuuccugcugcugugcggcagaagcugcaccaucagccuguacaagggcguguacgagcugcagacccuggagcugaacauggagacccugaacaugugcaugccccugagcugcaccaagaacaacagccaccacuacaucauggugggcaacgagaccggccuggagcugacccugaccaacaccagcaucaucaaccacaaguucugcaaccugagcgacgcccacaagaagaaccuguacgaccacgcccugaugagcaucaucagcaccuuccaccugagcauccccaacuucaaccaguacgaggccaugagcugcgacuucaacggcggcaagaucagcgugcaguacaaccugagccacagcuacgccggcgacgccgccaaccacugcggcaccguggccaacggcgugcugcagaccuucaugagaauggccuggggcggcagcuacaucgcccuggacagcggcagagacagaugggacugcaucaugaccagcuaccaguaccugaucauccagaacaccaccugggaggaccacugccaguucagcagacccagccccaucggcuaccugggccugcugagccagagaaccagagacaucuacaucagcagaagacugcugggcaccuucaccuggacccugagcgacagcgagggcaaggacacccccggcggcuacugccugaccagauggaugcugaucgaggccgagcugaagugcuucggcaacaccgccguggccaagugcaacgagaagcacgacgaggaguucugcgacaugcugagacuguucgacuucugcaagcaggccauccagagacugaaggccgaggcccagaugagcauccagcugaucaacaaggccgugaacgcccugaucaacgaccagcugaucaugaagaaccaccugagagacaucaugggcauccccuacugcaacuacagcaaguacugcuaccugaaccacaccaccaccggcaagaccagccugcccaagugcugccuggugagcaacggcagcuaccugaacgagacccacuucagcgacgacaucgagcagcaggccgacaacaugaucaccgagaugcugcagaaggaguacauggagagacagggcaagaccccccugggccugguggaccuguucguguucagcaccagcuucuaccugaucagcaucuuccugcaccuggugaagauccccacccacagacacaucgugggcaagcccugccccaagccccacagacugaaccacaugggcaucugcagcugcggccuguacaagcagcccggcgugcccgugaaguggaagagaugaggacuagucccuguucccagagcccacuuuuuuuucuuuuuuugaaauaaaauagccugucuuucagaucucaaaggcucuuuucagagccaccaaaaaaaaaaaaaaaaaaaaaaaaaaaaaaaaaaaaaaaaaaaaaaaaaaaaaaaaaaaaaaaaagaauu

SEQ ID NO: 40549 - RNA, 1736 nt, Artificial Sequence
  mRNA product Design a-2 (hSL-A64-N5) comprising derived and/or modified sequence from LASV(Josiah;Clade IV)__NP_694870__GPCmut12 (opt5)
aggagaguccgcucagccagguugcagaagcggcuuagcguguguccuaaucuucucucugcguguagguaggccugugccgcaaacaagcuuaccaugggccagaucgugaccuucuuucaagaggucccccacguuauugaagaggugaugaacaucgugcugauugcccucagcguccuggcugugcuuaaggggcuguacaauuucgccacaugcggacucguuggccuggugacguuucuucugcucugugggagauccugcaccacaucucuguauaaaggagucuacgaacugcagacccucgagcugaacauggaaacacuuaauauguguaugccucugagcugcaccaagaacaauucccaucacuauaucauggugggcaacgagacagggcucgagcugacccuuacgaauaccucuauuaucaaccauaaauucuguaaucugagcgacgcgcacaagaaaaaccucuacgaucaugcucugauguccaucauuucuacauuucaccugagcaucccgaauuucaaccaguaugaagccauguccugcgacuuuaauggaggcaagauuagcguucaguacaaccucucucacuccuaugccggcgaugcugccaaucauugugggaccguggcuaacggaguccugcaaacauucaugcggauggccuggggcgggagcuacaucgcgcuugacucuggacgcggcaacugggauugcauuaugaccuccuaccaguaucugaucauucagaauacgacaugggaggaccacugucaguuuagcagacccucuccuaucggguaccucggacugcuuucccaacggacccgcgauaucuauauuagcagacggcugcucggcacauucaccuggacccuguccgacucugaaggcaaggauacacccgggggauacugccugacgcgcuggaugcucaucgaggccgagcugaaauguuuuggcaacaccgcuguggccaagugcaaugaaaaacaugacgaggaguucugcgauaugcuuagacuguuugacuucuguaagcaggcuauucagcggcucaaagccgaagcgcagaugagcauccaacugauuaacaaggccgugaaugcucuuaucaacgaucagcugaucaugaagaaucaccuccgcgacauuauggggaucccuuauugcaacuacuccaaauauuguuaccugaaucacacaaccacaggaagaaccagccugcccaagugcugucucgucucuaacggcuccuaccugaaugaaacgcauuucagcgacgauauugagcagcaagccgacaacaugaucacagagaugcuucagaaagaauauauggagcggcaggggaagaccccucugggacucguugaucuguuuguguucucuaccagcuuuuaccugauuuccaucuuccuucaccucgugaaaaucccgacacaucgccacauugucggcaagucuugccccaaaccucauagacugaaucacaugggcaucuguagcugcgggcuguauaagcagcccggagugccuguuaaguggaaacggugaggacuagucccuguucccagagcccacuuuuuuuucuuuuuuugaaauaaaauagccugucuuucagaucucaaaggcucuuuucagagccaccaaaaaaaaaaaaaaaaaaaaaaaaaaaaaaaaaaaaaaaaaaaaaaaaaaaaaaaaaaaaaaaaagaauu

SEQ ID NO: 40550 - RNA, 1733 nt, Artificial Sequence
  mRNA product Design a-2 (hSL-A64-N5) comprising derived and/or modified sequence from LASV(LP;Clade I)__AAF86701__GPCmut12 (opt5)
aggagaguccgcucagccagguugcagaagcggcuuagcguguguccuaaucuucucucugcguguagguaggccugugccgcaaacaagcuuaccaugggccagaucauuaccuucuuucaagaggugccccacgucaucgaagagguuaugaacauugugcugaucgcccucagccugcuugcuauucugaaggggcucuacaauaucgccacaugcggaaucauuggccugguggcguuccuuuuucugugugggaaauccugcucucucacgcugaagggaggcuaugaacugcagacccucgagcugaacauggaaacacuuaauauguguaugccucugagcugcaccaaaaacuccucucaucacuacaucagagucgggaaugagacaggacucgagcugacccuuacaaacaccagcauuaucaaucauaaguucuguaaccuguccgacgcucacaaaaagaaucucuaugaucaugcccugaugucuauuaucagcacguuucaccuguccauuccgaacuucaaucaguacgaagccaugagcugcgacuuuaacggcggcaagaucucugugcaguauaaucucucccacagcuacgcuggggaugccgcugagcauuguggaaccguugccaacggcgugcugcaaacauucaugcggauggcguggggagggcgcuauaucgcccuugacucuggcaaagggaauugggauugcauuaugaccuccuaccaguaccugaucauucagaacacaaccugggaagaccacugucaguuuagcagacccucuccuaucggauaucucggccugcuuucccaacggacgcgcgauauuuacaucagcagacggcugcucggcacauucaccuggacacuguccgacucugaggggaacgagacccccggaggcuauugccugacccgcuggaugcucaucgaagcugagcugaaguguuuugggaauacagccgucgcuaaaugcaacgaaaagcaugaugaggaguucugcgacaugcuuagacuguuugauuucuguaaacaggccauucggcgccucaaggcggaagcccagaugagcauccagcugauuaauaaggcugugaacgcccuuaucaaugaccaacugauuaugaaaaaccaccucagagauaucaugggaaucccuuacugcaauuauuccaaguacuguuaucugaaccacacgagcucuggccggaccucccugcccaaaugcugucucauuagcaaugggucuuaccugaacgagacacaguucagcgacgacaucgaacagcaagcugauaauaugauuaccgagaugcuucagaaggaauacaucgagcgccagggaaaaacaccucugggccucguugacauuuuuaucuucuccaccucuuuuuaucugauuagcaucuuccugcaucuuaucaagauuccgacgcacagacauaucgugggcaaacccugcccuaagccccaccggcucaaccauaugggggucuguuccugcggacuguacaagcacccuggcgugcccacaaaauggaagcgcugaggacuagucccuguucccagagcccacuuuuuuuucuuuuuuugaaauaaaauagccugucuuucagaucucaaaggcucuuuucagagccaccaaaaaaaaaaaaaaaaaaaaaaaaaaaaaaaaaaaaaaaaaaaaaaaaaaaaaaaaaaaaaaaaagaauu

SEQ ID NO: 40551 - RNA, 1733 nt, Artificial Sequence
  mRNA product Design a-2 (hSL-A64-N5) comprising derived and/or modified sequence from LASV(803213;Clade II)__AAF86703__GPCmut12 (opt5)
aggagaguccgcucagccagguugcagaagcggcuuagcguguguccuaaucuucucucugcguguagguaggccugugccgcaaacaagcuuaccaugggccagaucauuaccuucuuucaagaggugccccacgucaucgaagagguuaugaacauugugcugaucgcccucagccugcuugcuauucugaaggggaucuacaauguggccacaugcggacucuucggccugaucuccuuucuucugcucugugggagaucuugcagcgucacguauaaaggaguguacgaacugcagacccuggagcucaacauggcgaaucugaacauguguaugccucuuuccugcacaaagaauaacucucaucacuauauuaugguuggcaaugaaaccgggcuggagcucacacugaccaacacaagcaucauuaaucauaaauucuguaaccuuuccgacgcucacaagaaaaaucuguacgaucaugcccucaugucuaucauuagcaccuuucaccuguccaucccgaacuucaaucaguaugaggccaugagcugcgacuuuaacggaggcaagauuucugugcaguacaaucugucccacagcuucgcugucgaugccgcuaaccauuguggcacgaucgccaacggggugcuccaaaccuuuaugcggauggcguggggaggcucuuauaucgcccuggacuccgggaagggaaauugggauugcauuaugacaagcuaccaguaccuuaucauucagaacaccacaugggaagaccacugucaguucucucgccccuccccuaucggcuaucuggggcuccugagccaaagaacccgggauauuuacaucucccgcagacuucugggaacguuuacauggacccucucugacagcgagggcaaugaagcucccggcggguauugccugacacgguggaugcugaucgaggccgagcucaaauguuucggaaacaccgcuguugccaagugcaaugaaaaacaugaugaggaauuuugcgacaugcugcgccuuuucgauuucuguaagcaggcgauuaaaagacugaagaccgaggcccagauguccauccagcucauuaacaaggcugugaaugcccugaucaacgaccaacuuauuaugaaaaaucaucugcgggauaucaugggcaucccuuacugcaacuauagccgcuacuguuaucucaaucacacagucacggggaagaccucucugcccagaugcugucugguguccaacggaagcuaccucaaugaaacacacuuuucugacgacauugagcagcaggcugauaacaugaucaccgagaugcugcaaaaagaauacauggaccggcagggcaagacaccucuugggcugguggaucucuucgucuuuagcaccuccuucuaucugauuucuaucuuucugcaccuuguuaaaauuccgacgcaucgccacaucgugggaaagcccugcccuaaaccccauagacucaaucacaugggcauuuguagcugcggccuguacaagcacccuggggugcccgucaaguggaaacggugaggacuagucccuguucccagagcccacuuuuuuuucuuuuuuugaaauaaaauagccugucuuucagaucucaaaggcucuuuucagagccaccaaaaaaaaaaaaaaaaaaaaaaaaaaaaaaaaaaaaaaaaaaaaaaaaaaaaaaaaaaaaaaaaagaauu

SEQ ID NO: 40552 - RNA, 1733 nt, Artificial Sequence
  mRNA product Design a-2 (hSL-A64-N5) comprising derived and/or modified sequence from LASV(GA391;Clade III)__CAA36645__GPCmut12 (opt5)
aggagaguccgcucagccagguugcagaagcggcuuagcguguguccuaaucuucucucugcguguagguaggccugugccgcaaacaagcuuaccaugggccagaucgugaccuucuuucaagaggucccccacguuauugaagaggugaugaacaucgugcugauugcccucagcauccuggcuauucuuaaggggcuguacaaugucgccacaugcggacucaucggccuggugacguuccuucugcucuccgggagaucuuguagccugaucuauaaaggaaccuacgaacugcagacacucgagcugaacauggaaacccuuaauaugugcaugccucuguccuguacaaagaacaauucucaucacuauauucggguuggcaacgagaccgggcucgagcugacacuuaccaauacgagcauccugaaccauaaauuuugcaaucucuccgacgcgcacaagcgcaaccuguacgaucauucucugaugagcauuaucuccaccuuccaccucagcauuccgaauuuuaaccaguaugaagcuaugucuugugacuucaauggaggcaaaaucacagugcaguacaaccugucccacagcuuugccgucgaugccgcuggccauugcgggacccuugccaauggagugcugcaaacauucaugagaauggcuuggggcgggucuuauauugcccucgacuccggacggggcaacugggauuguaucaugaccagcuaccaguaccugaucauucagaacacgacaugggacgaucacugccaguuuucucgccccuccccuaucggguaucuuggacugcucagccaaagaacccgggacauuuacaucucccgcagacugcugggcacauucaccuggacccucucugauagcgagggcaaugaaacacccgggggauauugucugacgcgguggaugcuuauugaggcggagcugaagugcuuuggcaacaccgccguugcuaaguguaaugaaaaacaugacgaggaguucugcgauaugcuccgccuguuugacuucugcaagcaggccaucagacggcuuaaaacagaagcucagauguccauccagcugauuaacaaggccgugaaugcgcucaucaacgaucaacugauuaugaaaaaucaucugcgcgacaucauggggauuccuuacuguaacuauagcagauacugcuaucucaaucacaccucuacaggaaagaccucccugccccgguguugccuuaucagcaacggcucuuaccugaaugaaacgaaguucagcgacgauaucgagcagcaggccgacaacaugauuacagagaugcuccaaaaagaauacaucgaucgccaggggaagaccccucugggacuggucgaccuuuuuguguucuccaccucuuuuuaucucauuagcaucuuccugcaccuggugaaaauuccgacacacagacauaucgucggcaagcccuguccuaaaccccaccggcucaaucauaugggcauuugcuccugugggcuguacaagcagccuggaguucccgugagauggaaacgcugaggacuagucccuguucccagagcccacuuuuuuuucuuuuuuugaaauaaaauagccugucuuucagaucucaaaggcucuuuucagagccaccaaaaaaaaaaaaaaaaaaaaaaaaaaaaaaaaaaaaaaaaaaaaaaaaaaaaaaaaaaaaaaaaagaauu

SEQ ID NO: 40553 - RNA, 1736 nt, Artificial Sequence
  mRNA product Design a-2 (hSL-A64-N5) comprising derived and/or modified sequence from LASV(AV;Clade V)__CCA30314__GPCmut12 (opt5)
aggagaguccgcucagccagguugcagaagcggcuuagcguguguccuaaucuucucucugcguguagguaggccugugccgcaaacaagcuuaccaugggccagaucgugaccuucuuucaagaggucccccacguuauugaagaggugaugaacaucgugcugauugcccucagcauccuggcuguccuuaaggggcuguacaauauugccacaugcggacucaucggccugaucacguuccuucugcucugugggagauccugcucuagcaaccuguauaaaggaguguacgaacugcagucccucgaccugaauauggagacccuuaacauguguaugccucugucuugcacaaagaauaacagccaucacuauauucggguuggcaaugauaccgggcucgaacugacacuuaccaacacauccauccugaaucauaaauuuuguaaccucucugacgcgcacaagaaagaucuguacgaccaugcucugaugagcauuaucuccaccuuccaccucagcauuccgaauuuuaaccaguaugaggccaugucuugcgauuucaauggaggcaagaucuccgugcaguacaaccugagccacucuuaugccauugacgcugccaaucauuguggcacggucgcuaacgggauccuucaaaccuuuaugcgcauggccuggggaggcuccuacaucgcgcuggauagcgggagaggaaacugggacugcauuaugacaucuuaccaguaucucaucauucagaauaccacaugggagaaccacugucaguucucccggcccagcccuaucggcuaccuggggcuucugucccaacgcaccagagauauuuauaucucucggcgccuccugggaacguuuacauggacccugagcgacuccgaaggcaaugccacacccggcggguacugccucaccagauggaugcugaucgaggcugaacuuaaguguuucggaaacaccgccguggcuaaaugcaaugagaagcaugaugaggaauuuugcgacaugcugcgccucuucgauuuuuguaaacaggccauuagccggcugaagucugaggcgcagauguccauccagcuuauuaacaaagccguuaaugcucugaucaacgaccaacucauuaugaagaaucaccugagagacaucaugggcaucccuuauugcaacuacagcaaguauuguuaccugaaucacacaauuacggggaaaaccucucuccccaagugcugucuggugagcaacggauccuaccuuaaugaaacacauuucucugaugacaucgagcagcaggccgauaacaugauuaccgaaaugcugcaaaaagaguauauggagcggcagggcaagacaccucucgggcuggucgaccuguucguguuuagcaccuccuucuaccuuaucagcauuuuucuccgccuggugaaaaucccgacgcacagacauauugucggaaagcccugcccuaaaccccaccggcugaaucauaugggcaucuguucuugcggccucuauaagcagccugggguucccgugcgcuggaagagaugaggacuagucccuguucccagagcccacuuuuuuuucuuuuuuugaaauaaaauagccugucuuucagaucucaaaggcucuuuucagagccaccaaaaaaaaaaaaaaaaaaaaaaaaaaaaaaaaaaaaaaaaaaaaaaaaaaaaaaaaaaaaaaaaagaauu

SEQ ID NO: 40554 - RNA, 1733 nt, Artificial Sequence
  mRNA product Design a-2 (hSL-A64-N5) comprising derived and/or modified sequence from LASV(Togo/2016/7082;Clade VI)__AMR44577__GPCmut12 (opt5)
aggagaguccgcucagccagguugcagaagcggcuuagcguguguccuaaucuucucucugcguguagguaggccugugccgcaaacaagcuuaccaugggccagaucauuaccuucuuucaagaggugccccacgucaucgaagagguuaugaacauugugcugaucgcccucagccugcuugcuauucugaaggggguguacaaugucgccacaugcggaaucaucggccucgugacguuccuguuucuuugugggagauccugcucucugauuuauaaaggaagcuacgaacuccagacccuggagcugaacauggaaacacucaauauguguaugccucuguccugcaccaagaacucuagccaucacuauauccggguuggcaaugagacagggcuugagcugacccucacaaacaccuccauuaucaaucauaaauucuguaaccugucugacgcgcacaagcgcaaucuuuacgaucaugcucugaugagcauucucuccacguuucaccugagcaucccgaacuucaaucaguaugaagccaugucuugcgacuuuaacggaggcaaaauuuccgugcaguacaaucugagccacgccuaugcugucgaugccgcugagcauuguggcaccguggccaacgggguucuccaaacauucaugagaauggcguggggaggcucuuacaucgcccuggacuccgggcggggaaauugggauugcaucaugaccagcuaccaguaucuuauuauccagaacacaaccugggaagaccacugucaguuuucucgccccuccccuauuggcuaccuggggcuccugagccaaagaacgcgggauaucuauauuucccgcagacuucugggaacauucaccuggacacucucugacagcgagggcaacgagacccccggcggguacugccugacccgguggaugcugaucgaagcugagcucaaguguuuuggaaauacagccguggcuaagugcaacgaaaaacaugaugaggaguucugcgacaugcugcgccuuuuugauuucuguaagcaggccauccagagacugaaauccgaagcgcagaugagcauucaacucaucaauaaggccgucaacgcucugauuaaugaccagcuuaucaugaaaaaccaucugcgggauaugaugggcauuccuuauugcaauuacucuaaguauuguuaccucaaccacacguccagcgggcgcaccucucugcccaagugcugucuggugagcaauggauccuaccucaacgagacacacuucucugacgacaucgaacagcaagccgauaauaugaucaccgagaugcugcagaaagaauauauugacagacagggcaagacaccucuugggcugguggaucucuuugucuucagcaccuccuuuuaccugaucagcauuuuccugcaccuuaucaaaauuccgacgcaucggcacaucguuggaaagcccugcccuaaaccccaucgccucaaccacaugggcauuuguucuugcggccuguauaagcagccuggggugcccacaagauggaaacggugaggacuagucccuguucccagagcccacuuuuuuuucuuuuuuugaaauaaaauagccugucuuucagaucucaaaggcucuuuucagagccaccaaaaaaaaaaaaaaaaaaaaaaaaaaaaaaaaaaaaaaaaaaaaaaaaaaaaaaaaaaaaaaaaagaauu

SEQ ID NO: 40555 - RNA, 1733 nt, Artificial Sequence
  mRNA product Design a-2 (hSL-A64-N5) comprising derived and/or modified sequence from LASV(KAK-428;Clade n.d. (VII))__ANH09740__GPCmut12 (opt5)
aggagaguccgcucagccagguugcagaagcggcuuagcguguguccuaaucuucucucugcguguagguaggccugugccgcaaacaagcuuaccaugggccagaucgugaccuucuuucaagaggucccccacguuauugaagaggugaugaacaucgugcugauugcccucagccugcuugcuauccugaaggggcucuacaauuucgccacaugcggagucauuggccugaucacguuucuucugcucugugggagauccugcucugcgaccuauaaaggacaguacgaacugcagacacuggagcucaacauggaaagccugaauauguguaugccucuuuccugcaccaagaacaauucucaucacuauauccgggcuggcaacaauacagggcuggagcucacccugacaaacaccagcauuaucucccauaaauucuguaaucuuucugacgcccacaagaaaaaccuguacgaucauacgcucaugagcauuaucaccacauuucaccuguccauuccgaauuucaaccaguaugaggccaugagcugcgacuuuaauggaggcaagaucucuauucaauacaaccugucccacagcuaugcuggcgaugccgcucagcauugugggaccguggccaauggaguucuccagacauucaugcgcauggcguggggcgggucuuaccuggcccuugacuccggaagacggggcugggauugcaucaucagcucuuaccaguaucugauuauccaaaacaccacgugggacgaucacugucaguuuucccgccccagcccuauuggguaccucggauucgugucccagaagacaagagacaucuauauuucucggcgccugcuuggcaccuuuacauggacccugagcgauuccgaaggccaugacaugcccgggggauacugccucaccagauggaugcugaucgaggcugaucugaaauguuucggcaacacagccgucgcuaagugcaaugaaaaacacgacgaggaguuuugcgauauguggcgccucuucgacuucuguaagcaggccauccaacggcugaaagcggaagcccagaugaacauucagcuuaucaauaaggcugugaacgcccugauuaaugaccaacucaugaugaagaaccaccugagagauaucauggggauuccuuauugcaauuacagcaaauuuuguuaucuuaacaauacgaccacaggacggaccucucugccccgcugcugucucaucuccaacggcagcuaccugaaugagacacauuucucugacgauaucgaacagcaggcugacaacaugauuaccgagaugcugcagaaggaauacauggauagacaagggaaaacgccucucggacugguugaccuuuuuguguucagcacauccuuuuaucugaucaccauuuuccuccaccuggucaagaucccgacccaucggcacauugugggcaaacccugcccuaagccccaucgccugaaucacaugggcaucuguucuugcgggcuuuacaaacagccuggagugcccgucagauggaagcggugaggacuagucccuguucccagagcccacuuuuuuuucuuuuuuugaaauaaaauagccugucuuucagaucucaaaggcucuuuucagagccaccaaaaaaaaaaaaaaaaaaaaaaaaaaaaaaaaaaaaaaaaaaaaaaaaaaaaaaaaaaaaaaaaagaauu

SEQ ID NO: 40556 - RNA, 1733 nt, Artificial Sequence; identical to SEQ ID NO: 40550
  mRNA product Design a-2 (hSL-A64-N5) comprising derived and/or modified sequence from LASV(Pinneo-NIG-1969;Clade I)__AIT17836__GPCmut12 (opt5)

SEQ ID NO: 40557 - RNA, 1733 nt, Artificial Sequence
  mRNA product Design a-2 (hSL-A64-N5) comprising derived and/or modified sequence from LASV(ISTH0009-NIG-2011;Clade II)__AIT17404__GPCmut12 (opt5)
aggagaguccgcucagccagguugcagaagcggcuuagcguguguccuaaucuucucucugcguguagguaggccugugccgcaaacaagcuuaccaugggccagaucauuaccuucuuucaagaggugccccacgucaucgaagagguuaugaacauugugcugaucgcccucagccugcuugcuauucugaaggggaucuacaauguggccacaugcggacucuucggccuggucuccuuucuucugcucugugggagaucuugcagcacgaccuauaaaggaguguacgaacugcagacacuggagcucgacauggcgucccugaacauguguaugccucuuucuugcaccaagaauaacagccaucacuauaucaugguuggcaaugaaacagggcuggagcucacccugacaaacaccuccauuaucaaucauaaauucuguaaccuuucugaugcucacaagaaaaaucuguacgaccaugcccucaugagcauuaucuccacguuucaccugagcauuccgaacuucaaucaguaugaggccaugucuugcgauuuuaacggaggcaagaucuccgugcaguacaaucugagccacgcuuaugccgucgacgcugccaaccauuguggcaccauugcgaauggggugcuccaaacauucaugcggauggccuggggaggcucuuacaucgcucuggauuccgggaagggaagcugggacugcaucaugaccucuuaccaguaucuuauuauccagaacacaaccugggaagaucacugucaguuuucccgccccagcccuauuggcuaccuggggcuccugucccaaagaacgcgggacaucuauauuucucgcagacuucugggaacauucaccuggacacucagcgauuccgagggcaacgaaacccccggcggguacugccugacccgguggaugcugaucgaggccgagcucaaauguuuuggaaauacagcuguugccaagugcaacgaaaaacaugacgaggaguucugcgauaugcugcgccuuuuugacuucuguaagcaggcgaucagacggcugaaaacggaagcccagaugagcauucagcucaucaauaaggcugugaacgcccugauuaaugaucaacuuaucaugaagaaccaucugcgcgacauuaugggcaucccuuauugcaauuacucuaaauauuguuaccucaaccacaccgucacagggaagaccucccugcccagaugcugucuggugagcaauggaucuuaccucaacgaaacacacuucagcgacgauaucgagcagcaggcugacaauaugauuaccgagcugcuucaaaaagaauauauggaucggcagggcaagacgccucuggggcucguggaccuguuugucuucuccacaucuuuuuaccugaucagcauuuuccuucaccucaucaaaauuccgacccaucgccacaucaccggaaagcccugcccuaaaccccauagacugaaccacaugggcauuuguuccugcggccuguauaagcacccugggguucccgugaaguggaaacggugaggacuagucccuguucccagagcccacuuuuuuuucuuuuuuugaaauaaaauagccugucuuucagaucucaaaggcucuuuucagagccaccaaaaaaaaaaaaaaaaaaaaaaaaaaaaaaaaaaaaaaaaaaaaaaaaaaaaaaaaaaaaaaaaagaauu

SEQ ID NO: 40558 - RNA, 1733 nt, Artificial Sequence
  mRNA product Design a-2 (hSL-A64-N5) comprising derived and/or modified sequence from LASV(ISTH2010-NIG-2012;Clade II)__AIT17482__GPCmut12 (opt5)
aggagaguccgcucagccagguugcagaagcggcuuagcguguguccuaaucuucucucugcguguagguaggccugugccgcaaacaagcuuaccaugggccagaucauuaccuucuuucaagaggugccccacgucaucgaagagguuaugaacauugugcugaucgcccucagccugcuugcuauucugaaggggaucuacaauguggccacaugcggacucuucggccuggucuccuuucuucugcucugugggagaucuugcagcacgaccuauaaaggaguguacgaacugcagacacuggagcucgacauggcgucccugaacauguguaugccucuuucuugcaccaagaauaacagccaucacuauaucaugguuggcaaugaaacagggcuggagcucacccugacaaacaccuccauuaucaaucauaaauucuguaaccuuucugaugcucacaagaaaaaucuguacgaccaugcccucaugagcauuaucuccacguuucaccugagcauuccgaacuucaaucaguaugaggccaugucuugcgauuuuaacggaggcaagaucuccgugcaguacaaucugagccacgcuuaugccgucgacgcugccaaccauuguggcaccauugcgaauggggugcuccaaacauucaugcggauggccuggggaggcucuuacaucgcucuggauuccgggaagggaagcugggacugcaucaugaccucuuaccaguaucuuauuauccagaacauuacaugggaagaucacugucaguuuucccgccccagcccuaucggcuaccuggggcuccugucccaaagaacccgggacauuuauaucucucgcagacuucugggaacguucacauggacccucagcgauuccgagggcaacgaaacacccggcggguacugccugacccgguggaugcugaucgaggccgagcucaaauguuuuggaaauaccgcuguugccaagugcaacgaaaaacaugacgaggaguucugcgauaugcugcgccuuuuugacuucuguaagcaggcgauuagacggcugaaaacagaagcccagaugagcauccagcucauuaauaaggcugugaacgcccugaucaaugaucaacuuauuaugaagaaccaucugcgcgacaucaugggcaucccuuauugcaauuacucuaaauauuguuaccucaaccacacggucaccgggaagacaucccugcccagaugcugucuggugagcaauggaucuuaccucaacgaaacccacuucagcgacgauauugagcagcaggcugacaauaugaucacagagcugcuucaaaaagaauauauugaucggcagggcaagaccccucuggggcucguggaccuguuugucuucuccacgucuuuuuaccugaucagcauuuuccuucaccucguuaaaaucccgacacaucgccacguggugggaaagcccugcccuaaaccccauagacugaaccacaugggcauuuguuccugcggccuguauaagcacccugggguccccgugaaguggaaacggugaggacuagucccuguucccagagcccacuuuuuuuucuuuuuuugaaauaaaauagccugucuuucagaucucaaaggcucuuuucagagccaccaaaaaaaaaaaaaaaaaaaaaaaaaaaaaaaaaaaaaaaaaaaaaaaaaaaaaaaaaaaaaaaaagaauu

SEQ ID NO: 40559 - RNA, 1733 nt, Artificial Sequence
  mRNA product Design a-2 (hSL-A64-N5) comprising derived and/or modified sequence from LASV(Lassa virus/H.sapiens-wt/NGA/2015/ISTH_0543;Clade II)__AVO03639__GPCmut12 (opt5)
aggagaguccgcucagccagguugcagaagcggcuuagcguguguccuaaucuucucucugcguguagguaggccugugccgcaaacaagcuuaccaugggccagaucauuaccuucuuucaagaggugccccacgucaucgaagagguuaugaacauugugcugaucgcccucagccugcuugcuauucugaaggggaucuacaauguggccacaugcggacucuucggccuggucuccuuucuucugcucugugggagaucuugcagcacgaccuauaaaggaguguacgaacugcagacacuggagcucgacauggcgaaccugaauauguguaugccucuuuccugcaccaagaacaauucucaucacuauaucaugguuggcaacgaaacagggcuggagcucacccugacaaauaccagcauuaucaaccauaaauucuguaaucuuuccgaugcucacaagaaaaaccuguacgaccaugcccucaugucuauuaucagcacguuucaccuguccauuccgaauuucaaccaguaugaggccaugagcugcgauuuuaauggaggcaagaucucugugcaguacaaccugucccacaccuaugcugucgacgccgcuaaucauuguggcacaauugccaacggggugcuccaaaccuucaugcggauggcguggggaggcagcuacaucgcccuggauucugggaagggauccugggacugcaucaugacaagcuaccaguaucuuguuauucagaacaccacgugggaagaucacugucaguuuucucgccccuccccuaucggcuaccuggggcuccugagccaaagaacacgggacauuuauaucucccgcagacuucugggaaccuucacauggacccucucugauagcgagggcaaugaaacccccggcggguacugccugacacgguggaugcugauugaggcugagcucaaauguuuuggaaacacggccguggcuaagugcaaugaaaaacaugacgaggaguucugcgauaugcugcgccuuuuugacuucuguaagcaggccaucagacggcugaaaaccgaagcgcagauguccauccagcucauuaacaaggccgucaaugcucugaucaacgaucaacuuauuaugaagaaucaucugcgcgacaucaugggcauuccuuauugcaacuacagcaaauauuguuaccucaaucacacagugaccgggaagacaucucugcccagaugcugucugguguccaacggaagcuaccucaaugaaacccacuucucugacgauaucgagcagcaggccgacaacaugaucacggagcugcuucaaaaagaauauauugaucggcagggcaagacaccucuggggcucgucgaccuguuuguuuucagcaccuccuuuuaccugaucucuauuuuccuucaccucgugaaaaucccgacccaucgccacauuacaggaaagcccugcccuaaaccccauagacugaaucacaugggcaucuguagcugcggccuguauaagcacccuggggugcccgucaaguggaaacggugaggacuagucccuguucccagagcccacuuuuuuuucuuuuuuugaaauaaaauagccugucuuucagaucucaaaggcucuuuucagagccaccaaaaaaaaaaaaaaaaaaaaaaaaaaaaaaaaaaaaaaaaaaaaaaaaaaaaaaaaaaaaaaaaagaauu

SEQ ID NO: 40560 - RNA, 1733 nt, Artificial Sequence
  mRNA product Design a-2 (hSL-A64-N5) comprising derived and/or modified sequence from LASV(Lassa virus/H.sapiens-wt/NGA/2016/ISTH_0009;Clade II)__AVO03571__GPCmut12 (opt5)
aggagaguccgcucagccagguugcagaagcggcuuagcguguguccuaaucuucucucugcguguagguaggccugugccgcaaacaagcuuaccaugggccagaucauuaccuucuuucaagaggugccccacgucaucgaagagguuaugaacauugugcugaucgcccucagccugcuugcuauucugaaggggaucuacaauguggccacaugcggacuccugggccuugucuccuuccugcuccugugugggagaucuugcagcacgaccuauaaaggaguguacgaacugcagacacucgagcuggacauggcgucccuuaacauguguaugccucugucuugcaccaagaauaacagccaucacuauaucaugguuggcaaugaaacagggcucgagcugacccuuacaaacaccuccauuaucaaucauaaauuuuguaaccugucugaugcucacaagaaaaaucucuacgaccaugcccugaugagcauuaucuccacguuccaccugagcauuccgaacuuuaaucaguaugaggccaugucuugcgauuucaacggaggccggaucuccgugcaguacaaucucagccacucuuaugcugucgacgccgcuaaccauuguggcaccauugccaauggggugcugcaaacauuuaugcgcauggcguggggaggcuccuacaucgcccuugauagcgggaagggaucuugggacugcaucaugaccuccuaccaguaucugauuauccagaacacaaccugggaagaucacugucaguucagcagacccuccccuauuggcuaccucgggcugcuuucucaacggacgcgcgacaucuauauuagcagacggcugcucggaacauuuaccuggacacuguccgauagcgagggcaacgaaacccccggcggguacugccugacccgcuggaugcucaucgaggcugagcugaaguguuucggaaauacagccguugcuaaaugcaacgaaaagcaugacgaggaauuuugcgauaugcuuagacuguucgacuuuuguaaacaggccauccggcgccucaagacggaggcgcagaugucuauucagcugaucaauaaagccgugaacgcucuuauuaaugaucaacugaucaugaagaaccaccucagagacauuaugggcaucccuuauugcaauuacuccaaguauuguuaccugaaccacaccgucacagggaaaaccagccugccccggugcugucucgugucuaauggaagcuaccugaacgaaacacauuucuccgacgauaucgagcagcaggccgacaauaugauuaccgagcuucugcaaaaggaauauaucgaucgccagggcaaaacgccucucgggcugguggaccuguucgucuuuucuaccagcuucuaccuuauuuccaucuuucuccaccugguuaagauuccgacacauagacacaucaccggaaaacccugcccuaagccccaucggcugaaccacaugggcauuuguagcugcggccucuauaaucacccuggggugcccgugaaauggaagcgcugaggacuagucccuguucccagagcccacuuuuuuuucuuuuuuugaaauaaaauagccugucuuucagaucucaaaggcucuuuucagagccaccaaaaaaaaaaaaaaaaaaaaaaaaaaaaaaaaaaaaaaaaaaaaaaaaaaaaaaaaaaaaaaaaagaauu

SEQ ID NO: 40561 - RNA, 1733 nt, Artificial Sequence
  mRNA product Design a-2 (hSL-A64-N5) comprising derived and/or modified sequence from LASV(Lassa virus/H.sapiens-wt/NGA/2016/ISTH_0017;Clade II)__AVO03567__GPCmut12 (opt5)
aggagaguccgcucagccagguugcagaagcggcuuagcguguguccuaaucuucucucugcguguagguaggccugugccgcaaacaagcuuaccaugggccagaucauuaccuucuuucaagaggugccccacgucaucgaagagguuaugaacauugugcugaucgcccucagccugcuugcuauucugaaggggaucuacaauguggccacaugcggacucuucggccuggucuccuuucuucugcucugugggagaucuugcagcacgaccuauaaaggaguguacgaacugcagacacuggagcucgacauggcgucccugaacauguguaugccucuuucuugcaccaagaauaacagccaucacuauaucaugguuggcaaugaaacagggcuggagcucacccugacaaacaccuccauuaucaaucauaaauucuguaaccuuucugaugcucacaagaaaaaucuguacgaccaugcccucaugagcauuaucuccacguuucaccugagcauuccgaacuucaaucaguaugaggccaugucuugcgauuuuaacggaggcaagaucuccgugcaguacaaucugagccacaccuaugcuauugacgccgcuaaccauuguggcacaaucgccaaugggguccuccaaaccuucaugcggauggcguggggaggcucuuacaucgcccuggauuccgggaagggaagcugggacugcauuaugacaucuuaccaguaucuuaucauucagaacaccacgugggaagaucacugucaguuuucccgccccagcccuaucggcuaccuggggcuccugucccaaagaacacgggacauuuauaucucucgcagacuucugggaaccuucacauggacccucagcgauuccgagggcaacgaaacccccggcggguacugccugacacgguggaugcugaucgaggcugagcucaaauguuuuggaaauacggccguggcuaagugcaacgaaaaacaugacgaggaguucugcgauaugcugcgccuuuuugacuucuguaagcaggccauuagacggcugaaaaccgaagcgcagaugagcauccagcucauuaauaaggccguuaacgcucugaucaaugaucaacuuauuaugaagaaccaucugcgcgacaucaugggcaucccuuauugcaauuacucuaaauauuguuaccucaaccacacagugaccgggaagacaucccugcccagaugcugucuggucagcaauggaucuuaccucaacgaaacccacuucagcgacgauauugagcagcaggccgacaauaugaucacggagcugcuucaaaaagaauauauggaucggcagggcaagacaccucuggggcucguggaccuguuuguguucuccaccucuuuuuaccugauuagcaucuuccuucaccucguccgcauuccgacccauagacacguuaucggaaaacccugcccuaagccccaucggcugaaccacaugggcauuuguuccugcggccuguauaaacacccuggggugcccgugaaguggaagcgcugaggacuagucccuguucccagagcccacuuuuuuuucuuuuuuugaaauaaaauagccugucuuucagaucucaaaggcucuuuucagagccaccaaaaaaaaaaaaaaaaaaaaaaaaaaaaaaaaaaaaaaaaaaaaaaaaaaaaaaaaaaaaaaaaagaauu

SEQ ID NO: 40562 - RNA, 1733 nt, Artificial Sequence
  mRNA product Design a-2 (hSL-A64-N5) comprising derived and/or modified sequence from LASV(Lassa virus/H.sapiens-wt/NGA/2018/ISTH_0959;Clade II)__AVV65099__GPCmut12 (opt5)
aggagaguccgcucagccagguugcagaagcggcuuagcguguguccuaaucuucucucugcguguagguaggccugugccgcaaacaagcuuaccaugggccagaucauuaccuucuuucaagaggugccccacgucaucgaagagguuaugaacauugugcugaucgcccucagccugcuugcuauucugaaggggaucuacaauguggucacaugcggacucuucggccugguguccuuucuucugcucugugggagaucuugcagcacgaccuauaaaggaguuuacgaacugcagacacuggagcucgacauggccucccugaacauguguaugccucuuucuugcaccaagaauaacagccaucacuauaucauggugggcaaugaaacagggcuggagcucacccugacaaacaccuccauuaucaaucauaaauucuguaaccuuucugaugcgcacaagaaaaaucuguacgaccaugcucucaugagcauuaucuccacguuucaccugagcauuccgaacuucaaucaguaugaggccaugucuugcgauuuuaacggaggcaagaucuccguccaguacaaucugagccacgccuaugcuauugacgccgcuaaccauuguggcaccaucgccaauggggugcuccaaacauucaugcggauggcguggggaggcucuuacaucgcccuggauuccgggaagggaagcugggacugcauuaugaccucuuaccaguaucuuaucauucagaacacaaccugggaagaucacugucaguuuucccgccccagcccuaucggcuaccuggggcuccugucccaaagaacgcgggacauuuauaucucucgcagacuucugggaacauucaccuggacacucagcgauuccgagggcaacgaaacccccggcggguacugccugacccgguggaugcugaucgaggcugagcucaaauguuuuggaaauacagccguugcuaagugcaacgaaaaacaugacgaggaguucugcgauaugcugcgccuuuuugacuucuguaagcaggccauuagacggcugaaaacggaagcgcagaugagcauccagcucauuaauaaggccgugaacgcucugaucaaugaucaacuuauuaugaagaaccaucugcgcgacaucaugggcaucccuuauugcaauuacucuaaauauuguuaccucaaccacaccgucacagggaagaccucccugcccagaugcugucuggugagcaauggaucuuaccucaacgaaacacacuucagcgacgauauugagcagcaggccgacaauaugaucaccgagcugcuucaaaaagaauauauugaucggcagggcaagacgccucuggggcucguggaccuguuugucuucuccacaucuuuuuaccugaucagcauuuuccuucaccucguuaaaaucccgacccaucgccacgugauuggaaagcccugcccuaaaccccauagacugaaccacaugggcaucuguuccugcggccuguauaagcacccuggggugcccgucaaguggaaacggugaggacuagucccuguucccagagcccacuuuuuuuucuuuuuuugaaauaaaauagccugucuuucagaucucaaaggcucuuuucagagccaccaaaaaaaaaaaaaaaaaaaaaaaaaaaaaaaaaaaaaaaaaaaaaaaaaaaaaaaaaaaaaaaaagaauu

SEQ ID NO: 40563 - RNA, 1733 nt, Artificial Sequence
  mRNA product Design a-2 (hSL-A64-N5) comprising derived and/or modified sequence from LASV(LASV003-NIG-2008;Clade II)__AIT17580__GPCmut12 (opt5)
aggagaguccgcucagccagguugcagaagcggcuuagcguguguccuaaucuucucucugcguguagguaggccugugccgcaaacaagcuuaccaugggccagaucauuaccuucuuucaagaggugccccacgucaucgaagagguuaugaacauugugcugaucgcccucagccugcuugcuauucugaaggggaucuacaauguggccacaugcggacucuucggccuggucuccuuucuucugcucugugggagaucuugcagcacgaccuauaaaggaguguacgaacugcagacacuggagcucgacauggcgucccugaacauguguaugccucuuucuugcaccaagaauaacagccaucacuauaucaugguuggcaaugaaacagggcuggagcucacccugacaaacaccuccauuaucaaucauaaauucuguaaccuuucugaugcucacaagaaaaaucuguacgaccaugcccucaugagcauuaucuccacguuucaccugagcauuccgaacuucaaucaguaugaggccaugucuugcgauuuuaacggaggcaagaucuccgugcaguacaaucugagccacaccuaugcugucgacgccgcuaaccauuguggcacaauugccaauggggugcuccaaaccuucaugcggauggcguggggaggcucuuacaucgcccuggauuccgggaagggaagcugggacugcaucaugacaucuuaccaguaucuuauuauccagaacaccacgugggaagaucacugucaguuuucccgccccagcccuauuggcuaccuggggcuccugucccaaagaacacgggacaucuauauuucucgcagacuucugggaaccuucacauggacccucagcgauuccgagagcaacgaaacccccggcggcuacugccugacacgguggaugcugaucgaggcugagcucaaauguuuugggaauacggccguugcuaagugcaacgaaaaacaugacgaggaguucugcgauaugcugcgccuuuuugacuucuguaagcaggccaucagacggcugaaagcggaagcccagaugucuauucagcucaucaauaaggcugugaacgcccugauuaaugaucaacuuaucaugaagaaccaucugcgcgacauuaugggaaucccuuauugcaauuacuccaaauauuguuaccucaaccacaccgucacaggcagaaccagccugccccggugcugucuggugucuaaugggagcuaccucaacgaaacacacuucuccgacgauaucgagcagcaggcugacaauaugauuaccgagcugcuucaaaaggaauauauggaucgccagggaaaaacgccucugggccucguggaccuguuugucuucucuaccagcuuuuaccugaucuccauuuuccuucaccucguuaagaucccgacacauagacacgugauugggaaacccugcccuaagccccaucggcugaaccacaugggaaucuguagcugcggccuguauaaacacccuggcgugcccgucaaguggaagcgcugaggacuagucccuguucccagagcccacuuuuuuuucuuuuuuugaaauaaaauagccugucuuucagaucucaaaggcucuuuucagagccaccaaaaaaaaaaaaaaaaaaaaaaaaaaaaaaaaaaaaaaaaaaaaaaaaaaaaaaaaaaaaaaaaagaauu

SEQ ID NO: 40564 - RNA, 1733 nt, Artificial Sequence
  mRNA product Design a-2 (hSL-A64-N5) comprising derived and/or modified sequence from LASV(LASV035-NIG-2009;Clade II)__AIT17588__GPCmut12 (opt5)
aggagaguccgcucagccagguugcagaagcggcuuagcguguguccuaaucuucucucugcguguagguaggccugugccgcaaacaagcuuaccaugggccagaucauuaccuucuuucaagaggugccccacgucaucgaagagguuaugaacauugugcugaucgcccucagccugcuugcuauucugaaggggaucuacaauguggccacaugcggacucuucggccuggucuccuuucuucugcucugugggagaucuugcagcacgaccuauaaaggaguguacgaacugcagacacuggagcucgacauggcgucccugaacauguguaugccucuuucuugcaccaagaauaacagccaucacuauaucaugguuggcaaugaaacagggcuggagcucacccugacaaacaccuccauuaucaaucauaaauucuguaaccuuucugaugcucacaagaaaaaucuguacgaccaugcccucaugagcauuaucuccacguuucaccugagcauuccgaacuucaaucaguaugaggccaugucuugcgauuuuaacggaggcaagaucuccgugcaguacaaucugagccacgcuuaugccgucgacgcugccaaccauuguggcaccauugcgaauggggugcuccaaacauucaugcggauggccuggggaggcucuuacaucgcucuggauuccgggaagggaagcugggacugcaucaugaccucuuaccaguaucuuauuauccagaacacaaccugggaagaucacugucaguuuucccgccccagcccuauuggcuaccuggggcuccugucccaaagaacgcgggacaucuauauuucucgcagacuucugggaacauucaccuggacacucagcgauuccgagggcaacgaaacccccggcggguacugccugacccgguggaugcugaucgaggccgagcucaaauguuuuggaaauacagcuguugccaagugcaacgaaaaacaugacgaggaguucugcgauaugcugcgccuuuuugacuucuguaagcaggcgaucagacggcugaaagccgaagcucagaugagcauucagcucaucaauaaggccgugaacgcucugauuaaugaucaacuuaucaugaagaaccaucugcgcgacauuaugggcaucccuuauugcaauuacucuaaauauuguuaccucaaccacacggucaccgggaagacaucccugcccagaugcugucuggugagcaauggaucuuaccucaacgaaacccacuucagcgacgauaucgagcagcaggccgacaauaugauuacagagcugcuucaaaaagaauauaucgaucggcagggcaagaccccucuggggcucguggaccuguuugucuucuccacgucuuuuuaccugauuagcaucuuccuucaccucguuaaaauuccgacacaucgccacgugaucggaaagcccugcccuaaaccccauagacugaaccacaugggcauuuguuccugcggccuguauaagcacccuggggugcccgucaaguggaaacggugaggacuagucccuguucccagagcccacuuuuuuuucuuuuuuugaaauaaaauagccugucuuucagaucucaaaggcucuuuucagagccaccaaaaaaaaaaaaaaaaaaaaaaaaaaaaaaaaaaaaaaaaaaaaaaaaaaaaaaaaaaaaaaaaagaauu

SEQ ID NO: 40565 - RNA, 1733 nt, Artificial Sequence
  mRNA product Design a-2 (hSL-A64-N5) comprising derived and/or modified sequence from LASV(LASV1000-NIG-2009;Clade II)__AIT17782__GPCmut12 (opt5)
aggagaguccgcucagccagguugcagaagcggcuuagcguguguccuaaucuucucucugcguguagguaggccugugccgcaaacaagcuuaccaugggccagaucauuaccuucuuucaagaggugccccacgucaucgaagagguuaugaacauugugcugaucgcccucagccugcuugcuauucugaaggggaucuacaauguggccacaugcggacucuucggccuggucuccuuucuucugcucugugggagaucuugcagcacgaccuauaaaggaguguacgaacugcagacacuggagcucgacauggcgucccugaacauguguaugccucuuucuugcaccaagaauaacagccaucacuauaucaugguuggcaaugaaacagggcuggagcucacccugacaaacaccuccauuaucaaucauaaauucuguaaccuuucugaugcucacaagaaaaaucuguacgaccaugcccucaugagcauuaucuccacguuucaccugagcauuccgaacuucaaucaguaugaggccaugucuugcgauuuuaacggaggcaagaucuccgugcaguacaaucugagccacaccuaugcugucgacgccgcuaaccauuguggcacaauugccaauggggugcuccaaaccuucaugcggauggcguggggaggcucuuacaucgcccuggauuccgggaagggaagcugggacugcaucaugacaucuuaccaguaucuuauuauccagaacaccacgugggaagaucacugucaguuuucccgccccagcccuauuggcuaccuggggcuccugucccaaagaacacgggacaucuauauuucucgcagacuucugggaaccuucacauggacccucagcgauuccgagggcaacgaaacccccggcggguacugccugacacgguggaugcugaucgaggcugagcucaaauguuuuggaaauacggccguugcuaagugcaacgaaaaacaugacgaggaguucugcgauaugcugcgccuuuuugacuucuguaagcaggccaucaaaagacugaagaccgaagcgcagaugagcauucagcucaucaauaaggccgugaacgcucugauuaaugaucaacuuaucaugaaaaaccaucugcgggacauuaugggcaucccuuauugcaauuacucuaaguauuguuaccucaaccacacagucaccgggaaaacaucccugccccgcugcugucuggugagcaauggaucuuaccucaacgaaacccacuucagcgacgauaucgagcagcaggccgacaauaugauuacggagcugcuucaaaaggaauauaucgauagacagggcaaaacaccucuggggcucguggaccuguuugucuucuccaccucuuuuuaccugauuagcaucuuccuucaccucguuaagauuccgacccaucggcacguggugggaaaacccugcccuaagccccaucgccugaaccacaugggcaucuguuccugcggccuguauaagcacccugggguccccgugaaauggaagagaugaggacuagucccuguucccagagcccacuuuuuuuucuuuuuuugaaauaaaauagccugucuuucagaucucaaaggcucuuuucagagccaccaaaaaaaaaaaaaaaaaaaaaaaaaaaaaaaaaaaaaaaaaaaaaaaaaaaaaaaaaaaaaaaaagaauu

SEQ ID NO: 40566 - RNA, 1733 nt, Artificial Sequence
  mRNA product Design a-2 (hSL-A64-N5) comprising derived and/or modified sequence from LASV(LASV221-NIG-2010;Clade II)__AIT17624__GPCmut12 (opt5)
aggagaguccgcucagccagguugcagaagcggcuuagcguguguccuaaucuucucucugcguguagguaggccugugccgcaaacaagcuuaccaugggccagaucauuaccuucuuucaagaggugccccacgucaucgaagagguuaugaacauugugcugaucgcccucagccugcuugcuauucugaaggggaucuacaauguggccacaugcggacucuucggccuggucuccuuucuucugcucugugggagaucuugcagcacgaccuauaaaggaguguacgaacugcagacacuggagcucgacauggcgucccugaacauguguaugccucuuucuugcaccaagaauaacagccaucacuauaucaugguuggcaaugaaacagggcuggagcucacccugacaaacaccuccauuaucaaucauaaauucuguaaccuuucugaugcucacaagaaaaaucuguacgaccaugcccucaugagcauuaucuccacguuucaccugagcauuccgaacuucaaucaguaugaggccaugucuugcgauuuuaacggaggcaagaucuccgugcaguacaaucugagccacaccuaugcuauugacgccgcuaaccauuguggcacaaucgccaaugggguccuccaaaccuucaugcggauggcguggggaggcucuuacaucgcccuggauuccgggaagggaagcugggacugcauuaugacaucuuaccaguaucuuaucauucagaacaccacgugggaagaucacugucaguuuucccgccccagcccuaucggcuaccuggggcuccugucccaaagaacacgggacauuuauaucucucgcagacuucugggaaccuucacauggacccucagcgauuccgagggcaacgaaacccccggcggguacugccugacacgguggaugcugaucgaggcugagcucaaauguuuuggaaauacggccguggcuaagugcaacgaaaaacaugacgaggaguucugcgauaugcugcgccuuuuugacuucuguaagcaggccauuagacggcugaaaaccgaagcgcagaugagcauccagcucauuaauaaggccguuaacgcucugaucaaugaucaacuuauuaugaagaaccaucugcgcgacaucaugggcaucccuuauugcaauuacucuaaauauuguuaccucaaccacacagugaccgggaagacaucccugcccagaugcugucuggucagcaauggaucuuaccucaacgaaacccacuucagcgacgauauugagcagcaggccgacaauaugaucacggagaugcugcaaaaagaauauauggaucggcagggcaagacaccucuugggcugguggaccucuuuguguucuccaccucuuuuuaccugauuagcaucuuccugcaccuugucaaaauuccgacccaucgccacguuaucggaaagcccugcccuaaaccccauagacucaaccacaugggcauuuguuccugcggccuguauaagcacccuggggugcccgugaaguggaaacggugaggacuagucccuguucccagagcccacuuuuuuuucuuuuuuugaaauaaaauagccugucuuucagaucucaaaggcucuuuucagagccaccaaaaaaaaaaaaaaaaaaaaaaaaaaaaaaaaaaaaaaaaaaaaaaaaaaaaaaaaaaaaaaaaagaauu

SEQ ID NO: 40567 - RNA, 1733 nt, Artificial Sequence
  mRNA product Design a-2 (hSL-A64-N5) comprising derived and/or modified sequence from LASV(LASV237-NIG-2010;Clade II)__AIT17638__GPCmut12 (opt5)
aggagaguccgcucagccagguugcagaagcggcuuagcguguguccuaaucuucucucugcguguagguaggccugugccgcaaacaagcuuaccaugggccagaucauuaccuucuuucaagaggugccccacgucaucgaagagguuaugaacauugugcugaucgcccucagccugcuugcuauucugaaggggaucuacaauguggccacaugcggacucuucggccuggucuccuuucuucugcucugugggagaucuugcagcacgaccuauaaaggaguguacgaacugcagacacuggagcucgacauggcgucccugaacauguguaugccucuuucuugcaccaagaauaacagccaucacuauaucaugguuggcaaugaaacagggcuggagcucacccugacaaacaccuccauuaucaaucauaaauucuguaaccuuucugaugcucacaagaaagaccuguacgaucaugcccucaugagcauuaucuccacguuucaccugagcauuccgaauuucaaccaguaugaggccaugucuugcgacuuuaauggaggcaagaucuccgugcaguacaaccugagccacaccuaugcugucgaugccgcuaaucauuguggcacaauugccaacggggugcuccaaaccuucaugcggauggcguggggaggcucuuacaucgcccuggacuccgggaagggaagcugggauugcaucaugacaucuuaccaguaucuuauuauccagaauaccacgugggaagaccacugucaguuuucccgccccagcccuauuggcuaccuggggcuccugucccaaagaacacgggauaucuauauuucucgcagacuucugggaaccuucacauggacccucagcgacuccgagggcaacgaaacccccggcggguacugccugacacgguggaugcugaucgaggcugagcucaaauguuuuggaaacacggccguugcuaagugcaaugaaaaacaugaugaggaguucugcgacaugcugcgccuuuuugauuucuguaagcaggccaucagacggcugaaaaccgaagcgcagaugagcauucagcucaucaacaaggccgugaaugcucugauuaacgaccaacuuaucaugaagaaucaucugcgcgacauuaugggcaucccuuauugcaacuacucuaaauauuguuaccucaaucacacagucaccgggaagacaucccugcccagaugcugucuggugagcaacggaucuuaccucaaugaaacccacuucagcgaugacaucgagcagcaggccgauaacaugauuacggagcugcuucaaaaagaauauauggaccggcagggcaagacaccucuggggcucguggaucuguuugucuucuccaccucuuuuuaccugaucagcauuuuccuucaccucaucaaaauuccgacccaucgccacaucacaggaaagcccugcccuaaaccccauagacugaaucacaugggcauuuguuccugcggccuguauaagcacccugggguucccgugaaguggaaacggugaggacuagucccuguucccagagcccacuuuuuuuucuuuuuuugaaauaaaauagccugucuuucagaucucaaaggcucuuuucagagccaccaaaaaaaaaaaaaaaaaaaaaaaaaaaaaaaaaaaaaaaaaaaaaaaaaaaaaaaaaaaaaaaaagaauu

SEQ ID NO: 40568 - RNA, 1733 nt, Artificial Sequence
  mRNA product Design a-2 (hSL-A64-N5) comprising derived and/or modified sequence from LASV(LASV253-NIG-2011;Clade II)__AIT17670__GPCmut12 (opt5)
aggagaguccgcucagccagguugcagaagcggcuuagcguguguccuaaucuucucucugcguguagguaggccugugccgcaaacaagcuuaccaugggccagaucauuaccuucuuucaagaggugccccacgucaucgaagagguuaugaacauugugcugaucgcccucagccugcuugcuauucugaaggggaucuacaauguggccacaugcggacucuucggccuggucuccuuucuucugcucugugggagaucuugcagcacgaccuauaaaggaguguacgaacugcagacacuggagcucgacauggcgucccugaacauguguaugccucuuucuugcaccaagaauaacagccaucacuauaucaugguuggcaaugaaacagggcuggagcucacccugacaaacaccuccauuaucaaucauaaauucuguaaccuuucugaugcucacaagaaaaaucuguacgaccaugcccucaugagcauuaucuccacguuucaccugagcauuccgaacuucaaucaguaugaggccaugucuugcgauuuuaacggaggcaagaucuccgugcaguacaaucugagccacaccuaugcugucgacgccgcuaaccauuguggcacaauugccaauggggugcuccaaaccuucaugcggauggcguggggaggcucuuacaucgcccuggauuccgggaagggaagcugggacugcaucaugacaucuuaccaguaucuuauuauccagaacaccacgugggaagaucacugucaguuuucccgccccagcccuauuggcuaccuggggcuccugucccaaagaacacgggacaucuauauuucucgcagacuucugggaaccuucacauggacccucagcgauuccgagggcaacgaaacccccggcggguacugccugacacgguggaugcugaucgaggcugagcucaaauguuuuggaaauacggccguugcuaagugcaacgaaaaacaugacgaggaguucugcgauaugcugcgccuuuuugacuucuguaagcaggccaucagacggcugaaagcggaagcccagaugagcauucagcucaucaauaaggcugugaacgcccugauuaaugaucaacuuaucaugaagaaccaucugcgcgacauuaugggcaucccuuauugcaauuacucuaaauauuguuaccucaaccacaccgucacagggagaaccucccugccccggugcugucuggugagcaauggaucuuaccucaacgaaacacacuucagcgacgauaucgagcagcaggcugacaauaugauuaccgagcugcuucaaaaggaauauaucgaucgccagggcaaaacgccucuggggcucguggaccuguuugucuucuccacaucuuuuuaccugauuagcaucuuccuucaccucguuaagauuccgacccauagacacaucauuggaaaacccugcccuaagccccaucggcugaaccacaugggcaucuguuccugcggccuguauaaacacccuggggugcccgugaaguggaagcgcugaggacuagucccuguucccagagcccacuuuuuuuucuuuuuuugaaauaaaauagccugucuuucagaucucaaaggcucuuuucagagccaccaaaaaaaaaaaaaaaaaaaaaaaaaaaaaaaaaaaaaaaaaaaaaaaaaaaaaaaaaaaaaaaaagaauu

SEQ ID NO: 40569 - RNA, 1733 nt, Artificial Sequence
  mRNA product Design a-2 (hSL-A64-N5) comprising derived and/or modified sequence from LASV(LASV254-NIG-2011;Clade II)__AIT17674__GPCmut12 (opt5)
aggagaguccgcucagccagguugcagaagcggcuuagcguguguccuaaucuucucucugcguguagguaggccugugccgcaaacaagcuuaccaugggccagaucauuaccuucuuucaagaggugccccacgucaucgaagagguuaugaacauugugcugaucgcccucagccugcuugcuauucugaaggggaucuacaauguggccacaugcggacucuucggccuggucuccuuucuucugcucugugggagaucuugcagcacgaccuauaaaggaguguacgaacugcagacacuggagcucgacaugaccaaccugaauauguguaugccucuuuccugcacaaagaacaauucucaucacuauaucaugguuggcaacgaaaccgggcuggagcucacacugaccaauacgagcauuaucaaccauaaauucuguaaucuuuccgaugcgcacaagaaaaaccuguacaaucaugcucucaugucuauuaucagcaccuuucaccuguccauuccgaacuucaaucaguaugaggccaugagcugcgacuuuaacggaggcaagaucucugugcaguacaaucugucccacagcuaugccgucgaugcugccaaccauuguggcacaauugcuaacggggugcuccaaaccuucaugcggauggccuggggaggcucuuacaucgcgcuggacuccgggaagggaaauugggauugcaucaugacaagcuaccaguaucuuauuauccagaacaccacgugggaagaccacugucaguuuucucgccccuccccuauuggcuaccuggggcuccugagccaaagaacacgggauaucuauauuucccgcagacuucugggaaccuucacauggacccucucugacagcgagggcaaugaaacccccggcggguacugccugacacgguggaugcugaucgaggccgagcucaaauguuuuggaaacacggcuguugccaagugcaaugaaaaacaugaugaggaguucugcgacaugcugcgccuuuuugauuucuguaagcaggcuaucagacggcugaaaaccgaagcccaggcgaacauucagcucaucaauaaggccgugaacgcucugauuaaugaccaacuuaucaugaagaaccaucugcgcgauauuaugggcaucccuuauugcaauuacuccaaauauuguuaccucaaccacacagucaccgggaagacaagccugcccagaugcugucuggugucuaauggauccuaccucaacgaaacccacuucagcgacgacaucgagcagcaggccgauaauaugauuacggagcugcuucaaaaagaauauauggaccggcagggcaagacaccucuggggcucguggaucuguuugucuucucuaccagcuuuuaccugaucuccauuuuccuucaccucguuaaaaucccgacccaucgccacgugauuggaaagcccugcccuaaaccccauagacugaaccacaugggcaucuguucuugcggccuguauaagcacccuggggugcccgucaaguggaaacggugaggacuagucccuguucccagagcccacuuuuuuuucuuuuuuugaaauaaaauagccugucuuucagaucucaaaggcucuuuucagagccaccaaaaaaaaaaaaaaaaaaaaaaaaaaaaaaaaaaaaaaaaaaaaaaaaaaaaaaaaaaaaaaaaagaauu

SEQ ID NO: 40570 - RNA, 1733 nt, Artificial Sequence
  mRNA product Design a-2 (hSL-A64-N5) comprising derived and/or modified sequence from LASV(Nig08-A19;Clade III)__ADU56618__GPCmut12 (opt5)
aggagaguccgcucagccagguugcagaagcggcuuagcguguguccuaaucuucucucugcguguagguaggccugugccgcaaacaagcuuaccaugggccagaucgugaccuucuuucaagaggucccccacguuauugaagaggugaugaacaucgugcugauugcccucagcauccuggcuauucuuaaggggcuguacaauaucgccacaugcggacucaucggccuggucacguuccuucugcucuccgggagaucuuguagcaugaccuauaaaggaguguacgaacugcagacacuggagcucaacaugaauacccugaacaugugcaugccucuuuccuguacaaagaauaacucucaucacuauauuaugguuggcaaugaaaccgggcuggagcucacacugaccaacacgagccuucugcaucacaaauuuugcaaucucuccgacgcgcauaagaaaaaccuguacgaucacacccugaugucuaucauuagcacauuccaccucuccaucccgaauuuuaaccaguaugaggcuaugagcugugacuucaauggaggcaagauuaccgugcaguacaaccugucucauuccuaugccaucgaugccgcuaaucacugcggcacagucgccaacggggugcuucaaaccuuuaugcggauggcuuggggaggcagcuacauugcccuggacucugggcgcggaaagugggauuguaucaugacguccuaccaguaucucaucauucagaacacaaccugggaagaccauugccaguucagcagacccucuccuaucggcuaccuggggcuucugucccaacggacacgcgauauuuauaucagcagacggcuccugggaaccuuuaccuggacacuguccgacucugagggcaaugaaacgcccggcggguacugucucacccgcuggaugcugauugaggcggagcuuaaaugcuucggaaacacagccguugcuaaguguaaugaaaaacacgaugaggaauuuugcgacaugcugagacucuucgauuuuugcaagcaggccauccggcgccugaaagcugaggcccagaugagcauccagcuuauuaacaaggcggugaaugcccugaucaacgaccaacucauuaugaagaaucaccugagagauaucaugggcauuccuuauuguaacuacuccaaauauugcuaccugaaucauaccagcacagggcggaccucucucccccgcuguugccuggucuccaacggaagcuaccuuaaugaaacgcacuucucugacgacaucgagcagcaggcugauaacaugaucacagagaugcugcaaaaggaauaucucgacagacagggcaaaaccccucuggggcugguggaucuuuucguguuuagcaccuccuucuaccucauuucuaucuuucugcaucuggucaagauuccgacacaccggcauaucguuggaaaacccuguccuaagccccaccgccucaaucacaugggcauuugcagcuguggccuguauaaacagccuggggugcccgugagauggaagcggugaggacuagucccuguucccagagcccacuuuuuuuucuuuuuuugaaauaaaauagccugucuuucagaucucaaaggcucuuuucagagccaccaaaaaaaaaaaaaaaaaaaaaaaaaaaaaaaaaaaaaaaaaaaaaaaaaaaaaaaaaaaaaaaaagaauu

SEQ ID NO: 40571 - RNA, 1736 nt, Artificial Sequence
  mRNA product Design a-2 (hSL-A64-N5) comprising derived and/or modified sequence from LASV(G1180-SLE-2010;Clade IV)__AIT17168__GPCmut12 (opt5)
aggagaguccgcucagccagguugcagaagcggcuuagcguguguccuaaucuucucucugcguguagguaggccugugccgcaaacaagcuuaccaugggccagaucgugaccuucuuucaagaggucccccacguuauugaagaggugaugaacaucgugcugauugcccucagcauccuggcuguccuuaaggggcuguacaauuucgccacaugcggacucgugggccugcuuacguuucugcuccugugugggagauccugcaccgcgucucgguauaaaggaguuuacgaacugcagacacucgagcugaacauggaaacccuuaauauguguaugccucugagcugcacaaagaacaauucccaucacuauauuauggugggcaacgagaccgggcucgagcugacacuuaccaauacgucuaucaucaaccauaaauucuguaaucugagcgacgcucacaagaaaaaccucuacgaucaugcccugauguccauuaucucuaccuuucaccugagcauuccgaauuucaaccaguaugaagccauguccugcgacuuuaauggaggcaagaucagcguccaguacaaccucucucacuccuaugcuggcgaugccgcuaaucauugugggacaguggccaacggaguucugcaaaccuucaugcgcauggcguggggcgggagcuacauugcccuugacucuggacacggcuccugggauugcaucaugacaagcuaccaguaucugauuauccagaacaccacgugggaggaccauugucaguuuucuagacccuccccuaucggguaccucggacugcuuagccaacggacacgcgauauuuauaucuccagacggcugcucggcaccuucacauggacccugucugacagcgaaggcaaggauacccccgggggauacugccugacacgcuggaugcucauugaggcugagcugaaauguuuuggcaauacggccguggcuaagugcaacgaaaaacacgacgaggaguucugcgauaugcuuagacuguuugacuucuguaagcaggccauccagcggcucaaagcggaagcccagauguccauucaacugaucaauaaggcugucaacgcccuuaucaaugaucagcugauuaugaagaaccaccuccgcgacaucauggggauuccuuauugcaauuacagcaaauauuguuaccugaaccauaccacaaccggaaagacaucucugcccaaaugcugucucguguccaauggcagcuaccugaacgaaacccacuucucugacgauaucgagcagcaagcugacaauaugauuacggagaugcuucagaaggaauauauggagagacaggggaaaacaccucugggacucguggaucuguuugucuucagcaccuccuuuuaccugaucucuaucuuccuucaucucguuaagauuccgacccaccggcauaucgugggcaaaagcugccccaagccucaccgccugaaccacaugggcauuuguuccugcgggcuguauaagcagcccggagugccugucaaauggaagagaugaggacuagucccuguucccagagcccacuuuuuuuucuuuuuuugaaauaaaauagccugucuuucagaucucaaaggcucuuuucagagccaccaaaaaaaaaaaaaaaaaaaaaaaaaaaaaaaaaaaaaaaaaaaaaaaaaaaaaaaaaaaaaaaaagaauu

SEQ ID NO: 40572 - RNA, 1736 nt, Artificial Sequence
  mRNA product Design a-2 (hSL-A64-N5) comprising derived and/or modified sequence from LASV(G1442-SLE-2011;Clade IV)__AIT17180__GPCmut12 (opt5)
aggagaguccgcucagccagguugcagaagcggcuuagcguguguccuaaucuucucucugcguguagguaggccugugccgcaaacaagcuuaccaugggccagaucgugaccuucuuucaagaggucccccacguuauugaagaggugaugaacaucgugcugauugcccucagcauccuggcuguccuuaaggggcuguacaauguggccacaugcggacucauuggccugguuacguuccuucugcucugugggagauccugcaccacaacccuguauaaaggaguguacgaacugcagacacucgagcugaacauggaaacccuuaauauguguaugccucugucuugcacaaagaacaauagccaucacuauauccgggucggcaacgagaccgggcucgagcugacgcuuaccaauacauccaucauuaaccauaaauuuuguaaucugucugacgcgcacaagaaaaaccucuacgaucaugcucugaugagcaucauuuccaccuuccaccugucuaucccgaauuuuaaccaguaugaagccaugagcugcgacuucaauggaggcaagauuuccgugcaguacaaccucagccacucuuaugccggcgaugcugccaaucauugugggacaguugcuaacggagugcugcaaaccuuuaugcgcauggccuggggcggguccuacaucgcgcuugacagcggaagaggcaacugggauugcauuaugacgucuuaccaguaucugaucauccagaauacaaccugggacgaucacugucaguucucccggcccagcccuauuggguaccucggacugcuuucucaacgcacaagagacgucuauaucucccggcgccugcucggcaccuuuaccuggacacugagcgauuccgagggcaaggacacgcccgggggauacugccugaccagauggaugcucauugaagccgagcugaaauguuucggcaacacagcuguggccaagugcaaugagaaacaugaugaagaguuuugcgacaugcuucggcuguucgauuuuuguaagcaggcuauccagcgccucaaagccgaagcgcagaugucuauucaacugaucaacaaggccgugaaugcucuuaucaacgaccagcugauuaugaagaaucaccucagagacaucauggggauuccuuauugcaacuacagcaaauauuguuaccugaauaacaccgccacaggaaagaccucccugcccaaaugcugucucaucagcaauggcucuuaccugaacgagacgcacuucuccgaugacauugaacaggaggcugauaauaugaucacagagaugcuucaaaaggaauauauggagcggcaggggaaaaccccucugggacucgucgaccuguucguuuuuagcaccucuuucuaccugaucagcauuuuucuucaucucgugaagaucccgacacaccgccauauugugggcaaauccugccccaagccucacagacugaaccauaugggcaucuguucuugcgggcuguauaagcagcccggagucccugugcgguggaaacgcugaggacuagucccuguucccagagcccacuuuuuuuucuuuuuuugaaauaaaauagccugucuuucagaucucaaaggcucuuuucagagccaccaaaaaaaaaaaaaaaaaaaaaaaaaaaaaaaaaaaaaaaaaaaaaaaaaaaaaaaaaaaaaaaaagaauu

SEQ ID NO: 40573 - RNA, 1736 nt, Artificial Sequence
  mRNA product Design a-2 (hSL-A64-N5) comprising derived and/or modified sequence from LASV(G3010-SLE-2013;Clade IV)__AIT17344__GPCmut12 (opt5)
aggagaguccgcucagccagguugcagaagcggcuuagcguguguccuaaucuucucucugcguguagguaggccugugccgcaaacaagcuuaccaugggccagaucgugaccuucuuucaagaggucccccacguuauugaagaggugaugaacaucgugcugauugcccucagcauccuggcuguccuuaaggggcuguacaauuucgccacaugcggacucgugggccugguuacguuucuucugcucugugggagauccugcaccacaucucuguauaaaggaguguacgaacugcagacccucgagcugaacauggaaacacuuaauauguguaugccucugagcugcaccaagaacaauucccaucacuauauuauggucggcaacgagacagggcucgagcugacccuuacgaauaccucuaucaucaaccauaaauucuguaaucugagcgacgcgcacaagaaaaaccucuacaaucaugcucugauguccauuaucucuacauuucaccugagcauuccgaacuucaaucaguaugaagccauguccugcgauuuuaacggaggcaagaucagcgugcaguacaaucucucucacuccuaugccggcgacgcugccagccauugugggaccguugcuaacggagugcugcaaacauucaugcggauggccuggggcgggucuuacauugcgcuugauuccggauacggcaagugggacugcaucaugaccagcuaucaguaccugauuauccagaacacgacaugggaggaucacugucaguuuucucgccccuccccuaucggguaucucggacugcuuagccaaagaacccgggacauuuacaucucccgcagacugcucggcacauucaccuggacccugucugauagcgaaggcaaagacacacccgggggauauugccugacgcgguggaugcucauugaggccgagcugaaguguuuuggcaauaccgcugucgccaaaugcaacgaaaagcaugaugaggaguucugcgacaugcuucgccuguuugauuucuguaaacaggcuauccagagacucaagacagaagcccagauguccauucaacugaucaauaaggcggugaacgcccuuaucaaugaccagcugauuaugaaaaaccaccuccgggauaucauggggauuccuuacugcaauuauagcaaguacuguuaccugaaccacaccacaaccggaaaaacgucucugcccaagugcugucucguguccaauggcagcuaucugaacgaaacacauuucucugacgacaucgagcagcaagcugauaauaugauuaccgagaugcuucagaaagaauacauggagcgccaggggaagaccccucugggacucgucgaccuguuuguuuucagcacauccuuuuaucugaucucuaucuuccuucaccucgugaaaauuccgacccauagacacaucgugggcaagagcugccccaagccucaucggcugaaccacaugggcauuuguuccugcgggcuguacaaacagcccggagucccugugcgcuggaagagaugaggacuagucccuguucccagagcccacuuuuuuuucuuuuuuugaaauaaaauagccugucuuucagaucucaaaggcucuuuucagagccaccaaaaaaaaaaaaaaaaaaaaaaaaaaaaaaaaaaaaaaaaaaaaaaaaaaaaaaaaaaaaaaaaagaauu

SEQ ID NO: 40574 - RNA, 1736 nt, Artificial Sequence
  mRNA product Design a-2 (hSL-A64-N5) comprising derived and/or modified sequence from LASV(G502-SLE-2009;Clade IV)__AIT17126__GPCmut12 (opt5)
aggagaguccgcucagccagguugcagaagcggcuuagcguguguccuaaucuucucucugcguguagguaggccugugccgcaaacaagcuuaccaugggccagaucgugaccuucuuucaagaggucccccacguuauugaagaggugaugaacaucgugcugauugcccucagcauccuggcuguccuuaaggggcuguacaauuucgccacaugcggacucgugggccugcuuacguuucugcuccugugugggagauccugcaccacaggacuguauaaaggcguuuacgaacuccagacccuggagcuuaacauggaaacacugaauauguguaugccucucucuugcaccaagaacaauagccaucacuauauuaugguggggaacgagacaggacuggagcuuacccugacgaauaccuccaucaucaaccauaaauucuguaaucucucugacgcgcacaagaaaaaccuguacgaucaugcucugaugagcauuaucuccacauuucaccucucuauuccgaauuucaaccaguaugaagccaugagcugcgacuuuaauggcggcaagaucuccguccaguacaaccugagccacucuuaugccggggaugcugccgaccauuguggaaccguggcuaauggcguucuucaaacauucaugcggauggccuggggaggguccuacauugcgcuggauagcggccgcgggagaugggacugcaucaugaccucuuaccaguaucucauuauccagaacacgacaugggaggaucacugucaguuuucccggcccagcccuaucggauaccugggccuucugucucaacgcaccagagacauuuauaucucccggcgccuccugggcacauucaccuggacccugagcgauuccgaagggaaggacacacccggaggcuacugccucacgagauggaugcugauugaggccgagcuuaaauguuuugggaacaccgcuguggccaagugcaaugaaaaacaugaugaggaguucugcgacaugcugcggcucuuugauuucuguaagcaggcuauccagcgccugaaagccgaagcgcagaugucuauucaacuuaucaacaaggccgucaaugcucugaucaacgaccagcucgugaugaagaaucaccugagagacauuaugggaaucccuuauugcaacuacagccgguauuguuaccugaaucacacaaccacaggccgcaccucccuccccaaaugcugucuggugagcaacgggucuuaccuuaaugaaacgcauuucuccgaugacauugagcagcaagccgauaacaugaucacagagaugcugcagaaggaauauauggagagacagggaaaaaccccucucggccuggucgaccuguuuguuuucagcaccucuuuuuaccuuauuagcaucuuccuccaccuggugaagaucccgacacaucggcacauugugggcaaauccugccccaagccucaucgccugaaucacauggggaucuguucuugcggacucuauaaacagcccggcgucccugugaaguggaagagaugaggacuagucccuguucccagagcccacuuuuuuuucuuuuuuugaaauaaaauagccugucuuucagaucucaaaggcucuuuucagagccaccaaaaaaaaaaaaaaaaaaaaaaaaaaaaaaaaaaaaaaaaaaaaaaaaaaaaaaaaaaaaaaaaagaauu

SEQ ID NO: 40575 - RNA, 1736 nt, Artificial Sequence
  mRNA product Design a-2 (hSL-A64-N5) comprising derived and/or modified sequence from LASV(G733-SLE-2010;Clade IV)__AIT17154__GPCmut12 (opt5)
aggagaguccgcucagccagguugcagaagcggcuuagcguguguccuaaucuucucucugcguguagguaggccugugccgcaaacaagcuuaccaugggccagaucgugaccuucuuucaagaggucccccacguuauugaagaggugaugaacaucgugcugauugcccucagcauccuggcuguccuuaaggggcuguacaauuucgccacaugcggaauugugggccucguuuccuuucugcuucugugugggagaucuugcacgaccagccucuauaaaggaguguacgaacugcagacacuggagcucaacauggaaacccugaauauguguaugccucuuuccugcacaaagaacaauucucaucacuauaucauggucggcaacgagaccgggcuggagcucacacugaccaauacgagcaucauuaaccauaaauucuguaaucuuuccgacgcgcacaagaaaaaccuguacgaucaugcucucaugucuaucauuagcaccuuucaccuguccaucccgaauuucaaccaguaugaagccaugagcugcgacuuuaauggaggcaagauuucugugcaguacaaccugucccacagcuaugccggcgaugcugccaaucauugugggacaaucgcuaacggaguucuccaaaccuucaugcggauggccuggggcgggucuuacauugcgcuggacuccggacgcgauagaugggacugcaucaugacaagcuaccaguaucuuaucauucagaacaccacgugggaggaucacugucaguuuucucggcccuccccuaucggcuaccuggggcuccugagccaacgcacaagagacauuuauaucucccggcgccuucugggaaccuucacauggacccucucugauagcgaaggcaaggacacccccggcggguacugccugacaagauggaugcugauugaggccgagcucaaauguuuuggaaauacggcuguggccaagugcaacgaaaaacaugaugaggaguucugcgacaugcugcggcuuuuugauuucuguaagcaggcuauccagcgccugaaagccgaagcgcagauguccauccaacucauuaauaaggccgucaacgcucugaucaaugaccagcuuauuaugaagaaccaccugagagacaucaugggcauuccuuauugcaauuacagcaaauauuguuaccucaaccacaccacaaccgggaagacaucucugcccaaaugcugucugguguccaauggaagcuaccucaacgaaacccauuucucugaugacaucgagcagcaagccgauaauaugaucacggagaugcugcagaaggaauauauggagcggcagggcaaaacaccucuugggcugguggaccucuuugucuucagcaccuccuuuuaccugauuucuaucuuccugcaccuuguuaagauuccgacccaucgccacguggugggaaaaagcugccccaagccucauagacucaaccacaugggcaucuguuccugcggccuguaugggcagcccggagucccugugaaguggaaacggugaggacuagucccuguucccagagcccacuuuuuuuucuuuuuuugaaauaaaauagccugucuuucagaucucaaaggcucuuuucagagccaccaaaaaaaaaaaaaaaaaaaaaaaaaaaaaaaaaaaaaaaaaaaaaaaaaaaaaaaaaaaaaaaaagaauu

SEQ ID NO: 40576 - RNA, 1736 nt, Artificial Sequence
  mRNA product Design a-2 (hSL-A64-N5) comprising derived and/or modified sequence from MOPV/LASV reassortant(IGS-1;Clade IV)__AFY05576__GPCmut12 (opt5)
aggagaguccgcucagccagguugcagaagcggcuuagcguguguccuaaucuucucucugcguguagguaggccugugccgcaaacaagcuuaccaugggccagaucgugaccuucuuucaagaggucccccacguuauugaagaggugaugaacaucgugcugauugcccucagcguccuggcugugcuuaaggggcuguacaauuucgccacaugcggacucguuggccuggugacguuucuucugcucugugggagauccugcaccacaucucuguauaaaggagucuacgaacugcagacccucgagcugaacauggaaacacuuaauauguguaugccucugagcugcaccaagaacaauucccaucacuauaucauggugggcaacgagacagggcucgagcugacccuuacgaauaccucuauuaucaaccauaaauucuguaaucugagcgacgcgcacaagaaaaaccucuacgaucaugcucugauguccaucauuucuacauuucaccugagcaucccgaauuucaaccaguaugaagccauguccugcgacuuuaauggaggcaagauuagcguucaguacaaccucucucacuccuaugccggcgaugcugccaaucauugugggaccguggcuaacggaguccugcaaacauucaugcggauggccuggggcgggagcuacaucgcgcuugacucuggacgcggcaacugggauugcauuaugaccuccuaccaguaucugaucauucagaauacgacaugggaggaccacugucaguuuagcagacccucuccuaucggguaccucggacugcuuucccaacggacccgcgauaucuauauuagcagacggcugcucggcacauucaccuggacccuguccgacucugaaggcgaggauacacccgggggauacugccugacgcgcuggaugcucaucgaggccgaacugaaguguuuuggcaacaccgcuguggccaaaugcaaugagaagcaugacgaagaguucugcgauaugcuuagacuguuugacuucuguaaacaggcuauucagcggcucaaggccgaagcgcagaugagcauccaacugauuaacaaagccgugaaugcucuuaucaacgaucagcugaucaugaagaaucaccuccgcgacauuauggggaucccuuauugcaacuacuccaaguauuguuaccugaaucacacaaccacaggaagaaccagccugcccaaaugcugucucgucucuaacggcuccuaccugaaugagacgcauuucagcgacgauauugagcagcaagccgacaacaugaucacagaaaugcuucagaaggaguauauggaacggcaggggaaaaccccucugggacucguugaucuguuuguguucucuaccagcuuuuaccugauuuccaucuuccuucaccucgugaagaucccgacacaucgccacauugucggcaaaucuugccccaagccucauagacugaaucacaugggcaucuguagcugcgggcuguauaaacagcccggagugccuguuaaguggaagcggugaggacuagucccuguucccagagcccacuuuuuuuucuuuuuuugaaauaaaauagccugucuuucagaucucaaaggcucuuuucagagccaccaaaaaaaaaaaaaaaaaaaaaaaaaaaaaaaaaaaaaaaaaaaaaaaaaaaaaaaaaaaaaaaaagaauu

SEQ ID NO: 40577 - RNA, 1736 nt, Artificial Sequence
  mRNA product Design a-2 (hSL-A64-N5) comprising derived and/or modified sequence from LASV(LM765-SLE-2012;Clade IV)__AIT17814__GPCmut12 (opt5)
aggagaguccgcucagccagguugcagaagcggcuuagcguguguccuaaucuucucucugcguguagguaggccugugccgcaaacaagcuuaccaugggccagaucgugaccuucuuucaagaggucccccacguuauugaagaggugaugaacaucgugcugauugcccucagcauccuggcuguccuuaaggggcuguacaauuucgccacaugcggacucgugggccugguuacguuucuucugcucugugggagauccugcaccacaucucuguauaaaggaguguacgaacugcagacccucgagcugaacauggaaacacuuaauauguguaugccucugagcugcaccaagaacaauucccaucacuauauuauggucggcaacgagacagggcucgagcugacccuuacgaauaccucuaucaucgaccauaaauucuguaaccugagcgaugcgcaccggaagaaucucuacgaccaugcucugauguccauuaucucuacauuucaccugagcauuccgaacuucaaucaguaugaagccauguccugcgauuuuaacggaggcaaaaucagcgugcaguacaaucucucucacuccuaugccaaggacgcugccgaucauuguggcaccguugcuaacggggugcugcaaacauucaugcgcauggccuggggaggcagcuacauugcgcuugacucugggagaggacggugggauugcaucaugaccuccuaccaguaucugauuauccagaauacgacaugggaggaccacugucaguuuagccgccccucuccuaucggcuaccucgggcugcuuucccaaagaacccgggauauuuauaucagccgcagacugcucggaacauucaccuggacccuguccgacucugaaggcaaggauacacccggcggguacugccugacgcgguggaugcucauugaggccgagcugaaauguuuuggaaacaccgcugucgccaagugcaacgaaaaacaugacgaggaguucugcgauaugcuucgccuguuugacuucuguaagcaggcuauccagagacucaaagccgaagcgcagaugagcauucaacugaucaauaaggccgugaacgcucuuaucaaugaccagcugauuaugaagaaccaccuccgggauaucaugggcauuccuuauugcaauuacuccaaauauuguuaccugaaccacacaaccacagggaagaccagccugcccaaaugcugucucgugucuaauggauccuaccugaacgaaacgcauuucagcgacgauaucgagcagcaagccgacaauaugauuacagagaugcuucagaaggaauauauggagcgccagggcaaaaccccucuggggcucgucgaucuguuuguuuucucuaccagcuuuuaccugaucuccaucuuccuucaccucgugaagauuccgacacauagacacaucgugggaaaacccugcccuaagccccaucggcugaaccacaugggcauuuguucuugcggccuguauaagcagccugggguccccgugaaauggaagcgcugaggacuagucccuguucccagagcccacuuuuuuuucuuuuuuugaaauaaaauagccugucuuucagaucucaaaggcucuuuucagagccaccaaaaaaaaaaaaaaaaaaaaaaaaaaaaaaaaaaaaaaaaaaaaaaaaaaaaaaaaaaaaaaaaagaauu

SEQ ID NO: 40578 - RNA, 1736 nt, Artificial Sequence
  mRNA product Design a-2 (hSL-A64-N5) comprising derived and/or modified sequence from LASV(LM776-SLE-2012;Clade IV)__AIT17824__GPCmut12 (opt5)
aggagaguccgcucagccagguugcagaagcggcuuagcguguguccuaaucuucucucugcguguagguaggccugugccgcaaacaagcuuaccaugggccagaucgugaccuucuuucaagaggucccccacguuauugaagaggugaugaacaucgugcugauugcccucagcauccuggcuguccuuaaggggcuguacaauuucgccacaugcggacucgugggccugguuacguuucuucugcucugugggagauccugcaccacaucuguguauaaaggagucuacgaacugcagacccuggagcucaacauggaaacacugaauauguguaugccucuuagcugcaccaagaacaauucccaucacuauauuauggugggcaacgagacagggcuggagcucacccugacgaauaccucuaucaucaaccauaaauucuguaaucuuagcgacgcgcacaagaaaaaccuguacgaucaugcucucauguccauuaucucuacauuucaccugagcauuccgaauuucaaccaguaugaagccauguccugcgacuuuaauggaggcaagaucagcguucaguacaaccugucucacuccuaugccggcgaugcugccaaucauugugggaccguggcuaacggaguccuccaaacauucaugcggauggccuggggcgggagcuacauugcgcuggacucuggacacggcaagugggauugcaucaugaccuccuaccaguaucuuauuauccagaacacgacaugggaggaccauugucaguuuagccgccccucuccuaucggguaccugggacuccugucccaaagaacccgggauauuuauaucagccgcagacuucugggcacauucaccuggacccucuccgacucugaaggcaaagauacacccgggggauacugccugacgcgguggaugcugauugaggccgagcucaaguguuuuggcaauaccgcuguggccaaaugcaacgaaaagcacgacgaggaguucugcgauaugcugcgccuuuuugacuucuguaaacaggcuauccagagacugaaggccgaagcgcagaugagcauucaacucaucaauaaggccgugaacgcucugaucaaugaucagcuuauuaugaaaaaccaucugcgggacaucauggggauuccuuauugcaauuacuccaaguauuguuaccucaaccacacaaccacaggaaaaaccagccugcccaagugcugucuggucucuaauggcuccuaccucaacgaaacgcacuucagcgacgauaucgagcagcaagccgacaauaugauuacagagaugcugcagaaagaauauauggagcgccaggggaagaccccucuuggacugguugaucucuuuguguucucuaccagcuuuuaccugaucuccaucuuccugcaucuugugaaaauuccgacacacagacauaucgucggcaagucuugccccaagccucaccggcucaaccacaugggcauuuguagcugcgggcuguauaaacagcccggagugccuguucgcuggaagagaugaggacuagucccuguucccagagcccacuuuuuuuucuuuuuuugaaauaaaauagccugucuuucagaucucaaaggcucuuuucagagccaccaaaaaaaaaaaaaaaaaaaaaaaaaaaaaaaaaaaaaaaaaaaaaaaaaaaaaaaaaaaaaaaaagaauu

SEQ ID NO: 40579 - RNA, 1736 nt, Artificial Sequence
  mRNA product Design a-2 (hSL-A64-N5) comprising derived and/or modified sequence from LASV(Mad39;Clade IV)__ANH09722__GPCmut12 (opt5)
aggagaguccgcucagccagguugcagaagcggcuuagcguguguccuaaucuucucucugcguguagguaggccugugccgcaaacaagcuuaccaugggccagaucgugaccuucuuucaagaggucccccacguuauugaagaggugaugaacaucgugcugauugcccucagcauccuggcuguccuuaaggggcuguacaauguggccacaugcggacucauuggccugguuacguuccuucugcucugugggagauccugcaccacaacccuguauaaaggaguguacgaacugcaggcgcucgagcugaacauggaaacacuuaauauguguaugccucugucuugcaccaagaacaauagccaucacuauauccgggucggcaacgagacagggcucgagcugacccuuacgaauaccucccugaucaaccauaaauuuuguaaucucucugacgcucacaagaaaaaccuguacgaucaugcccugaugagcauuaucuccacauuccaccucucuauuccgaauuuuaaccaguaugaagccaugagcugcgacuucaaugauggaaagaucuccgugcaguacaaccugagccacaccuaugcuggcgacacagccaaucauuguggcaccguugcuaacggggugcuucaaacguuuaugcgcauggccuggggaggcucuuacauugcgcuggauuccgggagaggaggcugggacugcaucaugacaagcuaccaguaucucauuauccagaacaccacaugggaggaucacugucaguucucucggcccuccccuaucggguaccugggacuucugagccaacgcaccagagacauuuauaucucucggcgccuccugggcaccuuuacauggacgcuguccgauagcgaaggcaaggacacccccgggggauacugccucacaagauggaugcugauugaggccgagcuuaaauguuucggcaauaccgcugucgccaagugcaacgaaaaacaugaugaggaauuuugcgacaugcugcgccucuucgauuuuuguaagcaggcuauccagcggcugaaagccgaggcgcagauguccauucaacuuaucaauaaggccgugaacgcucugaucaaugaccagcucauuaugaagaaccaccugagagacaucauggggauuccuuauugcaauuacucuaaauauuguuaccugaaccacacagugaccggaaagacgagccuccccaaaugcugucuggucuccaauggcagcuaccuuaacgaaacacauuucucugaugacaucgagcagcaagccgauaauaugauuaccgagaugcugcagaaggaauauauggagcggcaggggaaaaccccucucggacugguugaccuguucguguuuuccaccagcuucuaccuuaucucuaucuuucuccaccuggugaagauuccgacacaucgccacgucgugggcaaacccugcccuaagccccauagacugaaccacaugggcaucuguagcugcggguucuauaagcagccuggaguucccgugcgguggaaacgcugaggacuagucccuguucccagagcccacuuuuuuuucuuuuuuugaaauaaaauagccugucuuucagaucucaaaggcucuuuucagagccaccaaaaaaaaaaaaaaaaaaaaaaaaaaaaaaaaaaaaaaaaaaaaaaaaaaaaaaaaaaaaaaaaagaauu

SEQ ID NO: 40580 - RNA, 1736 nt, Artificial Sequence
  mRNA product Design a-2 (hSL-A64-N5) comprising derived and/or modified sequence from LASV(Z0947-SLE-2011;Clade IV)__AIT17840__GPCmut12 (opt5)
aggagaguccgcucagccagguugcagaagcggcuuagcguguguccuaaucuucucucugcguguagguaggccugugccgcaaacaagcuuaccaugggccagaucgugaccuucuuucaagaggucccccacguuauugaagaggugaugaacaucgugcugauugcccucagcauccuggcuguccuuaaggggcuguacaauuucgccacaugcggacucgugggccugguuacguuucuucugcucugugggagauccugcaccauuucucuguauaaaggaguguacgaacugcagacacucgagcugaacauggaaacccuuaauauguguaugccucugagcugcacaaagaacaauucccaucacuauaucauggucggcaacgagaccgggcucgagcugacacuuaccaauacgucuaucauuaaccauaaauucuguaaucugagcgacgcgcacaagaaaaaccucuacgaucaugcucugauguccaucauuucuaccuuucaccugagcaucccgaauuucaaccaguaugaagccauguccugcgacuuuaauggaggcaagauuagcgugcaguacaaccucucucacuccuaugccggcgaugcugccaaucauugugggacaguugcuaacggagugcugcaaaccuucaugcggauggccuggggcgggagcuacaucgcgcuugacucuggacgcgauagaugggacugcauuaugacauccuaccaguaucugaucauccagaacaccacgugggaggaucacugucaguuuagccggcccucuccuauuggcuaccucgggcugcuuucccaacgcacaagagacaucuauauuagccggcgccugcucggaaccuucacauggacccuguccgauucugaaggcaaggacacccccggcggguacugccugacaagauggaugcucaucgaggccgagcugaaauguuuuggaaauacggcugucgccaagugcaacgaaaaacaugaugaggaguucugcgacaugcuucggcuguuugauuucuguaagcaggcuauucagcgccucaaagccgaagcgcagaugagcauccaacugaucaauaaggccgugaacgcucuuauuaaugaccagcugaucaugaagaaccaccucagagacauuaugggcaucccuuauugcaauuacuccaaauauuguuaccugaaccacaccacaaccgggaagacaagccugcccaaaugcugucucgugucuaauggauccuaccugaacgaaacccauuucagcgaugacauugagcagcaagccgauaauaugaucacggagaugcuucagaaggaauauauggagcggcagggcaaaacaccucuggggcucgucgaccuguuuguuuucucuaccagcuuuuaccugaucuccauuuuccuucaccucgugaagaucccgacccaucgccacauugugggaaaacccugcccuaagccccauagacugaaccacaugggcaucuguucuugcggccuguauaagcagccugggguccccgugaaauggaagcggugaggacuagucccuguucccagagcccacuuuuuuuucuuuuuuugaaauaaaauagccugucuuucagaucucaaaggcucuuuucagagccaccaaaaaaaaaaaaaaaaaaaaaaaaaaaaaaaaaaaaaaaaaaaaaaaaaaaaaaaaaaaaaaaaagaauu

SEQ ID NO: 40581 - RNA, 1767 nt, Artificial Sequence
  mRNA product Design a-2 (hSL-A100) comprising derived and/or modified sequence from LASV(Josiah;Clade IV)__NP_694870__GPCmut12 (opt1)
aggagaguccgcucagccagguugcagaagcggcuuagcguguguccuaaucuucucucugcguguagguaggccugugccgcaaacaagcuuaccaugggccagaucgugaccuucuuccaggaggucccccacgugaucgaggaggugaugaacaucguccugaucgcccucagcgugcuggccgugcugaaggggcucuacaacuucgcgaccugcggccuggucgggcuggugacguuccuccugcugugcggccgcuccugcaccaccagccucuacaaggggguguacgagcugcagacccuggagcucaacauggagacgcugaacaugugcaugccgcuguccugcaccaagaacaacagccaccacuacaucauggucggcaacgagaccggccucgagcugacgcugaccaacaccuccaucaucaaccacaaguucugcaaccucagcgacgcccacaagaagaaccuguacgaccacgcccugauguccaucaucagcaccuuccaccucuccauccccaacuucaaccaguacgaggccaugagcugcgacuucaacgggggcaagaucuccgugcaguacaaccugagccacuccuacgccggggacgcggccaaccacugcggcacgguggccaacgggguccugcagaccuucaugcggauggccuggggcggcagcuacaucgcgcucgacuccgggcgcggcaacugggacugcaucaugaccagcuaccaguaccugaucauccagaacaccacgugggaggaccacugccaguucucccggcccagccccaucggguaccugggccuccugucccagcgcacccgggacaucuacaucagccgccggcugcucggcaccuucaccuggacgcugagcgacuccgaggggaaggacaccccgggcggguacugccugacccgcuggaugcucaucgaggccgagcugaagugcuucggcaacaccgccguggccaagugcaacgagaagcacgacgaggaguucugcgacaugcugcggcuguucgacuucugcaagcaggccauccagcgccugaaggcggaggcccagaugagcauccagcugaucaacaaggccgugaacgcccucaucaacgaccagcugaucaugaagaaccaccuccgggacaucauggggauccccuacugcaacuacuccaaguacugcuaccucaaccacacgaccaccggccgcaccagccugcccaagugcugccuggucuccaacggcagcuaccucaacgagacgcacuucuccgacgacaucgagcagcaggccgacaacaugaucaccgagaugcugcagaaggaguacauggagcggcaggggaagacgccccugggccucguggaccuguucguguucagcaccuccuucuaccugaucagcaucuuccugcaccucgucaagaucccgacccaccgccacaucguggggaaguccugccccaagccccaccggcugaaccacaugggcaucugcagcugcgggcuguacaagcagcccggcgugccggucaaguggaagcgcugaggacuagucccuguucccagagcccacuuuuuuuucuuuuuuugaaauaaaauagccugucuuucagaucucaaaggcucuuuucagagccaccaaaaaaaaaaaaaaaaaaaaaaaaaaaaaaaaaaaaaaaaaaaaaaaaaaaaaaaaaaaaaaaaaaaaaaaaaaaaaaaaaaaaaaaaaaaaaaaaaaaaa

SEQ ID NO: 40582 - RNA, 1764 nt, Artificial Sequence
  mRNA product Design a-2 (hSL-A100) comprising derived and/or modified sequence from LASV(LP;Clade I)__AAF86701__GPCmut12 (opt1)
aggagaguccgcucagccagguugcagaagcggcuuagcguguguccuaaucuucucucugcguguagguaggccugugccgcaaacaagcuuaccaugggccagaucaucaccuucuuccaggaggugccccacgucaucgaggaggugaugaacaucgugcugaucgcccucagccugcuggccauccucaaggggcuguacaacaucgcgaccugcggcaucaucgggcuggucgccuuccucuuccugugcggcaaguccugcagccugacgcucaagggcggguacgagcugcagacccuggagcucaacauggagacccugaacaugugcaugccgcuguccugcacgaagaacagcucccaccacuacauccgcgugggcaacgagaccgggcucgagcugacccugaccaacacgagcaucaucaaccacaaguucugcaaccucuccgacgcccacaagaagaaccuguacgaccacgcccugaugagcaucaucuccaccuuccaccucagcauccccaacuucaaccaguacgaggccauguccugcgacuucaacggcgggaagaucagcgugcaguacaaccugucccacagcuacgcgggcgacgccgccgagcacugcgggaccgucgccaacggcgugcugcagaccuucaugcggauggcguggggcgggcgcuacaucgcccucgacuccggcaaggggaacugggacugcaucaugacgagcuaccaguaccugaucauccagaacaccaccugggaggaccacugccaguucucccggcccagccccaucggcuaccugggccuccugucccagcgcacccgggacaucuacaucagccgccggcugcucgggacguucaccuggacccugagcgacuccgagggcaacgagacccccgggggcuacugccugacgcgcuggaugcucaucgaggccgagcugaagugcuucgggaacaccgccguggccaagugcaacgagaagcacgacgaggaguucugcgacaugcugcggcuguucgacuucugcaagcaggcgauccgccggcugaaggccgaggcccagaugagcauccagcugaucaacaaggccgucaacgcccucaucaacgaccagcugaucaugaagaaccaccuccgcgacaucaugggcauccccuacugcaacuacuccaaguacugcuaccucaaccacaccagcuccggccggaccagccugcccaagugcugccugaucuccaacgggagcuaccucaacgagacgcaguucuccgacgacaucgagcagcaggcggacaacaugaucaccgagaugcugcagaaggaguacaucgagcgccagggcaagaccccgcuggggcucguggacaucuucaucuucagcaccuccuucuaccugaucagcaucuuccugcaccugaucaagaucccgacgcaccggcacaucgugggcaagcccugccccaagccccaccgccucaaccacaugggggucugcuccugcggccuguacaagcacccgggcgugcccaccaaguggaagcggugaggacuagucccuguucccagagcccacuuuuuuuucuuuuuuugaaauaaaauagccugucuuucagaucucaaaggcucuuuucagagccaccaaaaaaaaaaaaaaaaaaaaaaaaaaaaaaaaaaaaaaaaaaaaaaaaaaaaaaaaaaaaaaaaaaaaaaaaaaaaaaaaaaaaaaaaaaaaaaaaaaaaa

SEQ ID NO: 40583 - RNA, 1764 nt, Artificial Sequence
  mRNA product Design a-2 (hSL-A100) comprising derived and/or modified sequence from LASV(803213;Clade II)__AAF86703__GPCmut12 (opt1)
aggagaguccgcucagccagguugcagaagcggcuuagcguguguccuaaucuucucucugcguguagguaggccugugccgcaaacaagcuuaccaugggccagaucaucaccuucuuccaggaggugccccacgucaucgaggaggugaugaacaucgugcugaucgcccucagccugcuggccauccucaaggggaucuacaacgucgcgaccugcggccuguucgggcugaucuccuuccuccugcugugcggccgcagcugcuccgugacguacaaggggguguacgagcuccagacccuggagcugaacauggccaaccucaacaugugcaugccgcugagcugcaccaagaacaacucccaccacuacaucauggucggcaacgagacgggccuggagcucacccugaccaacaccagcaucaucaaccacaaguucugcaaccuguccgacgcccacaagaagaaccucuacgaccacgcccugaugagcaucaucuccacguuccaccugagcauccccaacuucaaccaguacgaggccauguccugcgacuucaacgggggcaagaucagcgugcaguacaaccucucccacagcuucgcgguggacgccgccaaccacugcgggaccaucgccaacggcguccugcagaccuucaugcggauggcguggggcggguccuacaucgcccuggacagcggcaaggggaacugggacugcaucaugaccuccuaccaguaccucaucauccagaacacgaccugggaggaccacugccaguucagccgccccucccccaucggcuaccuggggcugcucagccagcggacccgcgacaucuacaucagccggcgccugcugggcaccuucacguggacccucuccgacagcgagggcaacgaggcccccgggggcuacugccugacccgguggaugcugaucgaggccgagcucaagugcuucgggaacaccgccguggcgaagugcaacgagaagcacgacgaggaguucugcgacaugcugcgccuguucgacuucugcaagcaggccaucaagcggcucaagacggaggcccagauguccauccagcugaucaacaaggccgugaacgcccugaucaacgaccagcucaucaugaagaaccaccuccgcgacaucaugggcauccccuacugcaacuacagccgguacugcuaccugaaccacaccgucaccgggaagaccucccugccccgcugcugccuggugagcaacggcuccuaccugaacgagacgcacuucagcgacgacaucgagcagcaggcggacaacaugaucaccgagaugcuccagaaggaguacauggaccggcagggcaagaccccgcuggggcugguggaccucuucgucuucuccaccagcuucuaccugaucuccaucuuccugcaccuggugaagaucccgacgcaccgccacaucgugggcaagcccugccccaagccccaccggcucaaccacauggggaucugcagcugcggccuguacaagcacccggggguccccgugaaguggaagcgcugaggacuagucccuguucccagagcccacuuuuuuuucuuuuuuugaaauaaaauagccugucuuucagaucucaaaggcucuuuucagagccaccaaaaaaaaaaaaaaaaaaaaaaaaaaaaaaaaaaaaaaaaaaaaaaaaaaaaaaaaaaaaaaaaaaaaaaaaaaaaaaaaaaaaaaaaaaaaaaaaaaaaa

SEQ ID NO: 40584 - RNA, 1764 nt, Artificial Sequence
  mRNA product Design a-2 (hSL-A100) comprising derived and/or modified sequence from LASV(GA391;Clade III)__CAA36645__GPCmut12 (opt1)
aggagaguccgcucagccagguugcagaagcggcuuagcguguguccuaaucuucucucugcguguagguaggccugugccgcaaacaagcuuaccaugggccagaucgugaccuucuuccaggaggucccccacgugaucgaggaggugaugaacaucguccugaucgcccucagcauccuggccauccugaaggggcucuacaacguggcgaccugcggccugaucgggcuggugacguuccuccugcuguccggccgcagcugcucccucaucuacaaggggaccuacgagcugcagacccuggagcucaacauggagacccugaacaugugcaugccgcugagcugcaccaagaacaacucccaccacuacauccgggucggcaacgagaccggccucgagcugacccugacgaacaccagcauccucaaccacaaguucugcaaccuguccgacgcccacaagcgcaaccuguacgaccacagccucauguccaucaucagcaccuuccaccuguccauccccaacuucaaccaguacgaggccaugagcugcgacuucaacgggggcaagaucaccgugcaguacaaccugucccacagcuucgccguggacgccgcggggcacugcggcacgcucgccaacgggguccugcagaccuucaugcggauggccuggggcggcuccuacaucgcccuggacagcgggcgcggcaacugggacugcaucaugaccuccuaccaguaccucaucauccagaacaccacgugggacgaccacugccaguucagccggcccucccccaucggguaccugggccugcucagccagcgcacccgggacaucuacaucagccgccggcugcugggcaccuucaccuggacgcucuccgacagcgaggggaacgagaccccgggcggguacugccugacccgcuggaugcugaucgaggcggagcucaagugcuucggcaacaccgccguggccaagugcaacgagaagcacgacgaggaguucugcgacaugcugcggcuguucgacuucugcaagcaggccauccgccggcucaagacggaggcccagauguccauccagcugaucaacaaggcggugaacgcccugaucaacgaccagcucaucaugaagaaccaccuccgcgacaucauggggauccccuacugcaacuacagccgguacugcuaccugaaccacaccuccaccggcaagaccagccugccccgcugcugccugaucuccaacggcagcuaccugaacgagacgaaguucuccgacgacaucgagcagcaggccgacaacaugaucaccgagaugcuccagaaggaguacaucgaccggcaggggaagacgccccugggccuggucgaccuguucguguucagcaccuccuucuaccucaucagcaucuuccugcaccuggugaagaucccgacccaccgccacaucgucgggaagcccugccccaagccccaccggcucaaccacaugggcaucugcuccugcgggcuguacaagcagccgggcgugcccgugcgcuggaagcggugaggacuagucccuguucccagagcccacuuuuuuuucuuuuuuugaaauaaaauagccugucuuucagaucucaaaggcucuuuucagagccaccaaaaaaaaaaaaaaaaaaaaaaaaaaaaaaaaaaaaaaaaaaaaaaaaaaaaaaaaaaaaaaaaaaaaaaaaaaaaaaaaaaaaaaaaaaaaaaaaaaaaa

SEQ ID NO: 40585 - RNA, 1767 nt, Artificial Sequence
  mRNA product Design a-2 (hSL-A100) comprising derived and/or modified sequence from LASV(AV;Clade V)__CCA30314__GPCmut12 (opt1)
aggagaguccgcucagccagguugcagaagcggcuuagcguguguccuaaucuucucucugcguguagguaggccugugccgcaaacaagcuuaccaugggccagaucgugaccuucuuccaggaggucccccacgugaucgaggaggugaugaacaucguccugaucgcccucagcauccuggccgugcugaaggggcucuacaacaucgcgaccugcggccugaucgggcugaucacguuccuccugcugugcggccgcuccugcagcuccaaccucuacaaggggguguacgagcugcagagccuggaccucaacauggagacccugaacaugugcaugccgcuguccugcaccaagaacaacagccaccacuacauccgggucggcaacgacacgggccucgagcugacccugaccaacaccuccauccucaaccacaaguucugcaaccugagcgacgcccacaagaaggaccuguacgaccacgcccucauguccaucaucagcacguuccaccuguccauccccaacuucaaccaguacgaggccaugagcugcgacuucaacgggggcaagaucuccgugcaguacaaccugagccacuccuacgccaucgacgcggccaaccacugcgggaccguggccaacggcauccuccagaccuucaugcgcauggccuggggcgggagcuacaucgcgcuggacuccggccgggggaacugggacugcaucaugaccagcuaccaguaccugaucauccagaacacgaccugggagaaccacugccaguucucccgccccagccccaucggcuaccucgggcugcugagccagcggacccgcgacaucuacaucucccggcgccuccugggcaccuucacguggacccugagcgacuccgagggcaacgccacccccgggggcuacugccucacccgguggaugcugaucgaggccgagcugaagugcuucgggaacacggccgucgccaagugcaacgagaagcacgacgaggaguucugcgacaugcuccgccuguucgacuucugcaagcaggcgaucagccggcugaaguccgaggcccagaugagcauccagcucaucaacaaggccgugaacgcccugaucaacgaccagcugaucaugaagaaccaccuccgcgacaucaugggcauccccuacugcaacuacuccaaguacugcuaccugaaccacaccaucaccgggaagaccagccugcccaagugcugccucguguccaacggcagcuaccugaacgagacgcacuucuccgacgacaucgagcagcaggccgacaacaugaucaccgagaugcugcagaaggaguacauggagcggcagggcaagaccccgcucgggcuggucgaccuguucguguucagcaccuccuucuaccugaucagcaucuuccuccgccuggugaagaucccgacgcaccggcacaucgucggcaagcccugccccaagccccaccgccugaaccacauggggaucugcuccugcggccucuacaagcagccgggggugcccgugcgguggaagcgcugaggacuagucccuguucccagagcccacuuuuuuuucuuuuuuugaaauaaaauagccugucuuucagaucucaaaggcucuuuucagagccaccaaaaaaaaaaaaaaaaaaaaaaaaaaaaaaaaaaaaaaaaaaaaaaaaaaaaaaaaaaaaaaaaaaaaaaaaaaaaaaaaaaaaaaaaaaaaaaaaaaaaa

SEQ ID NO: 40586 - RNA, 1764 nt, Artificial Sequence
  mRNA product Design a-2 (hSL-A100) comprising derived and/or modified sequence from LASV(Togo/2016/7082;Clade VI)__AMR44577__GPCmut12 (opt1)
aggagaguccgcucagccagguugcagaagcggcuuagcguguguccuaaucuucucucugcguguagguaggccugugccgcaaacaagcuuaccaugggccagaucaucaccuucuuccaggaggugccccacgucaucgaggaggugaugaacaucgugcugaucgcccucagccugcuggccauccucaagggggucuacaacguggcgaccugcggcaucaucgggcuggugacguuccuguuccucugcggccgcuccugcagccugaucuacaagggguccuacgagcugcagacccucgagcugaacauggagacccugaacaugugcaugccgcucagcugcacgaagaacuccagccaccacuacauccgggucggcaacgagaccggccuggagcugacccucaccaacacguccaucaucaaccacaaguucugcaaccugagcgacgcccacaagcgcaaccuguacgaccacgcccucauguccauccugagcaccuuccaccuguccauccccaacuucaaccaguacgaggccaugagcugcgacuucaacgggggcaagaucuccgugcaguacaaccucagccacgccuacgcgguggacgccgccgagcacugcgggaccgucgccaacggcgugcugcagaccuucaugcggauggcguggggcggguccuacaucgcccuggacagcggccgcgggaacugggacugcaucaugacguccuaccaguaccucaucauccagaacaccaccugggaggaccacugccaguucagccggcccucccccaucggcuaccuggggcugcucagccagcgcacccgggacaucuacaucagccgccggcugcugggcacguucaccuggacccucuccgacagcgagggcaacgagacccccgggggcuacugccugacgcgcuggaugcugaucgaggccgagcucaagugcuucgggaacaccgccguggccaagugcaacgagaagcacgacgaggaguucugcgacaugcugcggcuguucgacuucugcaagcaggcgauccagcgccucaaguccgaggcccagaugagcauccagcugaucaacaaggccgucaacgcccugaucaacgaccagcucaucaugaagaaccaccuccgggacaugaugggcauccccuacugcaacuacuccaaguacugcuaccugaaccacaccagcuccgggcgcaccagccugcccaagugcugccugguguccaacggcagcuaccugaacgagacgcacuucuccgacgacaucgagcagcaggccgacaacaugaucaccgagaugcuccagaaggaguacaucgaccggcagggcaagaccccgcuggggcugguggaccucuucgucuucagcaccuccuucuaccugaucagcaucuuccugcaccugaucaagaucccgacgcaccgccacaucgugggcaagcccugccccaagccccaccggcucaaccacauggggaucugcuccugcggccuguacaagcagccgggggugcccacccgcuggaagcggugaggacuagucccuguucccagagcccacuuuuuuuucuuuuuuugaaauaaaauagccugucuuucagaucucaaaggcucuuuucagagccaccaaaaaaaaaaaaaaaaaaaaaaaaaaaaaaaaaaaaaaaaaaaaaaaaaaaaaaaaaaaaaaaaaaaaaaaaaaaaaaaaaaaaaaaaaaaaaaaaaaaaa

SEQ ID NO: 40587 - RNA, 1764 nt, Artificial Sequence
  mRNA product Design a-2 (hSL-A100) comprising derived and/or modified sequence from LASV(KAK-428;Clade n.d. (VII))__ANH09740__GPCmut12 (opt1)
aggagaguccgcucagccagguugcagaagcggcuuagcguguguccuaaucuucucucugcguguagguaggccugugccgcaaacaagcuuaccaugggccagaucgugaccuucuuccaggaggucccccacgugaucgaggaggugaugaacaucguccugaucgcccucagccugcuggccauccucaaggggcuguacaacuucgcgaccugcggcgugaucgggcugaucacguuccuccugcugugcggccgcuccugcagcgccaccuacaaggggcaguacgagcuccagacccuggagcugaacauggagucccucaacaugugcaugccgcugagcugcacgaagaacaacucccaccacuacauccgggccggcaacaacaccggccuggagcucacccugaccaacacgagcaucaucucccacaaguucugcaaccugagcgacgcccacaagaagaaccucuacgaccacacccugauguccaucaucaccaccuuccaccugagcauccccaacuucaaccaguacgaggccauguccugcgacuucaacgggggcaagaucagcauccaguacaaccucucccacagcuacgcgggggacgccgcccagcacugcggcacgguggccaacgggguccugcagaccuucaugcgcauggcguggggcggcuccuaccuggcccucgacagcgggcggcgcggcugggacugcaucaucuccagcuaccaguaccugaucauccagaacaccaccugggacgaccacugccaguucucccggcccagccccaucggguaccugggcuucgugagccagaagacgcgcgacaucuacaucucccggcgccuccugggcaccuucaccuggacccugagcgacuccgaggggcacgacaugccgggcggguacugccucacgcgguggaugcugaucgaggccgaccugaagugcuucggcaacaccgccguggccaagugcaacgagaagcacgacgaggaguucugcgacauguggcgccucuucgacuucugcaagcaggcgauccagcggcugaaggccgaggcccagaugaacauccagcugaucaacaaggccgucaacgcccucaucaacgaccagcugaugaugaagaaccaccuccgcgacaucauggggauccccuacugcaacuacagcaaguucugcuaccugaacaacaccaccacgggccggaccucccugccccgcugcugccugaucagcaacggcuccuaccucaacgagacccacuucagcgacgacaucgagcagcaggcggacaacaugaucaccgagaugcugcagaaggaguacauggaccggcaggggaagacgccccugggccucguggaccuguucguguucuccaccagcuucuaccugaucaccaucuuccuccaccuggucaagaucccgacccaccgccacaucguggggaagcccugccccaagccccaccggcugaaccacaugggcaucugcuccugcgggcuguacaagcagccgggcgugcccguccgcuggaagcggugaggacuagucccuguucccagagcccacuuuuuuuucuuuuuuugaaauaaaauagccugucuuucagaucucaaaggcucuuuucagagccaccaaaaaaaaaaaaaaaaaaaaaaaaaaaaaaaaaaaaaaaaaaaaaaaaaaaaaaaaaaaaaaaaaaaaaaaaaaaaaaaaaaaaaaaaaaaaaaaaaaaaa

SEQ ID NO: 40588 - RNA, 1764 nt, Artificial Sequence; identical to SEQ ID NO: 40582
  mRNA product Design a-2 (hSL-A100) comprising derived and/or modified sequence from LASV(Pinneo-NIG-1969;Clade I)__AIT17836__GPCmut12 (opt1)

SEQ ID NO: 40589 - RNA, 1764 nt, Artificial Sequence
  mRNA product Design a-2 (hSL-A100) comprising derived and/or modified sequence from LASV(ISTH0009-NIG-2011;Clade II)__AIT17404__GPCmut12 (opt1)
aggagaguccgcucagccagguugcagaagcggcuuagcguguguccuaaucuucucucugcguguagguaggccugugccgcaaacaagcuuaccaugggccagaucaucaccuucuuccaggaggugccccacgucaucgaggaggugaugaacaucgugcugaucgcccucagccugcuggccauccucaaggggaucuacaacgucgcgaccugcggccuguucgggcugguguccuuccuccugcugugcggccgcagcugcuccacgaccuacaaggggguguacgagcuccagacccuggagcuggacauggccagccucaacaugugcaugccgcuguccugcacgaagaacaacagccaccacuacaucauggucggcaacgagaccggccuggagcucacccugaccaacacguccaucaucaaccacaaguucugcaaccugagcgacgcccacaagaagaaccucuacgaccacgcccugauguccaucaucagcaccuuccaccuguccauccccaacuucaaccaguacgaggccaugagcugcgacuucaacgggggcaagaucuccgugcaguacaaccucagccacgcguacgccguggacgccgccaaccacugcgggaccaucgcgaacggcguccugcagaccuucaugcggauggccuggggcggguccuacaucgcccuggacagcggcaagggguccugggacugcaucaugacgagcuaccaguaccucaucauccagaacaccaccugggaggaccacugccaguucucccgccccagccccaucggcuaccuggggcugcucagccagcggacccgcgacaucuacaucucccggcgccugcugggcacguucaccuggacccucagcgacuccgagggcaacgagacccccgggggcuacugccugacgcgguggaugcugaucgaggccgagcucaagugcuucgggaacaccgccguggcgaagugcaacgagaagcacgacgaggaguucugcgacaugcugcgccuguucgacuucugcaagcaggccauccggcgccucaagaccgaggcccagaugagcauccagcugaucaacaaggccgugaacgcccugaucaacgaccagcucaucaugaagaaccaccuccgggacaucaugggcaucccguacugcaacuacuccaaguacugcuaccugaaccacaccgucacggggaagaccagccugccccgcugcugccugguguccaacggcagcuaccugaacgagacccacuucuccgacgacaucgagcagcaggcggacaacaugaucaccgagcuccugcagaaggaguacauggaccggcagggcaagacgccccuggggcucguggaccuguucgucuucagcaccuccuucuaccugaucagcaucuuccugcaccucaucaagaucccgacccaccgccacaucaccggcaagcccugccccaagccccaccggcugaaccacauggggaucugcuccugcggccuguacaagcacccgggggugcccgugaaguggaagcgcugaggacuagucccuguucccagagcccacuuuuuuuucuuuuuuugaaauaaaauagccugucuuucagaucucaaaggcucuuuucagagccaccaaaaaaaaaaaaaaaaaaaaaaaaaaaaaaaaaaaaaaaaaaaaaaaaaaaaaaaaaaaaaaaaaaaaaaaaaaaaaaaaaaaaaaaaaaaaaaaaaaaaa

SEQ ID NO: 40590 - RNA, 1764 nt, Artificial Sequence
  mRNA product Design a-2 (hSL-A100) comprising derived and/or modified sequence from LASV(ISTH2010-NIG-2012;Clade II)__AIT17482__GPCmut12 (opt1)
aggagaguccgcucagccagguugcagaagcggcuuagcguguguccuaaucuucucucugcguguagguaggccugugccgcaaacaagcuuaccaugggccagaucaucaccuucuuccaggaggugccccacgucaucgaggaggugaugaacaucgugcugaucgcccucagccugcuggccauccucaaggggaucuacaacgucgcgaccugcggccuguucgggcugguguccuuccuccugcugugcggccgcagcugcuccacgaccuacaaggggguguacgagcuccagacccuggagcuggacauggccagccucaacaugugcaugccgcuguccugcacgaagaacaacagccaccacuacaucauggucggcaacgagaccggccuggagcucacccugaccaacacguccaucaucaaccacaaguucugcaaccugagcgacgcccacaagaagaaccucuacgaccacgcccugauguccaucaucagcaccuuccaccuguccauccccaacuucaaccaguacgaggccaugagcugcgacuucaacgggggcaagaucuccgugcaguacaaccucagccacgcguacgccguggacgccgccaaccacugcgggaccaucgcgaacggcguccugcagaccuucaugcggauggccuggggcggguccuacaucgcccuggacagcggcaagggguccugggacugcaucaugacgagcuaccaguaccucaucauccagaacaucaccugggaggaccacugccaguucucccgccccagccccaucggcuaccuggggcugcucagccagcggacccgcgacaucuacaucucccggcgccugcugggcaccuucacguggacccucagcgacuccgagggcaacgagacccccgggggcuacugccugacccgguggaugcugaucgaggccgagcucaagugcuucgggaacacggccguggcgaagugcaacgagaagcacgacgaggaguucugcgacaugcugcgccuguucgacuucugcaagcaggccauccggcgccucaagaccgaggcccagaugagcauccagcugaucaacaaggccgugaacgcccugaucaacgaccagcucaucaugaagaaccaccuccgggacaucaugggcauccccuacugcaacuacuccaaguacugcuaccugaaccacaccgucaccgggaagacgagccugccccgcugcugccugguguccaacggcagcuaccugaacgagacccacuucuccgacgacaucgagcagcaggcggacaacaugaucaccgagcuccugcagaaggaguacaucgaccggcagggcaagaccccgcuggggcucguggaccuguucgucuucagcacguccuucuaccugaucagcaucuuccugcaccucgugaagaucccgacccaccgccacguggucggcaagcccugccccaagccccaccggcugaaccacauggggaucugcuccugcggccuguacaagcacccgggggugcccgugaaguggaagcgcugaggacuagucccuguucccagagcccacuuuuuuuucuuuuuuugaaauaaaauagccugucuuucagaucucaaaggcucuuuucagagccaccaaaaaaaaaaaaaaaaaaaaaaaaaaaaaaaaaaaaaaaaaaaaaaaaaaaaaaaaaaaaaaaaaaaaaaaaaaaaaaaaaaaaaaaaaaaaaaaaaaaaa

SEQ ID NO: 40591 - RNA, 1764 nt, Artificial Sequence
  mRNA product Design a-2 (hSL-A100) comprising derived and/or modified sequence from LASV(Lassa virus/H.sapiens-wt/NGA/2015/ISTH_0543;Clade II)__AVO03639__GPCmut12 (opt1)
aggagaguccgcucagccagguugcagaagcggcuuagcguguguccuaaucuucucucugcguguagguaggccugugccgcaaacaagcuuaccaugggccagaucaucaccuucuuccaggaggugccccacgucaucgaggaggugaugaacaucgugcugaucgcccucagccugcuggccauccucaaggggaucuacaacgucgcgaccugcggccuguucgggcugguguccuuccuccugcugugcggccgcagcugcuccacgaccuacaaggggguguacgagcuccagacccuggagcuggacauggccaaccucaacaugugcaugccgcugagcugcacgaagaacaacucccaccacuacaucauggucggcaacgagaccggccuggagcucacccugaccaacacgagcaucaucaaccacaaguucugcaaccuguccgacgcccacaagaagaaccucuacgaccacgcccugaugagcaucaucuccaccuuccaccugagcauccccaacuucaaccaguacgaggccauguccugcgacuucaacgggggcaagaucagcgugcaguacaaccucucccacaccuacgcgguggacgccgccaaccacugcgggaccaucgccaacggcguccugcagacguucaugcggauggcguggggcgggagcuacaucgcccuggacuccggcaaggggagcugggacugcaucaugaccuccuaccaguaccucgugauccagaacaccaccugggaggaccacugccaguucagccgccccucccccaucggcuaccuggggcugcucagccagcggacgcgcgacaucuacaucagccggcgccugcugggcaccuucaccuggacccucuccgacagcgagggcaacgagacgcccgggggcuacugccugacccgguggaugcugaucgaggccgagcucaagugcuucgggaacaccgccguggccaagugcaacgagaagcacgacgaggaguucugcgacaugcugcgccuguucgacuucugcaagcaggcgauccggcgccucaagaccgaggcccagauguccauccagcugaucaacaaggccgucaacgcccugaucaacgaccagcucaucaugaagaaccaccuccgggacaucaugggcauccccuacugcaacuacagcaaguacugcuaccugaaccacacggugaccgggaagaccucccugccccgcugcugccuggugagcaacggcuccuaccugaacgagacccacuucagcgacgacaucgagcagcaggccgacaacaugaucacggagcuccugcagaaggaguacaucgaccggcagggcaagaccccgcuggggcucgucgaccuguucguguucuccaccagcuucuaccugaucuccaucuuccugcaccucgugaagaucccgacccaccgccacaucacgggcaagcccugccccaagccccaccggcugaaccacauggggaucugcagcugcggccuguacaagcacccggggguccccgugaaguggaagcgcugaggacuagucccuguucccagagcccacuuuuuuuucuuuuuuugaaauaaaauagccugucuuucagaucucaaaggcucuuuucagagccaccaaaaaaaaaaaaaaaaaaaaaaaaaaaaaaaaaaaaaaaaaaaaaaaaaaaaaaaaaaaaaaaaaaaaaaaaaaaaaaaaaaaaaaaaaaaaaaaaaaaaa

SEQ ID NO: 40592 - RNA, 1764 nt, Artificial Sequence
  mRNA product Design a-2 (hSL-A100) comprising derived and/or modified sequence from LASV(Lassa virus/H.sapiens-wt/NGA/2016/ISTH_0009;Clade II)__AVO03571__GPCmut12 (opt1)
aggagaguccgcucagccagguugcagaagcggcuuagcguguguccuaaucuucucucugcguguagguaggccugugccgcaaacaagcuuaccaugggccagaucaucaccuucuuccaggaggugccccacgucaucgaggaggugaugaacaucgugcugaucgcccucagccugcuggccauccucaaggggaucuacaacgucgcgaccugcggccugcuggggcucguguccuuccugcugcucugcggccgcagcugcuccacgaccuacaaggggguguacgagcugcagacccuggagcucgacauggccagccugaacaugugcaugccgcuguccugcacgaagaacaacagccaccacuacaucauggucggcaacgagaccggccucgagcugacccugaccaacacguccaucaucaaccacaaguucugcaaccucagcgacgcccacaagaagaaccuguacgaccacgcccugauguccaucaucagcaccuuccaccucuccauccccaacuucaaccaguacgaggccaugagcugcgacuucaacgggggccggaucuccgugcaguacaaccugagccacuccuacgcgguggacgccgccaaccacugcgggaccaucgccaacggcguccugcagaccuucaugcgcauggcguggggcgggagcuacaucgcccucgacuccggcaaggggagcugggacugcaucaugacguccuaccaguaccugaucauccagaacaccaccugggaggaccacugccaguucagccggcccagccccaucggcuaccuggggcuccugucccagcgcacccgggacaucuacaucagccgccggcugcucggcacguucaccuggacccuguccgacagcgagggcaacgagacccccgggggcuacugccugacgcgcuggaugcucaucgaggccgagcugaagugcuucgggaacaccgccguggccaagugcaacgagaagcacgacgaggaguucugcgacaugcugcggcuguucgacuucugcaagcaggcgauccgccggcugaagaccgaggcccagauguccauccagcugaucaacaaggccgugaacgcccucaucaacgaccagcugaucaugaagaaccaccuccgcgacaucaugggcaucccguacugcaacuacagcaaguacugcuaccucaaccacaccgucacggggaagaccucccugccccggugcugccuggugagcaacggcuccuaccucaacgagacccacuucagcgacgacaucgagcagcaggccgacaacaugaucaccgagcugcugcagaaggaguacaucgaccgccagggcaagacgccccucgggcugguggaccuguucgucuucuccaccagcuucuaccugaucuccaucuuccuccaccuggugaagaucccgacccaccggcacaucaccggcaagcccugccccaagccccaccgccugaaccacauggggaucugcagcugcggccucuacaaccacccgggggugcccgucaaguggaagcggugaggacuagucccuguucccagagcccacuuuuuuuucuuuuuuugaaauaaaauagccugucuuucagaucucaaaggcucuuuucagagccaccaaaaaaaaaaaaaaaaaaaaaaaaaaaaaaaaaaaaaaaaaaaaaaaaaaaaaaaaaaaaaaaaaaaaaaaaaaaaaaaaaaaaaaaaaaaaaaaaaaaaa

SEQ ID NO: 40593 - RNA, 1764 nt, Artificial Sequence
  mRNA product Design a-2 (hSL-A100) comprising derived and/or modified sequence from LASV(Lassa virus/H.sapiens-wt/NGA/2016/ISTH_0017;Clade II)__AVO03567__GPCmut12 (opt1)
aggagaguccgcucagccagguugcagaagcggcuuagcguguguccuaaucuucucucugcguguagguaggccugugccgcaaacaagcuuaccaugggccagaucaucaccuucuuccaggaggugccccacgucaucgaggaggugaugaacaucgugcugaucgcccucagccugcuggccauccucaaggggaucuacaacgucgcgaccugcggccuguucgggcugguguccuuccuccugcugugcggccgcagcugcuccacgaccuacaaggggguguacgagcuccagacccuggagcuggacauggccagccucaacaugugcaugccgcuguccugcacgaagaacaacagccaccacuacaucauggucggcaacgagaccggccuggagcucacccugaccaacacguccaucaucaaccacaaguucugcaaccugagcgacgcccacaagaagaaccucuacgaccacgcccugauguccaucaucagcaccuuccaccuguccauccccaacuucaaccaguacgaggccaugagcugcgacuucaacgggggcaagaucuccgugcaguacaaccucagccacaccuacgcgaucgacgccgccaaccacugcgggaccaucgccaacggcgugcugcagacguucaugcggauggcguggggcggguccuacaucgcccuggacagcggcaagggguccugggacugcaucaugaccagcuaccaguaccucaucauccagaacaccaccugggaggaccacugccaguucucccgccccagccccaucggcuaccuggggcugcucagccagcggacgcgcgacaucuacaucucccggcgccugcugggcaccuucaccuggacccucagcgacuccgagggcaacgagacgcccgggggcuacugccugacccgguggaugcugaucgaggccgagcucaagugcuucgggaacaccgccgucgccaagugcaacgagaagcacgacgaggaguucugcgacaugcugcgccuguucgacuucugcaagcaggcgauccggcgccucaagaccgaggcccagaugagcauccagcugaucaacaaggccgugaacgcccugaucaacgaccagcucaucaugaagaaccaccuccgggacaucaugggcauccccuacugcaacuacuccaaguacugcuaccugaaccacacggugaccgggaagaccagccugccccgcugcugccuggucuccaacggcagcuaccugaacgagacccacuucuccgacgacaucgagcagcaggccgacaacaugaucacggagcuccugcagaaggaguacauggaccggcagggcaagaccccgcuggggcucguggaccuguucguguucagcaccuccuucuaccugaucagcaucuuccugcaccucguccgcaucccgacccaccggcacgugaucggcaagcccugccccaagccccaccgccugaaccacauggggaucugcuccugcggccuguacaagcacccgggggugcccgucaaguggaagcggugaggacuagucccuguucccagagcccacuuuuuuuucuuuuuuugaaauaaaauagccugucuuucagaucucaaaggcucuuuucagagccaccaaaaaaaaaaaaaaaaaaaaaaaaaaaaaaaaaaaaaaaaaaaaaaaaaaaaaaaaaaaaaaaaaaaaaaaaaaaaaaaaaaaaaaaaaaaaaaaaaaaaa

SEQ ID NO: 40594 - RNA, 1764 nt, Artificial Sequence
  mRNA product Design a-2 (hSL-A100) comprising derived and/or modified sequence from LASV(Lassa virus/H.sapiens-wt/NGA/2018/ISTH_0959;Clade II)__AVV65099__GPCmut12 (opt1)
aggagaguccgcucagccagguugcagaagcggcuuagcguguguccuaaucuucucucugcguguagguaggccugugccgcaaacaagcuuaccaugggccagaucaucaccuucuuccaggaggugccccacgucaucgaggaggugaugaacaucgugcugaucgcccucagccugcuggccauccucaaggggaucuacaacgucgugaccugcggccuguucgggcugguguccuuccuccugcugugcggccgcagcugcuccacgaccuacaagggggucuacgagcuccagacccuggagcuggacauggcgagccucaacaugugcaugccgcuguccugcacgaagaacaacagccaccacuacaucauggugggcaacgagaccggccuggagcucacccugaccaacacguccaucaucaaccacaaguucugcaaccugagcgacgcccacaagaagaaccucuacgaccacgcccugauguccaucaucagcaccuuccaccuguccauccccaacuucaaccaguacgaggccaugagcugcgacuucaacgggggcaagaucuccgugcaguacaaccucagccacgccuacgcgaucgacgccgccaaccacugcgggaccaucgccaacggcguccugcagaccuucaugcggauggcguggggcggguccuacaucgcccuggacagcggcaagggguccugggacugcaucaugacgagcuaccaguaccucaucauccagaacaccaccugggaggaccacugccaguucucccgccccagccccaucggcuaccuggggcugcucagccagcggacccgcgacaucuacaucucccggcgccugcugggcacguucaccuggacccucagcgacuccgagggcaacgagacccccgggggcuacugccugacgcgguggaugcugaucgaggccgagcucaagugcuucgggaacaccgccguggccaagugcaacgagaagcacgacgaggaguucugcgacaugcugcgccuguucgacuucugcaagcaggcgauccggcgccucaagaccgaggcccagaugagcauccagcugaucaacaaggccgugaacgcccugaucaacgaccagcucaucaugaagaaccaccuccgggacaucaugggcaucccguacugcaacuacuccaaguacugcuaccugaaccacaccgucacggggaagaccagccugccccgcugcugccugguguccaacggcagcuaccugaacgagacccacuucuccgacgacaucgagcagcaggccgacaacaugaucaccgagcuccugcagaaggaguacaucgaccggcagggcaagacgccccuggggcucguggaccuguucgucuucagcaccuccuucuaccugaucagcaucuuccugcaccucgugaagaucccgacccaccgccacgugaucggcaagcccugccccaagccccaccggcugaaccacauggggaucugcuccugcggccuguacaagcacccggggguccccgugaaguggaagcgcugaggacuagucccuguucccagagcccacuuuuuuuucuuuuuuugaaauaaaauagccugucuuucagaucucaaaggcucuuuucagagccaccaaaaaaaaaaaaaaaaaaaaaaaaaaaaaaaaaaaaaaaaaaaaaaaaaaaaaaaaaaaaaaaaaaaaaaaaaaaaaaaaaaaaaaaaaaaaaaaaaaaaa

SEQ ID NO: 40595 - RNA, 1764 nt, Artificial Sequence
  mRNA product Design a-2 (hSL-A100) comprising derived and/or modified sequence from LASV(LASV003-NIG-2008;Clade II)__AIT17580__GPCmut12 (opt1)
aggagaguccgcucagccagguugcagaagcggcuuagcguguguccuaaucuucucucugcguguagguaggccugugccgcaaacaagcuuaccaugggccagaucaucaccuucuuccaggaggugccccacgucaucgaggaggugaugaacaucgugcugaucgcccucagccugcuggccauccucaaggggaucuacaacgucgcgaccugcggccuguucgggcugguguccuuccuccugcugugcggccgcagcugcuccacgaccuacaaggggguguacgagcuccagacccuggagcuggacauggccagccucaacaugugcaugccgcuguccugcacgaagaacaacagccaccacuacaucauggucggcaacgagaccggccuggagcucacccugaccaacacguccaucaucaaccacaaguucugcaaccugagcgacgcccacaagaagaaccucuacgaccacgcccugauguccaucaucagcaccuuccaccuguccauccccaacuucaaccaguacgaggccaugagcugcgacuucaacgggggcaagaucuccgugcaguacaaccucagccacaccuacgcgguggacgccgccaaccacugcgggaccaucgccaacggcguccugcagacguucaugcggauggcguggggcggguccuacaucgcccuggacagcggcaagggguccugggacugcaucaugaccagcuaccaguaccucaucauccagaacaccaccugggaggaccacugccaguucucccgccccagccccaucggcuaccuggggcugcucagccagcggacgcgcgacaucuacaucucccggcgccugcugggcaccuucaccuggacccucagcgacuccgagagcaacgagacgccgggcggguacugccugacccgguggaugcugaucgaggccgagcucaagugcuucggcaacaccgccguggccaagugcaacgagaagcacgacgaggaguucugcgacaugcugcgccuguucgacuucugcaagcaggcgauccggcgccucaaggccgaggcccagauguccauccagcugaucaacaaggccgugaacgcccugaucaacgaccagcucaucaugaagaaccaccuccgggacaucauggggauccccuacugcaacuacagcaaguacugcuaccugaaccacaccgucacgggccgcaccucccugccccggugcugccuggugagcaacggguccuaccugaacgagacccacuucagcgacgacaucgagcagcaggcggacaacaugaucaccgagcuccugcagaaggaguacauggaccgccagggcaagacgccccugggccucguggaccuguucgucuucuccaccagcuucuaccugaucuccaucuuccugcaccucgugaagaucccgacccaccggcacgugaucgggaagcccugccccaagccccaccgccugaaccacaugggcaucugcagcugcgggcuguacaagcacccgggcguccccgugaaguggaagcggugaggacuagucccuguucccagagcccacuuuuuuuucuuuuuuugaaauaaaauagccugucuuucagaucucaaaggcucuuuucagagccaccaaaaaaaaaaaaaaaaaaaaaaaaaaaaaaaaaaaaaaaaaaaaaaaaaaaaaaaaaaaaaaaaaaaaaaaaaaaaaaaaaaaaaaaaaaaaaaaaaaaaa

SEQ ID NO: 40596 - RNA, 1764 nt, Artificial Sequence
  mRNA product Design a-2 (hSL-A100) comprising derived and/or modified sequence from LASV(LASV035-NIG-2009;Clade II)__AIT17588__GPCmut12 (opt1)
aggagaguccgcucagccagguugcagaagcggcuuagcguguguccuaaucuucucucugcguguagguaggccugugccgcaaacaagcuuaccaugggccagaucaucaccuucuuccaggaggugccccacgucaucgaggaggugaugaacaucgugcugaucgcccucagccugcuggccauccucaaggggaucuacaacgucgcgaccugcggccuguucgggcugguguccuuccuccugcugugcggccgcagcugcuccacgaccuacaaggggguguacgagcuccagacccuggagcuggacauggccagccucaacaugugcaugccgcuguccugcacgaagaacaacagccaccacuacaucauggucggcaacgagaccggccuggagcucacccugaccaacacguccaucaucaaccacaaguucugcaaccugagcgacgcccacaagaagaaccucuacgaccacgcccugauguccaucaucagcaccuuccaccuguccauccccaacuucaaccaguacgaggccaugagcugcgacuucaacgggggcaagaucuccgugcaguacaaccucagccacgcguacgccguggacgccgccaaccacugcgggaccaucgcgaacggcguccugcagaccuucaugcggauggccuggggcggguccuacaucgcccuggacagcggcaagggguccugggacugcaucaugacgagcuaccaguaccucaucauccagaacaccaccugggaggaccacugccaguucucccgccccagccccaucggcuaccuggggcugcucagccagcggacccgcgacaucuacaucucccggcgccugcugggcacguucaccuggacccucagcgacuccgagggcaacgagacccccgggggcuacugccugacgcgguggaugcugaucgaggccgagcucaagugcuucgggaacaccgccguggcgaagugcaacgagaagcacgacgaggaguucugcgacaugcugcgccuguucgacuucugcaagcaggccauccggcgccucaaggccgaggcccagaugagcauccagcugaucaacaaggccgugaacgcgcugaucaacgaccagcucaucaugaagaaccaccuccgggacaucaugggcauccccuacugcaacuacuccaaguacugcuaccugaaccacaccgucaccgggaagacgagccugccccgcugcugccugguguccaacggcagcuaccugaacgagacccacuucuccgacgacaucgagcagcaggccgacaacaugaucaccgagcuccugcagaaggaguacaucgaccggcagggcaagaccccgcuggggcucguggaccuguucgucuucagcacguccuucuaccugaucagcaucuuccugcaccucgugaagaucccgacccaccgccacgugaucggcaagcccugccccaagccccaccggcugaaccacauggggaucugcuccugcggccuguacaagcacccggggguccccgugaaguggaagcgcugaggacuagucccuguucccagagcccacuuuuuuuucuuuuuuugaaauaaaauagccugucuuucagaucucaaaggcucuuuucagagccaccaaaaaaaaaaaaaaaaaaaaaaaaaaaaaaaaaaaaaaaaaaaaaaaaaaaaaaaaaaaaaaaaaaaaaaaaaaaaaaaaaaaaaaaaaaaaaaaaaaaaa

SEQ ID NO: 40597 - RNA, 1764 nt, Artificial Sequence
  mRNA product Design a-2 (hSL-A100) comprising derived and/or modified sequence from LASV(LASV1000-NIG-2009;Clade II)__AIT17782__GPCmut12 (opt1)
aggagaguccgcucagccagguugcagaagcggcuuagcguguguccuaaucuucucucugcguguagguaggccugugccgcaaacaagcuuaccaugggccagaucaucaccuucuuccaggaggugccccacgucaucgaggaggugaugaacaucgugcugaucgcccucagccugcuggccauccucaaggggaucuacaacgucgcgaccugcggccuguucgggcugguguccuuccuccugcugugcggccgcagcugcuccacgaccuacaaggggguguacgagcuccagacccuggagcuggacauggccagccucaacaugugcaugccgcuguccugcacgaagaacaacagccaccacuacaucauggucggcaacgagaccggccuggagcucacccugaccaacacguccaucaucaaccacaaguucugcaaccugagcgacgcccacaagaagaaccucuacgaccacgcccugauguccaucaucagcaccuuccaccuguccauccccaacuucaaccaguacgaggccaugagcugcgacuucaacgggggcaagaucuccgugcaguacaaccucagccacaccuacgcgguggacgccgccaaccacugcgggaccaucgccaacggcguccugcagacguucaugcggauggcguggggcggguccuacaucgcccuggacagcggcaagggguccugggacugcaucaugaccagcuaccaguaccucaucauccagaacaccaccugggaggaccacugccaguucucccgccccagccccaucggcuaccuggggcugcucagccagcggacgcgcgacaucuacaucucccggcgccugcugggcaccuucaccuggacccucagcgacuccgagggcaacgagacgcccgggggcuacugccugacccgguggaugcugaucgaggccgagcucaagugcuucgggaacaccgccguggccaagugcaacgagaagcacgacgaggaguucugcgacaugcugcgccuguucgacuucugcaagcaggcgaucaagcggcucaagaccgaggcccagaugagcauccagcugaucaacaaggccgugaacgcccugaucaacgaccagcucaucaugaagaaccaccuccgcgacaucaugggcauccccuacugcaacuacuccaaguacugcuaccugaaccacacggucaccgggaagaccagccugccccggugcugccugguguccaacggcagcuaccugaacgagacccacuucuccgacgacaucgagcagcaggccgacaacaugaucacggagcuccugcagaaggaguacaucgaccgccagggcaagaccccgcuggggcucguggaccuguucgucuucagcaccuccuucuaccugaucagcaucuuccugcaccucgugaagaucccgacccaccggcacguggucggcaagcccugccccaagccccaccgccugaaccacauggggaucugcuccugcggccuguacaagcacccgggggugcccgugaaguggaagcggugaggacuagucccuguucccagagcccacuuuuuuuucuuuuuuugaaauaaaauagccugucuuucagaucucaaaggcucuuuucagagccaccaaaaaaaaaaaaaaaaaaaaaaaaaaaaaaaaaaaaaaaaaaaaaaaaaaaaaaaaaaaaaaaaaaaaaaaaaaaaaaaaaaaaaaaaaaaaaaaaaaaaa

SEQ ID NO: 40598 - RNA, 1764 nt, Artificial Sequence
  mRNA product Design a-2 (hSL-A100) comprising derived and/or modified sequence from LASV(LASV221-NIG-2010;Clade II)__AIT17624__GPCmut12 (opt1)
aggagaguccgcucagccagguugcagaagcggcuuagcguguguccuaaucuucucucugcguguagguaggccugugccgcaaacaagcuuaccaugggccagaucaucaccuucuuccaggaggugccccacgucaucgaggaggugaugaacaucgugcugaucgcccucagccugcuggccauccucaaggggaucuacaacgucgcgaccugcggccuguucgggcugguguccuuccuccugcugugcggccgcagcugcuccacgaccuacaaggggguguacgagcuccagacccuggagcuggacauggccagccucaacaugugcaugccgcuguccugcacgaagaacaacagccaccacuacaucauggucggcaacgagaccggccuggagcucacccugaccaacacguccaucaucaaccacaaguucugcaaccugagcgacgcccacaagaagaaccucuacgaccacgcccugauguccaucaucagcaccuuccaccuguccauccccaacuucaaccaguacgaggccaugagcugcgacuucaacgggggcaagaucuccgugcaguacaaccucagccacaccuacgcgaucgacgccgccaaccacugcgggaccaucgccaacggcgugcugcagacguucaugcggauggcguggggcggguccuacaucgcccuggacagcggcaagggguccugggacugcaucaugaccagcuaccaguaccucaucauccagaacaccaccugggaggaccacugccaguucucccgccccagccccaucggcuaccuggggcugcucagccagcggacgcgcgacaucuacaucucccggcgccugcugggcaccuucaccuggacccucagcgacuccgagggcaacgagacgcccgggggcuacugccugacccgguggaugcugaucgaggccgagcucaagugcuucgggaacaccgccgucgccaagugcaacgagaagcacgacgaggaguucugcgacaugcugcgccuguucgacuucugcaagcaggcgauccggcgccucaagaccgaggcccagaugagcauccagcugaucaacaaggccgugaacgcccugaucaacgaccagcucaucaugaagaaccaccuccgggacaucaugggcauccccuacugcaacuacuccaaguacugcuaccugaaccacacggugaccgggaagaccagccugccccgcugcugccuggucuccaacggcagcuaccugaacgagacccacuucuccgacgacaucgagcagcaggccgacaacaugaucacggagaugcuccagaaggaguacauggaccggcagggcaagaccccgcuggggcugguggaccucuucguguucagcaccuccuucuaccugaucagcaucuuccugcaccuggucaagaucccgacccaccgccacgugaucggcaagcccugccccaagccccaccggcucaaccacauggggaucugcuccugcggccuguacaagcacccgggggugcccgucaaguggaagcgcugaggacuagucccuguucccagagcccacuuuuuuuucuuuuuuugaaauaaaauagccugucuuucagaucucaaaggcucuuuucagagccaccaaaaaaaaaaaaaaaaaaaaaaaaaaaaaaaaaaaaaaaaaaaaaaaaaaaaaaaaaaaaaaaaaaaaaaaaaaaaaaaaaaaaaaaaaaaaaaaaaaaaa

SEQ ID NO: 40599 - RNA, 1764 nt, Artificial Sequence
  mRNA product Design a-2 (hSL-A100) comprising derived and/or modified sequence from LASV(LASV237-NIG-2010;Clade II)__AIT17638__GPCmut12 (opt1)
aggagaguccgcucagccagguugcagaagcggcuuagcguguguccuaaucuucucucugcguguagguaggccugugccgcaaacaagcuuaccaugggccagaucaucaccuucuuccaggaggugccccacgucaucgaggaggugaugaacaucgugcugaucgcccucagccugcuggccauccucaaggggaucuacaacgucgcgaccugcggccuguucgggcugguguccuuccuccugcugugcggccgcagcugcuccacgaccuacaaggggguguacgagcuccagacccuggagcuggacauggccagccucaacaugugcaugccgcuguccugcacgaagaacaacagccaccacuacaucauggucggcaacgagaccggccuggagcucacccugaccaacacguccaucaucaaccacaaguucugcaaccugagcgacgcccacaagaaggaccucuacgaccacgcccugauguccaucaucagcaccuuccaccuguccauccccaacuucaaccaguacgaggccaugagcugcgacuucaacgggggcaagaucuccgugcaguacaaccucagccacaccuacgcgguggacgccgccaaccacugcgggaccaucgccaacggcguccugcagacguucaugcggauggcguggggcggguccuacaucgcccuggacagcggcaagggguccugggacugcaucaugaccagcuaccaguaccucaucauccagaacaccaccugggaggaccacugccaguucucccgccccagccccaucggcuaccuggggcugcucagccagcggacgcgcgacaucuacaucucccggcgccugcugggcaccuucaccuggacccucagcgacuccgagggcaacgagacgcccgggggcuacugccugacccgguggaugcugaucgaggccgagcucaagugcuucgggaacaccgccguggccaagugcaacgagaagcacgacgaggaguucugcgacaugcugcgccuguucgacuucugcaagcaggcgauccggcgccucaagaccgaggcccagaugagcauccagcugaucaacaaggccgugaacgcccugaucaacgaccagcucaucaugaagaaccaccuccgggacaucaugggcauccccuacugcaacuacuccaaguacugcuaccugaaccacacggucaccgggaagaccagccugccccgcugcugccugguguccaacggcagcuaccugaacgagacccacuucuccgacgacaucgagcagcaggccgacaacaugaucacggagcuccugcagaaggaguacauggaccggcagggcaagaccccgcuggggcucguggaccuguucgucuucagcaccuccuucuaccugaucagcaucuuccugcaccucaucaagaucccgacccaccgccacaucacgggcaagcccugccccaagccccaccggcugaaccacauggggaucugcuccugcggccuguacaagcacccgggggugcccgugaaguggaagcgcugaggacuagucccuguucccagagcccacuuuuuuuucuuuuuuugaaauaaaauagccugucuuucagaucucaaaggcucuuuucagagccaccaaaaaaaaaaaaaaaaaaaaaaaaaaaaaaaaaaaaaaaaaaaaaaaaaaaaaaaaaaaaaaaaaaaaaaaaaaaaaaaaaaaaaaaaaaaaaaaaaaaaa

SEQ ID NO: 40600 - RNA, 1764 nt, Artificial Sequence
  mRNA product Design a-2 (hSL-A100) comprising derived and/or modified sequence from LASV(LASV253-NIG-2011;Clade II)__AIT17670__GPCmut12 (opt1)
aggagaguccgcucagccagguugcagaagcggcuuagcguguguccuaaucuucucucugcguguagguaggccugugccgcaaacaagcuuaccaugggccagaucaucaccuucuuccaggaggugccccacgucaucgaggaggugaugaacaucgugcugaucgcccucagccugcuggccauccucaaggggaucuacaacgucgcgaccugcggccuguucgggcugguguccuuccuccugcugugcggccgcagcugcuccacgaccuacaaggggguguacgagcuccagacccuggagcuggacauggccagccucaacaugugcaugccgcuguccugcacgaagaacaacagccaccacuacaucauggucggcaacgagaccggccuggagcucacccugaccaacacguccaucaucaaccacaaguucugcaaccugagcgacgcccacaagaagaaccucuacgaccacgcccugauguccaucaucagcaccuuccaccuguccauccccaacuucaaccaguacgaggccaugagcugcgacuucaacgggggcaagaucuccgugcaguacaaccucagccacaccuacgcgguggacgccgccaaccacugcgggaccaucgccaacggcguccugcagacguucaugcggauggcguggggcggguccuacaucgcccuggacagcggcaagggguccugggacugcaucaugaccagcuaccaguaccucaucauccagaacaccaccugggaggaccacugccaguucucccgccccagccccaucggcuaccuggggcugcucagccagcggacgcgcgacaucuacaucucccggcgccugcugggcaccuucaccuggacccucagcgacuccgagggcaacgagacgcccgggggcuacugccugacccgguggaugcugaucgaggccgagcucaagugcuucgggaacaccgccguggccaagugcaacgagaagcacgacgaggaguucugcgacaugcugcgccuguucgacuucugcaagcaggcgauccggcgccucaaggccgaggcccagaugagcauccagcugaucaacaaggccgugaacgcccugaucaacgaccagcucaucaugaagaaccaccuccgggacaucaugggcaucccguacugcaacuacuccaaguacugcuaccugaaccacaccgucacggggcgcaccagccugccccggugcugccugguguccaacggcagcuaccugaacgagacccacuucuccgacgacaucgagcagcaggcggacaacaugaucaccgagcuccugcagaaggaguacaucgaccgccagggcaagacgccccuggggcucguggaccuguucgucuucagcaccuccuucuaccugaucagcaucuuccugcaccucgugaagaucccgacccaccggcacaucaucggcaagcccugccccaagccccaccgccugaaccacauggggaucugcuccugcggccuguacaagcacccgggggugcccgucaaguggaagcggugaggacuagucccuguucccagagcccacuuuuuuuucuuuuuuugaaauaaaauagccugucuuucagaucucaaaggcucuuuucagagccaccaaaaaaaaaaaaaaaaaaaaaaaaaaaaaaaaaaaaaaaaaaaaaaaaaaaaaaaaaaaaaaaaaaaaaaaaaaaaaaaaaaaaaaaaaaaaaaaaaaaaa

SEQ ID NO: 40601 - RNA, 1764 nt, Artificial Sequence
  mRNA product Design a-2 (hSL-A100) comprising derived and/or modified sequence from LASV(LASV254-NIG-2011;Clade II)__AIT17674__GPCmut12 (opt1)
aggagaguccgcucagccagguugcagaagcggcuuagcguguguccuaaucuucucucugcguguagguaggccugugccgcaaacaagcuuaccaugggccagaucaucaccuucuuccaggaggugccccacgucaucgaggaggugaugaacaucgugcugaucgcccucagccugcuggccauccucaaggggaucuacaacgucgcgaccugcggccuguucgggcugguguccuuccuccugcugugcggccgcagcugcuccacgaccuacaaggggguguacgagcuccagacccuggagcuggacaugaccaaccucaacaugugcaugccgcugagcugcaccaagaacaacucccaccacuacaucauggucggcaacgagaccggccuggagcucacccugacgaacaccagcaucaucaaccacaaguucugcaaccuguccgacgcccacaagaagaaccucuacaaccacgcccugaugagcaucaucuccaccuuccaccugagcauccccaacuucaaccaguacgaggccauguccugcgacuucaacgggggcaagaucagcgugcaguacaaccucucccacagcuacgccguggacgcggccaaccacugcgggaccaucgccaacggcguccugcagacguucaugcggauggccuggggcggguccuacaucgcgcuggacagcggcaaggggaacugggacugcaucaugaccuccuaccaguaccucaucauccagaacaccaccugggaggaccacugccaguucagccgccccucccccaucggcuaccuggggcugcucagccagcggacgcgcgacaucuacaucagccggcgccugcugggcaccuucaccuggacccucuccgacagcgagggcaacgagacgcccgggggcuacugccugacccgguggaugcugaucgaggccgagcucaagugcuucgggaacaccgccguggccaagugcaacgagaagcacgacgaggaguucugcgacaugcugcgccuguucgacuucugcaagcaggccauccggcgccucaagaccgaggcgcaggccaacauccagcugaucaacaaggccgugaacgcccugaucaacgaccagcucaucaugaagaaccaccuccgggacaucaugggcauccccuacugcaacuacuccaaguacugcuaccugaaccacacggucaccgggaagaccagccugccccgcugcugccugguguccaacggcagcuaccugaacgagacccacuucuccgacgacaucgagcagcaggccgacaacaugaucacggagcuccugcagaaggaguacauggaccggcagggcaagaccccgcuggggcucguggaccuguucgucuucagcaccuccuucuaccugaucagcaucuuccugcaccucgugaagaucccgacccaccgccacgugaucggcaagcccugccccaagccccaccggcugaaccacauggggaucugcuccugcggccuguacaagcacccggggguccccgugaaguggaagcgcugaggacuagucccuguucccagagcccacuuuuuuuucuuuuuuugaaauaaaauagccugucuuucagaucucaaaggcucuuuucagagccaccaaaaaaaaaaaaaaaaaaaaaaaaaaaaaaaaaaaaaaaaaaaaaaaaaaaaaaaaaaaaaaaaaaaaaaaaaaaaaaaaaaaaaaaaaaaaaaaaaaaaa

SEQ ID NO: 40602 - RNA, 1764 nt, Artificial Sequence
  mRNA product Design a-2 (hSL-A100) comprising derived and/or modified sequence from LASV(Nig08-A19;Clade III)__ADU56618__GPCmut12 (opt1)
aggagaguccgcucagccagguugcagaagcggcuuagcguguguccuaaucuucucucugcguguagguaggccugugccgcaaacaagcuuaccaugggccagaucgugaccuucuuccaggaggucccccacgugaucgaggaggugaugaacaucguccugaucgcccucagcauccuggccauccugaaggggcucuacaacaucgcgaccugcggccugaucgggcuggugacguuccuccugcuguccggccgcagcugcuccaugaccuacaaggggguguacgagcuccagacccuggagcugaacaugaacacccucaacaugugcaugccgcugagcugcaccaagaacaacucccaccacuacaucauggucggcaacgagaccggccuggagcucacccugacgaacaccagccugcuccaccacaaguucugcaaccuguccgacgcccacaagaagaaccuguacgaccacacccucaugagcaucaucuccaccuuccaccugagcauccccaacuucaaccaguacgaggccauguccugcgacuucaacgggggcaagaucacggugcaguacaaccugagccacuccuacgccaucgacgccgcgaaccacugcgggaccguggccaacggcguccuccagaccuucaugcggauggccuggggcgggagcuacaucgcccuggacuccggccgcgggaagugggacugcaucaugaccagcuaccaguaccugaucauccagaacacgaccugggaggaccacugccaguucucccggcccagccccaucggcuaccucgggcugcugucccagcgcacccgggacaucuacaucagccgccggcuccugggcaccuucacguggacccugagcgacuccgagggcaacgagacccccgggggcuacugccucacccgcuggaugcugaucgaggcggagcugaagugcuucgggaacacggccguggccaagugcaacgagaagcacgacgaggaguucugcgacaugcuccggcuguucgacuucugcaagcaggccauccgccggcugaaggccgaggcgcagaugagcauccagcucaucaacaaggccgugaacgcccugaucaacgaccagcugaucaugaagaaccaccuccgcgacaucaugggcauccccuacugcaacuacuccaaguacugcuaccugaaccacaccagcaccgggcggaccucccugccccgcugcugccucgucagcaacggcuccuaccugaacgagacgcacuucagcgacgacaucgagcagcaggccgacaacaugaucaccgagaugcugcagaaggaguaccucgaccggcagggcaagaccccgcuggggcugguggaccuguucguguucuccaccagcuucuaccucaucuccaucuuccugcaccuggucaagaucccgacgcaccgccacaucgugggcaagcccugccccaagccccaccggcucaaccacauggggaucugcagcugcggccuguacaagcagccgggggugcccguccgcuggaagcggugaggacuagucccuguucccagagcccacuuuuuuuucuuuuuuugaaauaaaauagccugucuuucagaucucaaaggcucuuuucagagccaccaaaaaaaaaaaaaaaaaaaaaaaaaaaaaaaaaaaaaaaaaaaaaaaaaaaaaaaaaaaaaaaaaaaaaaaaaaaaaaaaaaaaaaaaaaaaaaaaaaaaa

SEQ ID NO: 40603 - RNA, 1767 nt, Artificial Sequence
  mRNA product Design a-2 (hSL-A100) comprising derived and/or modified sequence from LASV(G1180-SLE-2010;Clade IV)__AIT17168__GPCmut12 (opt1)
aggagaguccgcucagccagguugcagaagcggcuuagcguguguccuaaucuucucucugcguguagguaggccugugccgcaaacaagcuuaccaugggccagaucgugaccuucuuccaggaggucccccacgugaucgaggaggugaugaacaucguccugaucgcccucagcauccuggccgugcugaaggggcucuacaacuucgcgaccugcggccugguggggcugcucaccuuccugcugcucugcggccgcuccugcaccgccagccgguacaagggggucuacgagcugcagacccuggagcucaacauggagacccugaacaugugcaugccgcuguccugcaccaagaacaacagccaccacuacaucauggugggcaacgagaccggccucgagcugacccugacgaacaccuccaucaucaaccacaaguucugcaaccucagcgacgcccacaagaagaaccuguacgaccacgcccugauguccaucaucagcaccuuccaccucuccauccccaacuucaaccaguacgaggccaugagcugcgacuucaacgggggcaagaucuccgugcaguacaaccugagccacuccuacgcgggggacgccgccaaccacugcggcaccgucgccaacggggugcugcagacguucaugcgcauggcguggggcggcagcuacaucgcccucgacuccgggcacggcagcugggacugcaucaugaccuccuaccaguaccugaucauccagaacaccaccugggaggaccacugccaguucagccggcccucccccaucggguaccugggccuccugagccagcgcacgcgggacaucuacaucagccgccggcugcucggcaccuucaccuggacccuguccgacagcgaggggaaggacacgccgggcggguacugccugacccgcuggaugcucaucgaggccgagcugaagugcuucggcaacaccgccguggccaagugcaacgagaagcacgacgaggaguucugcgacaugcugcggcuguucgacuucugcaagcaggcgauccagcgccugaaggccgaggcccagauguccauccagcugaucaacaaggccgucaacgcccucaucaacgaccagcugaucaugaagaaccaccuccgggacaucauggggauccccuacugcaacuacagcaaguacugcuaccucaaccacaccacgaccggcaagaccucccugcccaagugcugccuggugagcaacggcuccuaccucaacgagacccacuucagcgacgacaucgagcagcaggcggacaacaugaucacggagaugcugcagaaggaguacauggagcgccaggggaagacgccccugggccucguggaccuguucgucuucuccaccagcuucuaccugaucuccaucuuccugcaccucgugaagaucccgacccaccggcacaucgugggcaagagcugccccaagccccaccgccugaaccacauggggaucugcuccugcgggcuguacaagcagcccggcgucccggugaaguggaagcggugaggacuagucccuguucccagagcccacuuuuuuuucuuuuuuugaaauaaaauagccugucuuucagaucucaaaggcucuuuucagagccaccaaaaaaaaaaaaaaaaaaaaaaaaaaaaaaaaaaaaaaaaaaaaaaaaaaaaaaaaaaaaaaaaaaaaaaaaaaaaaaaaaaaaaaaaaaaaaaaaaaaaa

SEQ ID NO: 40604 - RNA, 1767 nt, Artificial Sequence
  mRNA product Design a-2 (hSL-A100) comprising derived and/or modified sequence from LASV(G1442-SLE-2011;Clade IV)__AIT17180__GPCmut12 (opt1)
aggagaguccgcucagccagguugcagaagcggcuuagcguguguccuaaucuucucucugcguguagguaggccugugccgcaaacaagcuuaccaugggccagaucgugaccuucuuccaggaggucccccacgugaucgaggaggugaugaacaucguccugaucgcccucagcauccuggccgugcugaaggggcucuacaacguggcgaccugcggccugaucgggcuggucacguuccuccugcugugcggccgcuccugcaccaccacccucuacaaggggguguacgagcugcagacgcuggagcucaacauggagacccugaacaugugcaugccgcugagcugcaccaagaacaacucccaccacuacauccgggugggcaacgagacgggccucgagcugacccugaccaacaccagcaucaucaaccacaaguucugcaaccucuccgacgcccacaagaagaaccuguacgaccacgcccugaugagcaucaucuccacguuccaccucagcauccccaacuucaaccaguacgaggccauguccugcgacuucaacgggggcaagaucagcguccaguacaaccugucccacagcuacgccggggacgcggccaaccacugcggcaccguggccaacggggugcugcagaccuucaugcgcauggccuggggcggcuccuacaucgcgcucgacagcgggcggggcaacugggacugcaucaugaccuccuaccaguaccugaucauccagaacacgaccugggacgaccacugccaguucagccgccccucccccaucggguaccugggccuccugagccagcggacccgcgacgucuacaucucccggcgccugcucggcaccuucacguggacccugagcgacagcgaggggaaggacaccccgggcggguacugccugacccgguggaugcucaucgaggccgagcugaagugcuucggcaacacggccguggccaagugcaacgagaagcacgacgaggaguucugcgacaugcugcgccucuucgacuucugcaagcaggccauccagcggcugaaggcggaggcccagauguccauccagcugaucaacaaggccgugaacgcccucaucaacgaccagcugaucaugaagaaccaccuccgcgacaucauggggauccccuacugcaacuacagcaaguacugcuaccugaacaacaccgccaccggcaagaccucccugcccaagugcugccugaucagcaacggcuccuaccucaacgagacgcacuucagcgacgacaucgagcaggaggcggacaacaugaucaccgagaugcugcagaaggaguacauggagcggcaggggaagacgccccugggccucgucgaccuguucguguucuccaccagcuucuaccugaucuccaucuuccugcaccucgugaagaucccgacccaccgccacaucgucggcaagagcugccccaagccccaccggcugaaccacauggggaucugcuccugcgggcuguacaagcagcccggcgugccggugcgcuggaagcggugaggacuagucccuguucccagagcccacuuuuuuuucuuuuuuugaaauaaaauagccugucuuucagaucucaaaggcucuuuucagagccaccaaaaaaaaaaaaaaaaaaaaaaaaaaaaaaaaaaaaaaaaaaaaaaaaaaaaaaaaaaaaaaaaaaaaaaaaaaaaaaaaaaaaaaaaaaaaaaaaaaaaa

SEQ ID NO: 40605 - RNA, 1767 nt, Artificial Sequence
  mRNA product Design a-2 (hSL-A100) comprising derived and/or modified sequence from LASV(G3010-SLE-2013;Clade IV)__AIT17344__GPCmut12 (opt1)
aggagaguccgcucagccagguugcagaagcggcuuagcguguguccuaaucuucucucugcguguagguaggccugugccgcaaacaagcuuaccaugggccagaucgugaccuucuuccaggaggucccccacgugaucgaggaggugaugaacaucguccugaucgcccucagcauccuggccgugcugaaggggcucuacaacuucgcgaccugcggccugguggggcuggucacguuccuccugcugugcggccgcuccugcaccaccagccucuacaaggggguguacgagcugcagacccuggagcucaacauggagacgcugaacaugugcaugccgcuguccugcaccaagaacaacagccaccacuacaucauggugggcaacgagaccggccucgagcugacgcugaccaacaccuccaucaucaaccacaaguucugcaaccucagcgacgcccacaagaagaaccuguacaaccacgcccugauguccaucaucagcaccuuccaccucuccauccccaacuucaaccaguacgaggccaugagcugcgacuucaacgggggcaagaucuccguccaguacaaccugagccacuccuacgccggggacgcggccagccacugcggcacgguggccaacggggugcugcagaccuucaugcggauggccuggggcggcuccuacaucgcgcucgacagcggguacggcaagugggacugcaucaugaccuccuaccaguaccugaucauccagaacaccacgugggaggaccacugccaguucagccgccccucccccaucggguaccugggccuccugagccagcggacccgcgacaucuacaucagccggcgccugcucggcaccuucaccuggacgcuguccgacagcgaggggaaggacaccccgggcggguacugccugacccgguggaugcucaucgaggccgagcugaagugcuucggcaacaccgccgucgccaagugcaacgagaagcacgacgaggaguucugcgacaugcugcgccucuucgacuucugcaagcaggccauccagcggcugaagacggaggcgcagauguccauccagcugaucaacaaggccgugaacgcccucaucaacgaccagcugaucaugaagaaccaccuccgcgacaucauggggauccccuacugcaacuacagcaaguacugcuaccugaaccacaccaccaccggcaagacgucccugcccaagugcugccuggugagcaacggcuccuaccucaacgagacccacuucagcgacgacaucgagcagcaggccgacaacaugaucaccgagaugcugcagaaggaguacauggagcggcaggggaagacgccccugggccucgucgaccuguucguguucuccaccagcuucuaccugaucuccaucuuccugcaccucgugaagaucccgacccaccgccacaucgucggcaagagcugccccaagccccaccggcugaaccacauggggaucugcuccugcgggcuguacaagcagcccggcgugccggugcgcuggaagcggugaggacuagucccuguucccagagcccacuuuuuuuucuuuuuuugaaauaaaauagccugucuuucagaucucaaaggcucuuuucagagccaccaaaaaaaaaaaaaaaaaaaaaaaaaaaaaaaaaaaaaaaaaaaaaaaaaaaaaaaaaaaaaaaaaaaaaaaaaaaaaaaaaaaaaaaaaaaaaaaaaaaaa

SEQ ID NO: 40606 - RNA, 1767 nt, Artificial Sequence
  mRNA product Design a-2 (hSL-A100) comprising derived and/or modified sequence from LASV(G502-SLE-2009;Clade IV)__AIT17126__GPCmut12 (opt1)
aggagaguccgcucagccagguugcagaagcggcuuagcguguguccuaaucuucucucugcguguagguaggccugugccgcaaacaagcuuaccaugggccagaucgugaccuucuuccaggaggucccccacgugaucgaggaggugaugaacaucguccugaucgcccucagcauccuggccgugcugaaggggcucuacaacuucgcgaccugcggccugguggggcugcucacguuccugcugcucugcggccgcuccugcaccaccgggcuguacaagggcgucuacgagcugcagacccucgagcugaacauggagacgcugaacaugugcaugccgcucagcugcaccaagaacaacucccaccacuacaucauggugggcaacgagaccgggcuggagcugacgcucaccaacaccagcaucaucaaccacaaguucugcaaccuguccgacgcccacaagaagaaccuguacgaccacgcccucaugagcaucaucuccaccuuccaccugagcauccccaacuucaaccaguacgaggccauguccugcgacuucaacggcgggaagaucagcgugcaguacaaccugucccacagcuacgccggcgacgcggccgaccacugcgggacggucgccaacggcgugcuccagaccuucaugcggauggccuggggcggguccuacaucgcgcuggacagcggccgcgggcggugggacugcaucaugaccuccuaccaguaccugaucauccagaacaccacgugggaggaccacugccaguucagccgccccucccccaucggcuaccucggccugcugagccagcggacccgcgacaucuacaucucccggcgccuccuggggaccuucaccuggacgcugagcgacagcgagggcaaggacacccccgggggcuacugccucacccgguggaugcugaucgaggccgagcugaagugcuucgggaacaccgccguggccaagugcaacgagaagcacgacgaggaguucugcgacaugcuccgccuguucgacuucugcaagcaggccauccagcggcugaaggcggaggcccagauguccauccagcucaucaacaaggccgucaacgcccugaucaacgaccagcuggugaugaagaaccaccuccgcgacaucaugggcauccccuacugcaacuacagccgguacugcuaccugaaccacacgaccaccggccgcaccucccugcccaagugcugccucgugagcaacggguccuaccugaacgagacgcacuucagcgacgacaucgagcagcaggccgacaacaugaucaccgagaugcugcagaaggaguacauggagcggcagggcaagaccccgcucgggcuggucgaccuguucguguucuccaccagcuucuaccugaucuccaucuuccuccaccuggugaagaucccgacgcaccgccacaucgucggcaagagcugccccaagccccaccggcugaaccacauggggaucugcuccugcggccucuacaagcagcccggcgugccggugaaguggaagcgcugaggacuagucccuguucccagagcccacuuuuuuuucuuuuuuugaaauaaaauagccugucuuucagaucucaaaggcucuuuucagagccaccaaaaaaaaaaaaaaaaaaaaaaaaaaaaaaaaaaaaaaaaaaaaaaaaaaaaaaaaaaaaaaaaaaaaaaaaaaaaaaaaaaaaaaaaaaaaaaaaaaaaa

SEQ ID NO: 40607 - RNA, 1767 nt, Artificial Sequence
  mRNA product Design a-2 (hSL-A100) comprising derived and/or modified sequence from LASV(G733-SLE-2010;Clade IV)__AIT17154__GPCmut12 (opt1)
aggagaguccgcucagccagguugcagaagcggcuuagcguguguccuaaucuucucucugcguguagguaggccugugccgcaaacaagcuuaccaugggccagaucgugaccuucuuccaggaggucccccacgugaucgaggaggugaugaacaucguccugaucgcccucagcauccuggccgugcugaaggggcucuacaacuucgcgaccugcggcaucguggggcuggucuccuuccugcuccugugcggccgcagcugcacgaccucccuguacaaggggguguacgagcuccagacccuggagcugaacauggagacccucaacaugugcaugccgcugagcugcaccaagaacaacucccaccacuacaucauggugggcaacgagaccggccuggagcucacccugacgaacaccagcaucaucaaccacaaguucugcaaccuguccgacgcccacaagaagaaccucuacgaccacgcccugaugagcaucaucuccaccuuccaccugagcauccccaacuucaaccaguacgaggccauguccugcgacuucaacgggggcaagaucagcguccaguacaaccucucccacagcuacgccggggacgcggccaaccacugcggcaccaucgccaacggggugcugcagacguucaugcggauggccuggggcggcuccuacaucgcgcuggacagcgggcgcgaccggugggacugcaucaugaccuccuaccaguaccucaucauccagaacaccaccugggaggaccacugccaguucagccgccccucccccaucggcuaccuggggcugcucagccagcggacgcgcgacaucuacaucagccggcgccugcugggcaccuucaccuggacccucuccgacagcgagggcaaggacacgcccgggggcuacugccugacccgguggaugcugaucgaggccgagcucaagugcuucgggaacaccgccguggccaagugcaacgagaagcacgacgaggaguucugcgacaugcugcgccuguucgacuucugcaagcaggccauccagcggcucaaggcggaggcccagauguccauccagcugaucaacaaggccgucaacgcccugaucaacgaccagcucaucaugaagaaccaccuccgcgacaucaugggcauccccuacugcaacuacagcaaguacugcuaccugaaccacaccacgaccgggaagaccucccugcccaagugcugccuggugagcaacggcuccuaccugaacgagacccacuucagcgacgacaucgagcagcaggccgacaacaugaucacggagaugcuccagaaggaguacauggagcggcagggcaagaccccgcuggggcugguggaccucuucgucuucuccaccagcuucuaccugaucuccaucuuccugcaccuggugaagaucccgacccaccgccacguggucggcaagagcugccccaagccccaccggcucaaccacauggggaucugcuccugcggccuguacgggcagcccggcgugccggugaaguggaagcgcugaggacuagucccuguucccagagcccacuuuuuuuucuuuuuuugaaauaaaauagccugucuuucagaucucaaaggcucuuuucagagccaccaaaaaaaaaaaaaaaaaaaaaaaaaaaaaaaaaaaaaaaaaaaaaaaaaaaaaaaaaaaaaaaaaaaaaaaaaaaaaaaaaaaaaaaaaaaaaaaaaaaaa

SEQ ID NO: 40608 - RNA, 1767 nt, Artificial Sequence
  mRNA product Design a-2 (hSL-A100) comprising derived and/or modified sequence from MOPV/LASV reassortant(IGS-1;Clade IV)__AFY05576__GPCmut12 (opt1)
aggagaguccgcucagccagguugcagaagcggcuuagcguguguccuaaucuucucucugcguguagguaggccugugccgcaaacaagcuuaccaugggccagaucgugaccuucuuccaggaggucccccacgugaucgaggaggugaugaacaucguccugaucgcccucagcgugcuggccgugcugaaggggcucuacaacuucgcgaccugcggccuggucgggcuggugacguuccuccugcugugcggccgcuccugcaccaccagccucuacaaggggguguacgagcugcagacccuggagcucaacauggagacgcugaacaugugcaugccgcuguccugcaccaagaacaacagccaccacuacaucauggucggcaacgagaccggccucgagcugacgcugaccaacaccuccaucaucaaccacaaguucugcaaccucagcgacgcccacaagaagaaccuguacgaccacgcccugauguccaucaucagcaccuuccaccucuccauccccaacuucaaccaguacgaggccaugagcugcgacuucaacgggggcaagaucuccgugcaguacaaccugagccacuccuacgccggggacgcggccaaccacugcggcacgguggccaacgggguccugcagaccuucaugcggauggccuggggcggcagcuacaucgcgcucgacuccgggcgcggcaacugggacugcaucaugaccagcuaccaguaccugaucauccagaacaccacgugggaggaccacugccaguucucccggcccagccccaucggguaccugggccuccugucccagcgcacccgggacaucuacaucagccgccggcugcucggcaccuucaccuggacgcugagcgacuccgagggggaggacaccccgggcggguacugccugacccgcuggaugcucaucgaggccgagcugaagugcuucggcaacaccgccguggccaagugcaacgagaagcacgacgaggaguucugcgacaugcugcggcuguucgacuucugcaagcaggccauccagcgccugaaggcggaggcccagaugagcauccagcugaucaacaaggccgugaacgcccucaucaacgaccagcugaucaugaagaaccaccuccgggacaucauggggauccccuacugcaacuacuccaaguacugcuaccucaaccacacgaccaccggccgcaccagccugcccaagugcugccuggucuccaacggcagcuaccucaacgagacgcacuucuccgacgacaucgagcagcaggccgacaacaugaucaccgagaugcugcagaaggaguacauggagcggcaggggaagacgccccugggccucguggaccuguucguguucagcaccuccuucuaccugaucagcaucuuccugcaccucgucaagaucccgacccaccgccacaucguggggaaguccugccccaagccccaccggcugaaccacaugggcaucugcagcugcgggcuguacaagcagcccggcgugccggucaaguggaagcgcugaggacuagucccuguucccagagcccacuuuuuuuucuuuuuuugaaauaaaauagccugucuuucagaucucaaaggcucuuuucagagccaccaaaaaaaaaaaaaaaaaaaaaaaaaaaaaaaaaaaaaaaaaaaaaaaaaaaaaaaaaaaaaaaaaaaaaaaaaaaaaaaaaaaaaaaaaaaaaaaaaaaaa

SEQ ID NO: 40609 - RNA, 1767 nt, Artificial Sequence
  mRNA product Design a-2 (hSL-A100) comprising derived and/or modified sequence from LASV(LM765-SLE-2012;Clade IV)__AIT17814__GPCmut12 (opt1)
aggagaguccgcucagccagguugcagaagcggcuuagcguguguccuaaucuucucucugcguguagguaggccugugccgcaaacaagcuuaccaugggccagaucgugaccuucuuccaggaggucccccacgugaucgaggaggugaugaacaucguccugaucgcccucagcauccuggccgugcugaaggggcucuacaacuucgcgaccugcggccugguggggcuggucacguuccuccugcugugcggccgcuccugcaccaccagccucuacaaggggguguacgagcugcagacccuggagcucaacauggagacgcugaacaugugcaugccgcuguccugcaccaagaacaacagccaccacuacaucauggugggcaacgagaccggccucgagcugacgcugaccaacaccuccaucaucgaccacaaguucugcaaccucagcgacgcccaccggaagaaccuguacgaccacgcccugauguccaucaucagcaccuuccaccucuccauccccaacuucaaccaguacgaggccaugagcugcgacuucaacgggggcaagaucuccguccaguacaaccugagccacuccuacgccaaggacgcggccgaccacugcgggacgguggccaacggcgugcugcagaccuucaugcgcauggccuggggcgggagcuacaucgcgcucgacuccggccgggggcgcugggacugcaucaugaccagcuaccaguaccugaucauccagaacaccacgugggaggaccacugccaguucucccggcccagccccaucggcuaccuggggcuccugucccagcgcacccgggacaucuacaucagccgccggcugcucggcaccuucaccuggacgcugagcgacuccgagggcaaggacacccccgggggcuacugccugacccgcuggaugcucaucgaggccgagcugaagugcuucgggaacaccgccgucgccaagugcaacgagaagcacgacgaggaguucugcgacaugcugcggcuguucgacuucugcaagcaggccauccagcgccugaaggcggaggcccagaugagcauccagcugaucaacaaggccgugaacgcccucaucaacgaccagcugaucaugaagaaccaccuccgggacaucaugggcauccccuacugcaacuacuccaaguacugcuaccucaaccacacgaccaccgggaagaccagccugcccaagugcugccugguguccaacggcagcuaccucaacgagacgcacuucuccgacgacaucgagcagcaggccgacaacaugaucaccgagaugcugcagaaggaguacauggagcgccagggcaagaccccgcuggggcucgucgaccuguucguguucagcaccuccuucuaccugaucagcaucuuccugcaccucgugaagaucccgacgcaccggcacaucgucggcaagcccugccccaagccccaccgccugaaccacauggggaucugcuccugcggccuguacaagcagccgggggugcccgugaaguggaagcggugaggacuagucccuguucccagagcccacuuuuuuuucuuuuuuugaaauaaaauagccugucuuucagaucucaaaggcucuuuucagagccaccaaaaaaaaaaaaaaaaaaaaaaaaaaaaaaaaaaaaaaaaaaaaaaaaaaaaaaaaaaaaaaaaaaaaaaaaaaaaaaaaaaaaaaaaaaaaaaaaaaaaa

SEQ ID NO: 40610 - RNA, 1767 nt, Artificial Sequence
  mRNA product Design a-2 (hSL-A100) comprising derived and/or modified sequence from LASV(LM776-SLE-2012;Clade IV)__AIT17824__GPCmut12 (opt1)
aggagaguccgcucagccagguugcagaagcggcuuagcguguguccuaaucuucucucugcguguagguaggccugugccgcaaacaagcuuaccaugggccagaucgugaccuucuuccaggaggucccccacgugaucgaggaggugaugaacaucguccugaucgcccucagcauccuggccgugcugaaggggcucuacaacuucgcgaccugcggccugguggggcuggucacguuccuccugcugugcggccgcuccugcaccaccagcguguacaaggggguguacgagcuccagacccuggagcugaacauggagacgcucaacaugugcaugccgcuguccugcaccaagaacaacagccaccacuacaucauggucggcaacgagaccggccuggagcucacgcugaccaacaccuccaucaucaaccacaaguucugcaaccugagcgacgcccacaagaagaaccucuacgaccacgcccugauguccaucaucagcaccuuccaccuguccauccccaacuucaaccaguacgaggccaugagcugcgacuucaacgggggcaagaucuccgugcaguacaaccucagccacuccuacgccggggacgcggccaaccacugcggcacgguggccaacgggguccugcagaccuucaugcggauggccuggggcggcagcuacaucgcgcuggacuccgggcacggcaagugggacugcaucaugaccagcuaccaguaccucaucauccagaacaccacgugggaggaccacugccaguucucccgccccagccccaucggguaccugggccugcucucccagcggacccgcgacaucuacaucagccggcgccugcugggcaccuucaccuggacgcucagcgacuccgaggggaaggacaccccgggcggguacugccugacccgguggaugcugaucgaggccgagcucaagugcuucggcaacaccgccguggccaagugcaacgagaagcacgacgaggaguucugcgacaugcugcgccuguucgacuucugcaagcaggccauccagcggcucaaggcggaggcccagaugagcauccagcugaucaacaaggccgugaacgcccugaucaacgaccagcucaucaugaagaaccaccuccgcgacaucauggggauccccuacugcaacuacuccaaguacugcuaccugaaccacacgaccaccggcaagaccagccugcccaagugcugccuggucuccaacggcagcuaccugaacgagacgcacuucuccgacgacaucgagcagcaggccgacaacaugaucaccgagaugcuccagaaggaguacauggagcggcaggggaagacgccccugggccugguggaccucuucguguucagcaccuccuucuaccugaucagcaucuuccugcaccuggucaagaucccgacccaccgccacaucguggggaaguccugccccaagccccaccggcucaaccacaugggcaucugcagcugcgggcuguacaagcagcccggcgugccgguccgcuggaagcggugaggacuagucccuguucccagagcccacuuuuuuuucuuuuuuugaaauaaaauagccugucuuucagaucucaaaggcucuuuucagagccaccaaaaaaaaaaaaaaaaaaaaaaaaaaaaaaaaaaaaaaaaaaaaaaaaaaaaaaaaaaaaaaaaaaaaaaaaaaaaaaaaaaaaaaaaaaaaaaaaaaaaa

SEQ ID NO: 40611 - RNA, 1767 nt, Artificial Sequence
  mRNA product Design a-2 (hSL-A100) comprising derived and/or modified sequence from LASV(Mad39;Clade IV)__ANH09722__GPCmut12 (opt1)
aggagaguccgcucagccagguugcagaagcggcuuagcguguguccuaaucuucucucugcguguagguaggccugugccgcaaacaagcuuaccaugggccagaucgugaccuucuuccaggaggucccccacgugaucgaggaggugaugaacaucguccugaucgcccucagcauccuggccgugcugaaggggcucuacaacguggcgaccugcggccugaucgggcuggucacguuccuccugcugugcggccgcuccugcaccaccacccucuacaaggggguguacgagcugcaggcccuggagcucaacauggagacgcugaacaugugcaugccgcugagcugcaccaagaacaacucccaccacuacauccgggugggcaacgagaccggccucgagcugacgcugaccaacaccagccucaucaaccacaaguucugcaaccuguccgacgcccacaagaagaaccuguacgaccacgcccucaugagcaucaucuccaccuuccaccugagcauccccaacuucaaccaguacgaggccauguccugcgacuucaacgacgggaagaucagcguccaguacaaccugucccacacguacgcgggcgacaccgccaaccacugcgggaccguggccaacggcgugcuccagaccuucaugcgcauggccuggggcgggagcuacaucgcgcuggacuccggccgcgggggcugggacugcaucaugacgagcuaccaguaccugaucauccagaacaccaccugggaggaccacugccaguucucccggcccagccccaucggguaccucggccugcugucccagcggacccgcgacaucuacaucagccggcgccuccugggcacguucaccuggacccuguccgacagcgaggggaaggacaccccgggcggguacugccucacgcgguggaugcugaucgaggccgagcugaagugcuucggcaacaccgccgucgccaagugcaacgagaagcacgacgaggaguucugcgacaugcuccgccuguucgacuucugcaagcaggccauccagcggcugaaggcggaggcccagaugagcauccagcucaucaacaaggccgugaacgcccugaucaacgaccagcugaucaugaagaaccaccuccgcgacaucauggggauccccuacugcaacuacuccaaguacugcuaccugaaccacaccgugaccggcaagacgagccugcccaagugcugccucgucuccaacggcagcuaccugaacgagacccacuucuccgacgacaucgagcagcaggccgacaacaugaucaccgagaugcugcagaaggaguacauggagcggcaggggaagacgccccucggccugguggaccuguucguguucagcaccuccuucuaccugaucagcaucuuccuccaccuggucaagaucccgacccaccgccacgugguggggaagcccugccccaagccccaccggcugaaccacaugggcaucugcuccugcggguucuacaagcagccgggcguccccgugcgcuggaagcggugaggacuagucccuguucccagagcccacuuuuuuuucuuuuuuugaaauaaaauagccugucuuucagaucucaaaggcucuuuucagagccaccaaaaaaaaaaaaaaaaaaaaaaaaaaaaaaaaaaaaaaaaaaaaaaaaaaaaaaaaaaaaaaaaaaaaaaaaaaaaaaaaaaaaaaaaaaaaaaaaaaaaa

SEQ ID NO: 40612 - RNA, 1767 nt, Artificial Sequence
  mRNA product Design a-2 (hSL-A100) comprising derived and/or modified sequence from LASV(Z0947-SLE-2011;Clade IV)__AIT17840__GPCmut12 (opt1)
aggagaguccgcucagccagguugcagaagcggcuuagcguguguccuaaucuucucucugcguguagguaggccugugccgcaaacaagcuuaccaugggccagaucgugaccuucuuccaggaggucccccacgugaucgaggaggugaugaacaucguccugaucgcccucagcauccuggccgugcugaaggggcucuacaacuucgcgaccugcggccugguggggcuggucacguuccuccugcugugcggccgcuccugcaccaucagccucuacaaggggguguacgagcugcagacccuggagcucaacauggagacccugaacaugugcaugccgcuguccugcaccaagaacaacagccaccacuacaucauggugggcaacgagaccggccucgagcugacccugacgaacaccuccaucaucaaccacaaguucugcaaccucagcgacgcccacaagaagaaccuguacgaccacgcccugauguccaucaucagcaccuuccaccucuccauccccaacuucaaccaguacgaggccaugagcugcgacuucaacgggggcaagaucuccguccaguacaaccugagccacuccuacgccggggacgcggccaaccacugcggcaccguggccaacggggugcugcagacguucaugcggauggccuggggcggcagcuacaucgcgcucgacuccgggcgcgaccggugggacugcaucaugaccagcuaccaguaccugaucauccagaacaccaccugggaggaccacugccaguucucccgccccagccccaucggcuaccuggggcuccugucccagcggacgcgcgacaucuacaucagccggcgccugcucggcaccuucaccuggacccugagcgacuccgagggcaaggacacgcccgggggcuacugccugacccgguggaugcucaucgaggccgagcugaagugcuucgggaacaccgccgucgccaagugcaacgagaagcacgacgaggaguucugcgacaugcugcgccucuucgacuucugcaagcaggccauccagcggcugaaggcggaggcccagaugagcauccagcugaucaacaaggccgugaacgcccucaucaacgaccagcugaucaugaagaaccaccuccgcgacaucaugggcauccccuacugcaacuacuccaaguacugcuaccugaaccacaccacgaccgggaagaccagccugcccaagugcugccugguguccaacggcagcuaccucaacgagacccacuucuccgacgacaucgagcagcaggccgacaacaugaucacggagaugcugcagaaggaguacauggagcggcagggcaagaccccgcuggggcucgucgaccuguucguguucagcaccuccuucuaccugaucagcaucuuccugcaccucgugaagaucccgacccaccgccacaucgucggcaagcccugccccaagccccaccggcugaaccacauggggaucugcuccugcggccuguacaagcagccgggggugcccgugaaguggaagcgcugaggacuagucccuguucccagagcccacuuuuuuuucuuuuuuugaaauaaaauagccugucuuucagaucucaaaggcucuuuucagagccaccaaaaaaaaaaaaaaaaaaaaaaaaaaaaaaaaaaaaaaaaaaaaaaaaaaaaaaaaaaaaaaaaaaaaaaaaaaaaaaaaaaaaaaaaaaaaaaaaaaaaa

SEQ ID NO: 40613 - RNA, 1767 nt, Artificial Sequence
  mRNA product Design a-2 (hSL-A100) comprising derived and/or modified sequence from LASV(Josiah;Clade IV)__NP_694870__GPCmut12 (opt1)
aggagaguccgcucagccagguugcagaagcggcuuagcguguguccuaaucuucucucugcguguagguaggccugugccgcaaacaagcuuaccaugggccagaucgugaccuucuuccaggaggucccccacgugaucgaggaggugaugaacaucguccugaucgcccucagcgugcuggccgugcugaaggggcucuacaacuucgcgaccugcggccuggucgggcuggugaccuuccuccugcugugcggccgcuccugcaccaccagccucuacaaggggguguacgagcugcagacccuggagcucaacauggagacgcugaacaugugcaugccgcuguccugcaccaagaacaacagccaccacuacaucauggucggcaacgagaccggccucgagcugacccugacgaacaccuccaucaucaaccacaaguucugcaaccucagcgacgcccacaagaagaaccuguacgaccacgcccugauguccaucaucagcaccuuccaccucuccauccccaacuucaaccaguacgaggccaugagcugcgacuucaacgggggcaagaucuccgugcaguacaaccugagccacuccuacgccggggacgcggccaaccacugcggcaccguggccaacgggguccugcagacguucaugcggauggccuggggcggcagcuacaucgcgcucgacuccgggcgcggcaacugggacugcaucaugaccagcuaccaguaccugaucauccagaacaccaccugggaggaccacugccaguucucccggcccagccccaucggguaccugggccuccugucccagcgcacgcgggacaucuacaucagccgccggcugcucggcaccuucaccuggacccugagcgacuccgaggggaaggacacgccgggcggguacugccugacccgcuggaugcucaucgaggccgagcugaagugcuucggcaacaccgccguggccaagugcaacgagaagcacgacgaggaguucugcgacaugcugcggcuguucgacuucugcaagcaggccauccagcgccugaaggcggaggcccagaugagcauccagcugaucaacaaggccgugaacgcccucaucaacgaccagcugaucaugaagaaccaccuccgggacaucauggggauccccuacugcaacuacuccaaguacugcuaccucaaccacaccacgaccggccgcaccagccugcccaagugcugccuggucuccaacggcagcuaccucaacgagacccacuucuccgacgacaucgagcagcaggccgacaacaugaucacggagaugcugcagaaggaguacauggagcggcaggggaagacgccccugggccugguggaccucuucguguucagcaccuccuucuaccugaucagcaucuuccugcaccucgucaagaucccgacccaccgccacaucguggggaaguccugccccaagccccaccggcugaaccacaugggcaucugcagcugcgggcuguacaagcagcccggcgugccggucaaguggaagcgcugaggacuagucccuguucccagagcccacuuuuuuuucuuuuuuugaaauaaaauagccugucuuucagaucucaaaggcucuuuucagagccaccaaaaaaaaaaaaaaaaaaaaaaaaaaaaaaaaaaaaaaaaaaaaaaaaaaaaaaaaaaaaaaaaaaaaaaaaaaaaaaaaaaaaaaaaaaaaaaaaaaaaa

SEQ ID NO: 40614 - RNA, 1764 nt, Artificial Sequence
  mRNA product Design a-2 (hSL-A100) comprising derived and/or modified sequence from LASV(LP;Clade I)__AAF86701__GPCmut12 (opt1)
aggagaguccgcucagccagguugcagaagcggcuuagcguguguccuaaucuucucucugcguguagguaggccugugccgcaaacaagcuuaccaugggccagaucaucaccuucuuccaggaggugccccacgucaucgaggaggugaugaacaucgugcugaucgcccucagccugcuggccauccucaaggggcuguacaacaucgcgaccugcggcaucaucgggcuggucgccuuccucuuccugugcggcaaguccugcagccugacgcucaagggcggguacgagcugcagacccuggagcucaacauggagacccugaacaugugcaugccgcuguccugcaccaagaacagcucccaccacuacauccgcgugggcaacgagacggggcucgagcugacccugaccaacaccagcaucaucaaccacaaguucugcaaccucuccgacgcccacaagaagaaccuguacgaccacgcccugaugagcaucaucuccacguuccaccucagcauccccaacuucaaccaguacgaggccauguccugcgacuucaacggcgggaagaucagcgugcaguacaaccugucccacagcuacgcgggcgacgccgccgagcacugcgggaccgucgccaacggcgugcugcagaccuucaugcggauggcguggggcgggcgcuacaucgcccucgacuccggcaaggggaacugggacugcaucaugaccagcuaccaguaccugaucauccagaacacgaccugggaggaccacugccaguucucccggcccagccccaucggcuaccugggccuccugucccagcgcacccgggacaucuacaucagccgccggcugcucgggaccuucacguggacccugagcgacuccgagggcaacgagacccccgggggcuacugccugacccgcuggaugcucaucgaggccgagcugaagugcuucgggaacacggccguggccaagugcaacgagaagcacgacgaggaguucugcgacaugcugcggcuguucgacuucugcaagcaggcgauccgccggcugaaggccgaggcccagaugagcauccagcugaucaacaaggccgucaacgcccucaucaacgaccagcugaucaugaagaaccaccuccgcgacaucaugggcauccccuacugcaacuacuccaaguacugcuaccucaaccacaccagcuccggccggaccagccugcccaagugcugccugaucuccaacgggagcuaccucaacgagacccaguucuccgacgacaucgagcagcaggcggacaacaugaucacggagaugcugcagaaggaguacaucgagcgccagggcaagaccccgcuggggcugguggacaucuucaucuucagcaccuccuucuaccucaucagcaucuuccugcaccugaucaagaucccgacccaccggcacaucgugggcaagcccugccccaagccccaccgccucaaccacaugggggucugcuccugcggccuguacaagcacccgggcgugcccacgaaguggaagcggugaggacuagucccuguucccagagcccacuuuuuuuucuuuuuuugaaauaaaauagccugucuuucagaucucaaaggcucuuuucagagccaccaaaaaaaaaaaaaaaaaaaaaaaaaaaaaaaaaaaaaaaaaaaaaaaaaaaaaaaaaaaaaaaaaaaaaaaaaaaaaaaaaaaaaaaaaaaaaaaaaaaaa

SEQ ID NO: 40615 - RNA, 1764 nt, Artificial Sequence
  mRNA product Design a-2 (hSL-A100) comprising derived and/or modified sequence from LASV(803213;Clade II)__AAF86703__GPCmut12 (opt1)
aggagaguccgcucagccagguugcagaagcggcuuagcguguguccuaaucuucucucugcguguagguaggccugugccgcaaacaagcuuaccaugggccagaucaucaccuucuuccaggaggugccccacgucaucgaggaggugaugaacaucgugcugaucgcccucagccugcuggccauccucaaggggaucuacaacgucgcgaccugcggccuguucgggcugaucuccuuccuccugcugugcggccgcagcugcuccgugacguacaaggggguguacgagcuccagacccuggagcugaacauggccaaccucaacaugugcaugccgcugagcugcaccaagaacaacucccaccacuacaucauggucggcaacgagaccggccuggagcucacgcugaccaacaccagcaucaucaaccacaaguucugcaaccuguccgacgcccacaagaagaaccucuacgaccacgcccugaugagcaucaucuccaccuuccaccugagcauccccaacuucaaccaguacgaggccauguccugcgacuucaacgggggcaagaucagcgugcaguacaaccucucccacagcuucgcgguggacgccgccaaccacugcgggacgaucgccaacggcguccugcagaccuucaugcggauggcguggggcggguccuacaucgcccuggacagcggcaaggggaacugggacugcaucaugaccuccuaccaguaccucaucauccagaacaccacgugggaggaccacugccaguucagccgccccucccccaucggcuaccuggggcugcucagccagcggacccgcgacaucuacaucagccggcgccugcugggcaccuucaccuggacgcucuccgacagcgagggcaacgaggcccccgggggcuacugccugacccgguggaugcugaucgaggccgagcucaagugcuucgggaacaccgccguggcgaagugcaacgagaagcacgacgaggaguucugcgacaugcugcgccuguucgacuucugcaagcaggccaucaagcggcucaagaccgaggcccagauguccauccagcugaucaacaaggccgugaacgcccugaucaacgaccagcucaucaugaagaaccaccuccgcgacaucaugggcauccccuacugcaacuacagccgguacugcuaccugaaccacacggucaccgggaagaccucccugccccgcugcugccuggugagcaacggcuccuaccugaacgagacccacuucagcgacgacaucgagcagcaggcggacaacaugaucacggagaugcuccagaaggaguacauggaccggcagggcaagaccccgcuggggcugguggaccuguucgucuucuccaccagcuucuaccucaucuccaucuuccugcaccuggugaagaucccgacccaccgccacaucgugggcaagcccugccccaagccccaccggcucaaccacauggggaucugcagcugcggccuguacaagcacccggggguccccgugaaguggaagcgcugaggacuagucccuguucccagagcccacuuuuuuuucuuuuuuugaaauaaaauagccugucuuucagaucucaaaggcucuuuucagagccaccaaaaaaaaaaaaaaaaaaaaaaaaaaaaaaaaaaaaaaaaaaaaaaaaaaaaaaaaaaaaaaaaaaaaaaaaaaaaaaaaaaaaaaaaaaaaaaaaaaaaa

SEQ ID NO: 40616 - RNA, 1764 nt, Artificial Sequence
  mRNA product Design a-2 (hSL-A100) comprising derived and/or modified sequence from LASV(GA391;Clade III)__CAA36645__GPCmut12 (opt1)
aggagaguccgcucagccagguugcagaagcggcuuagcguguguccuaaucuucucucugcguguagguaggccugugccgcaaacaagcuuaccaugggccagaucgugaccuucuuccaggaggucccccacgugaucgaggaggugaugaacaucguccugaucgcccucagcauccuggccauccugaaggggcucuacaacguggcgaccugcggccugaucgggcuggugaccuuccuccugcuguccggccgcagcugcucccucaucuacaaggggaccuacgagcugcagacccuggagcucaacauggagacccugaacaugugcaugccgcugagcugcacgaagaacaacucccaccacuacauccgggucggcaacgagaccggccucgagcugacccugaccaacacgagcauccucaaccacaaguucugcaaccuguccgacgcccacaagcgcaaccuguacgaccacagccucauguccaucaucagcaccuuccaccuguccauccccaacuucaaccaguacgaggccaugagcugcgacuucaacgggggcaagaucaccgugcaguacaaccugucccacagcuucgccguggacgccgcggggcacugcggcacccucgccaacgggguccugcagacguucaugcggauggccuggggcggcuccuacaucgcccuggacagcgggcgcggcaacugggacugcaucaugaccuccuaccaguaccucaucauccagaacaccaccugggacgaccacugccaguucagccggcccucccccaucggguaccugggccugcucagccagcgcacgcgggacaucuacaucagccgccggcugcugggcaccuucaccuggacccucuccgacagcgaggggaacgagacgccgggcggguacugccugacccgcuggaugcugaucgaggcggagcucaagugcuucggcaacaccgccguggccaagugcaacgagaagcacgacgaggaguucugcgacaugcugcggcuguucgacuucugcaagcaggccauccgccggcucaagaccgaggcccagauguccauccagcugaucaacaaggcggugaacgcccugaucaacgaccagcucaucaugaagaaccaccuccgcgacaucauggggauccccuacugcaacuacagccgguacugcuaccugaaccacacguccaccggcaagaccagccugccccgcugcugccugaucuccaacggcagcuaccugaacgagaccaaguucuccgacgacaucgagcagcaggccgacaacaugaucacggagaugcugcagaaggaguacaucgaccggcaggggaagacgccccucggccuggucgaccuguucguguucagcaccuccuucuaccucaucagcaucuuccugcaccuggugaagaucccgacccaccgccacaucgucgggaagcccugccccaagccccaccggcucaaccacaugggcaucugcuccugcgggcuguacaagcagccgggcgugcccgugcgcuggaagcggugaggacuagucccuguucccagagcccacuuuuuuuucuuuuuuugaaauaaaauagccugucuuucagaucucaaaggcucuuuucagagccaccaaaaaaaaaaaaaaaaaaaaaaaaaaaaaaaaaaaaaaaaaaaaaaaaaaaaaaaaaaaaaaaaaaaaaaaaaaaaaaaaaaaaaaaaaaaaaaaaaaaaa

SEQ ID NO: 40617 - RNA, 1767 nt, Artificial Sequence
  mRNA product Design a-2 (hSL-A100) comprising derived and/or modified sequence from LASV(AV;Clade V)__CCA30314__GPCmut12 (opt1)
aggagaguccgcucagccagguugcagaagcggcuuagcguguguccuaaucuucucucugcguguagguaggccugugccgcaaacaagcuuaccaugggccagaucgugaccuucuuccaggaggucccccacgugaucgaggaggugaugaacaucguccugaucgcccucagcauccuggccgugcugaaggggcucuacaacaucgcgaccugcggccugaucgggcugaucacguuccuccugcugugcggccgcuccugcagcuccaaccucuacaaggggguguacgagcugcagagccuggaccucaacauggagacccugaacaugugcaugccgcuguccugcaccaagaacaacagccaccacuacauccgggucggcaacgacaccggccucgagcugacgcugaccaacaccuccauccucaaccacaaguucugcaaccugagcgacgcccacaagaaggaccuguacgaccacgcccucauguccaucaucagcaccuuccaccuguccauccccaacuucaaccaguacgaggccaugagcugcgacuucaacgggggcaagaucuccgugcaguacaaccugagccacuccuacgccaucgacgcggccaaccacugcgggacgguggccaacggcauccuccagaccuucaugcgcauggccuggggcgggagcuacaucgcgcuggacuccggccgggggaacugggacugcaucaugaccagcuaccaguaccugaucauccagaacaccacgugggagaaccacugccaguucucccgccccagccccaucggcuaccucgggcugcugagccagcggacccgcgacaucuacaucucccggcgccuccugggcaccuucaccuggacgcugagcgacuccgagggcaacgccacccccgggggcuacugccucacccgguggaugcugaucgaggccgagcugaagugcuucgggaacaccgccgucgccaagugcaacgagaagcacgacgaggaguucugcgacaugcuccgccuguucgacuucugcaagcaggcgaucagccggcugaaguccgaggcccagaugagcauccagcucaucaacaaggccgugaacgcccugaucaacgaccagcugaucaugaagaaccaccuccgcgacaucaugggcauccccuacugcaacuacuccaaguacugcuaccugaaccacacgaucaccgggaagaccagccugcccaagugcugccucguguccaacggcagcuaccugaacgagacccacuucuccgacgacaucgagcagcaggccgacaacaugaucacggagaugcugcagaaggaguacauggagcggcagggcaagaccccgcuggggcucgucgaccuguucguguucagcaccuccuucuaccugaucagcaucuuccuccgccuggugaagaucccgacccaccggcacaucgucggcaagcccugccccaagccccaccgccugaaccacauggggaucugcuccugcggccucuacaagcagccgggggugcccgugcgguggaagcgcugaggacuagucccuguucccagagcccacuuuuuuuucuuuuuuugaaauaaaauagccugucuuucagaucucaaaggcucuuuucagagccaccaaaaaaaaaaaaaaaaaaaaaaaaaaaaaaaaaaaaaaaaaaaaaaaaaaaaaaaaaaaaaaaaaaaaaaaaaaaaaaaaaaaaaaaaaaaaaaaaaaaaa

SEQ ID NO: 40618 - RNA, 1764 nt, Artificial Sequence
  mRNA product Design a-2 (hSL-A100) comprising derived and/or modified sequence from LASV(Togo/2016/7082;Clade VI)__AMR44577__GPCmut12 (opt1)
aggagaguccgcucagccagguugcagaagcggcuuagcguguguccuaaucuucucucugcguguagguaggccugugccgcaaacaagcuuaccaugggccagaucaucaccuucuuccaggaggugccccacgucaucgaggaggugaugaacaucgugcugaucgcccucagccugcuggccauccucaagggggucuacaacguggcgaccugcggcaucaucgggcuggugacguuccuguuccucugcggccgcuccugcagccugaucuacaagggguccuacgagcugcagacccucgagcugaacauggagacccugaacaugugcaugccgcucagcugcaccaagaacuccagccaccacuacauccgggucggcaacgagacgggccuggagcugacccucaccaacaccuccaucaucaaccacaaguucugcaaccugagcgacgcccacaagcgcaaccuguacgaccacgcccucauguccauccugagcacguuccaccuguccauccccaacuucaaccaguacgaggccaugagcugcgacuucaacgggggcaagaucuccgugcaguacaaccucagccacgccuacgcgguggacgccgccgagcacugcgggaccgucgccaacggcgugcugcagaccuucaugcggauggcguggggcggguccuacaucgcccuggacagcggccgcgggaacugggacugcaucaugaccuccuaccaguaccucaucauccagaacacgaccugggaggaccacugccaguucagccggcccucccccaucggcuaccuggggcugcucagccagcgcacccgggacaucuacaucagccgccggcugcugggcaccuucacguggacccucuccgacagcgagggcaacgagacccccgggggcuacugccugacccgcuggaugcugaucgaggccgagcucaagugcuucgggaacacggccguggccaagugcaacgagaagcacgacgaggaguucugcgacaugcugcggcuguucgacuucugcaagcaggcgauccagcgccucaaguccgaggcccagaugagcauccagcugaucaacaaggccgucaacgcccugaucaacgaccagcucaucaugaagaaccaccuccgggacaugaugggcauccccuacugcaacuacuccaaguacugcuaccugaaccacaccagcuccgggcgcaccagccugcccaagugcugccugguguccaacggcagcuaccugaacgagacccacuucuccgacgacaucgagcagcaggccgacaacaugaucacggagaugcuccagaaggaguacaucgaccggcagggcaagaccccgcuggggcugguggaccuguucgucuucagcaccuccuucuaccucaucagcaucuuccugcaccugaucaagaucccgacccaccgccacaucgugggcaagcccugccccaagccccaccggcucaaccacauggggaucugcuccugcggccuguacaagcagccgggggugcccacgcgcuggaagcggugaggacuagucccuguucccagagcccacuuuuuuuucuuuuuuugaaauaaaauagccugucuuucagaucucaaaggcucuuuucagagccaccaaaaaaaaaaaaaaaaaaaaaaaaaaaaaaaaaaaaaaaaaaaaaaaaaaaaaaaaaaaaaaaaaaaaaaaaaaaaaaaaaaaaaaaaaaaaaaaaaaaaa

SEQ ID NO: 40619 - RNA, 1764 nt, Artificial Sequence
  mRNA product Design a-2 (hSL-A100) comprising derived and/or modified sequence from LASV(KAK-428;Clade n.d. (VII))__ANH09740__GPCmut12 (opt1)
aggagaguccgcucagccagguugcagaagcggcuuagcguguguccuaaucuucucucugcguguagguaggccugugccgcaaacaagcuuaccaugggccagaucgugaccuucuuccaggaggucccccacgugaucgaggaggugaugaacaucguccugaucgcccucagccugcuggccauccucaaggggcuguacaacuucgcgaccugcggcgugaucgggcugaucacguuccuccugcugugcggccgcuccugcagcgccaccuacaaggggcaguacgagcuccagacccuggagcugaacauggagucccucaacaugugcaugccgcugagcugcaccaagaacaacucccaccacuacauccgggccggcaacaacacgggccuggagcucacccugaccaacaccagcaucaucucccacaaguucugcaaccugagcgacgcccacaagaagaaccucuacgaccacacgcugauguccaucaucaccaccuuccaccugagcauccccaacuucaaccaguacgaggccauguccugcgacuucaacgggggcaagaucagcauccaguacaaccucucccacagcuacgcgggggacgccgcccagcacugcggcaccguggccaacgggguccugcagacguucaugcgcauggcguggggcggcuccuaccuggcccucgacagcgggcggcgcggcugggacugcaucaucuccagcuaccaguaccugaucauccagaacaccaccugggacgaccacugccaguucucccggcccagccccaucggguaccugggcuucgugagccagaagacccgcgacaucuacaucucccggcgccuccugggcacguucaccuggacccugagcgacuccgaggggcacgacaugccgggcggguacugccucacccgguggaugcugaucgaggccgaccugaagugcuucggcaacacggccguggccaagugcaacgagaagcacgacgaggaguucugcgacauguggcgccucuucgacuucugcaagcaggcgauccagcggcugaaggccgaggcccagaugaacauccagcugaucaacaaggccgucaacgcccucaucaacgaccagcugaugaugaagaaccaccuccgcgacaucauggggauccccuacugcaacuacagcaaguucugcuaccugaacaacaccaccaccggccggacgucccugccccgcugcugccugaucagcaacggcuccuaccucaacgagacccacuucagcgacgacaucgagcagcaggcggacaacaugaucaccgagaugcugcagaaggaguacauggaccggcaggggaagacgccccugggccucguggaccuguucguguucuccaccagcuucuaccugaucaccaucuuccugcaccucgucaagaucccgacccaccgccacaucguggggaagcccugccccaagccccaccggcugaaccacaugggcaucugcuccugcgggcuguacaagcagccgggcgugcccguccgcuggaagcggugaggacuagucccuguucccagagcccacuuuuuuuucuuuuuuugaaauaaaauagccugucuuucagaucucaaaggcucuuuucagagccaccaaaaaaaaaaaaaaaaaaaaaaaaaaaaaaaaaaaaaaaaaaaaaaaaaaaaaaaaaaaaaaaaaaaaaaaaaaaaaaaaaaaaaaaaaaaaaaaaaaaaa

SEQ ID NO: 40620 - RNA, 1764 nt, Artificial Sequence; identical to SEQ ID NO: 40614
  mRNA product Design a-2 (hSL-A100) comprising derived and/or modified sequence from LASV(Pinneo-NIG-1969;Clade I)__AIT17836__GPCmut12 (opt1)

SEQ ID NO: 40621 - RNA, 1764 nt, Artificial Sequence
  mRNA product Design a-2 (hSL-A100) comprising derived and/or modified sequence from LASV(ISTH0009-NIG-2011;Clade II)__AIT17404__GPCmut12 (opt1)
aggagaguccgcucagccagguugcagaagcggcuuagcguguguccuaaucuucucucugcguguagguaggccugugccgcaaacaagcuuaccaugggccagaucaucaccuucuuccaggaggugccccacgucaucgaggaggugaugaacaucgugcugaucgcccucagccugcuggccauccucaaggggaucuacaacgucgcgaccugcggccuguucgggcugguguccuuccuccugcugugcggccgcagcugcuccacgaccuacaaggggguguacgagcuccagacccuggagcuggacauggccagccucaacaugugcaugccgcuguccugcaccaagaacaacagccaccacuacaucauggucggcaacgagacgggccuggagcucacccugaccaacaccuccaucaucaaccacaaguucugcaaccugagcgacgcccacaagaagaaccucuacgaccacgcccugauguccaucaucagcacguuccaccuguccauccccaacuucaaccaguacgaggccaugagcugcgacuucaacgggggcaagaucuccgugcaguacaaccucagccacgcguacgccguggacgccgccaaccacugcgggaccaucgcgaacggcguccugcagaccuucaugcggauggccuggggcggguccuacaucgcccuggacagcggcaagggguccugggacugcaucaugaccagcuaccaguaccucaucauccagaacacgaccugggaggaccacugccaguucucccgccccagccccaucggcuaccuggggcugcucagccagcggacccgcgacaucuacaucucccggcgccugcugggcaccuucacguggacccucagcgacuccgagggcaacgagacccccgggggcuacugccugacccgguggaugcugaucgaggccgagcucaagugcuucgggaacacggccguggcgaagugcaacgagaagcacgacgaggaguucugcgacaugcugcgccuguucgacuucugcaagcaggccauccggcgccucaagaccgaggcccagaugagcauccagcugaucaacaaggccgugaacgcccugaucaacgaccagcucaucaugaagaaccaccuccgggacaucaugggcauccccuacugcaacuacuccaaguacugcuaccugaaccacaccgucaccgggaagacgagccugccccgcugcugccugguguccaacggcagcuaccugaacgagacccacuucuccgacgacaucgagcagcaggcggacaacaugaucaccgagcuccugcagaaggaguacauggaccggcagggcaagaccccgcuggggcugguggaccucuucgucuucagcacguccuucuaccugaucagcaucuuccugcaccucaucaagaucccgacccaccgccacaucaccggcaagcccugccccaagccccaccggcugaaccacauggggaucugcuccugcggccuguacaagcacccgggggugcccgugaaguggaagcgcugaggacuagucccuguucccagagcccacuuuuuuuucuuuuuuugaaauaaaauagccugucuuucagaucucaaaggcucuuuucagagccaccaaaaaaaaaaaaaaaaaaaaaaaaaaaaaaaaaaaaaaaaaaaaaaaaaaaaaaaaaaaaaaaaaaaaaaaaaaaaaaaaaaaaaaaaaaaaaaaaaaaaa

SEQ ID NO: 40622 - RNA, 1764 nt, Artificial Sequence
  mRNA product Design a-2 (hSL-A100) comprising derived and/or modified sequence from LASV(ISTH2010-NIG-2012;Clade II)__AIT17482__GPCmut12 (opt1)
aggagaguccgcucagccagguugcagaagcggcuuagcguguguccuaaucuucucucugcguguagguaggccugugccgcaaacaagcuuaccaugggccagaucaucaccuucuuccaggaggugccccacgucaucgaggaggugaugaacaucgugcugaucgcccucagccugcuggccauccucaaggggaucuacaacgucgcgaccugcggccuguucgggcugguguccuuccuccugcugugcggccgcagcugcuccacgaccuacaaggggguguacgagcuccagacccuggagcuggacauggccagccucaacaugugcaugccgcuguccugcaccaagaacaacagccaccacuacaucauggucggcaacgagacgggccuggagcucacccugaccaacaccuccaucaucaaccacaaguucugcaaccugagcgacgcccacaagaagaaccucuacgaccacgcccugauguccaucaucagcacguuccaccuguccauccccaacuucaaccaguacgaggccaugagcugcgacuucaacgggggcaagaucuccgugcaguacaaccucagccacgcguacgccguggacgccgccaaccacugcgggaccaucgcgaacggcguccugcagaccuucaugcggauggccuggggcggguccuacaucgcccuggacagcggcaagggguccugggacugcaucaugaccagcuaccaguaccucaucauccagaacaucacgugggaggaccacugccaguucucccgccccagccccaucggcuaccuggggcugcucagccagcggacccgcgacaucuacaucucccggcgccugcugggcaccuucaccuggacgcucagcgacuccgagggcaacgagacccccgggggcuacugccugacccgguggaugcugaucgaggccgagcucaagugcuucgggaacaccgccguggcgaagugcaacgagaagcacgacgaggaguucugcgacaugcugcgccuguucgacuucugcaagcaggccauccggcgccucaagacggaggcccagaugagcauccagcugaucaacaaggccgugaacgcccugaucaacgaccagcucaucaugaagaaccaccuccgggacaucaugggcauccccuacugcaacuacuccaaguacugcuaccugaaccacaccgucaccgggaagaccagccugccccgcugcugccugguguccaacggcagcuaccugaacgagacgcacuucuccgacgacaucgagcagcaggcggacaacaugaucaccgagcuccugcagaaggaguacaucgaccggcagggcaagaccccgcuggggcugguggaccucuucgucuucagcaccuccuucuaccugaucagcaucuuccugcaccucgugaagaucccgacgcaccgccacguggucggcaagcccugccccaagccccaccggcugaaccacauggggaucugcuccugcggccuguacaagcacccgggggugcccgugaaguggaagcgcugaggacuagucccuguucccagagcccacuuuuuuuucuuuuuuugaaauaaaauagccugucuuucagaucucaaaggcucuuuucagagccaccaaaaaaaaaaaaaaaaaaaaaaaaaaaaaaaaaaaaaaaaaaaaaaaaaaaaaaaaaaaaaaaaaaaaaaaaaaaaaaaaaaaaaaaaaaaaaaaaaaaaa

SEQ ID NO: 40623 - RNA, 1764 nt, Artificial Sequence
  mRNA product Design a-2 (hSL-A100) comprising derived and/or modified sequence from LASV(Lassa virus/H.sapiens-wt/NGA/2015/ISTH_0543;Clade II)__AVO03639__GPCmut12 (opt1)
aggagaguccgcucagccagguugcagaagcggcuuagcguguguccuaaucuucucucugcguguagguaggccugugccgcaaacaagcuuaccaugggccagaucaucaccuucuuccaggaggugccccacgucaucgaggaggugaugaacaucgugcugaucgcccucagccugcuggccauccucaaggggaucuacaacgucgcgaccugcggccuguucgggcugguguccuuccuccugcugugcggccgcagcugcuccacgaccuacaaggggguguacgagcuccagacccuggagcuggacauggccaaccucaacaugugcaugccgcugagcugcaccaagaacaacucccaccacuacaucauggucggcaacgagacgggccuggagcucacccugaccaacaccagcaucaucaaccacaaguucugcaaccuguccgacgcccacaagaagaaccucuacgaccacgcccugaugagcaucaucuccacguuccaccugagcauccccaacuucaaccaguacgaggccauguccugcgacuucaacgggggcaagaucagcgugcaguacaaccucucccacaccuacgcgguggacgccgccaaccacugcgggaccaucgccaacggcguccugcagaccuucaugcggauggcguggggcgggagcuacaucgcccuggacuccggcaaggggagcugggacugcaucaugacguccuaccaguaccucgugauccagaacaccaccugggaggaccacugccaguucagccgccccucccccaucggcuaccuggggcugcucagccagcggacccgcgacaucuacaucagccggcgccugcugggcacguucaccuggacccucuccgacagcgagggcaacgagacccccgggggcuacugccugacgcgguggaugcugaucgaggccgagcucaagugcuucgggaacaccgccguggccaagugcaacgagaagcacgacgaggaguucugcgacaugcugcgccuguucgacuucugcaagcaggcgauccggcgccucaagaccgaggcccagauguccauccagcugaucaacaaggccgucaacgcccugaucaacgaccagcucaucaugaagaaccaccuccgggacaucaugggcaucccguacugcaacuacagcaaguacugcuaccugaaccacaccgugacggggaagaccucccugccccgcugcugccuggugagcaacggcuccuaccugaacgagacccacuucagcgacgacaucgagcagcaggccgacaacaugaucaccgagcuccugcagaaggaguacaucgaccggcagggcaagacgccccuggggcuggucgaccucuucguguucuccaccagcuucuaccugaucuccaucuuccugcaccucgugaagaucccgacccaccgccacaucaccggcaagcccugccccaagccccaccggcugaaccacauggggaucugcagcugcggccuguacaagcacccggggguccccgugaaguggaagcgcugaggacuagucccuguucccagagcccacuuuuuuuucuuuuuuugaaauaaaauagccugucuuucagaucucaaaggcucuuuucagagccaccaaaaaaaaaaaaaaaaaaaaaaaaaaaaaaaaaaaaaaaaaaaaaaaaaaaaaaaaaaaaaaaaaaaaaaaaaaaaaaaaaaaaaaaaaaaaaaaaaaaaa

SEQ ID NO: 40624 - RNA, 1764 nt, Artificial Sequence
  mRNA product Design a-2 (hSL-A100) comprising derived and/or modified sequence from LASV(Lassa virus/H.sapiens-wt/NGA/2016/ISTH_0009;Clade II)__AVO03571__GPCmut12 (opt1)
aggagaguccgcucagccagguugcagaagcggcuuagcguguguccuaaucuucucucugcguguagguaggccugugccgcaaacaagcuuaccaugggccagaucaucaccuucuuccaggaggugccccacgucaucgaggaggugaugaacaucgugcugaucgcccucagccugcuggccauccucaaggggaucuacaacgucgcgaccugcggccugcuggggcucguguccuuccugcugcucugcggccgcagcugcuccacgaccuacaaggggguguacgagcugcagacccuggagcucgacauggccagccugaacaugugcaugccgcuguccugcaccaagaacaacagccaccacuacaucauggucggcaacgagacgggccucgagcugacccugaccaacaccuccaucaucaaccacaaguucugcaaccucagcgacgcccacaagaagaaccuguacgaccacgcccugauguccaucaucagcacguuccaccucuccauccccaacuucaaccaguacgaggccaugagcugcgacuucaacgggggccggaucuccgugcaguacaaccugagccacuccuacgcgguggacgccgccaaccacugcgggaccaucgccaacggcguccugcagaccuucaugcgcauggcguggggcgggagcuacaucgcccucgacuccggcaaggggagcugggacugcaucaugaccuccuaccaguaccugaucauccagaacacgaccugggaggaccacugccaguucagccggcccagccccaucggcuaccuggggcuccugucccagcgcacccgggacaucuacaucagccgccggcugcucggcaccuucacguggacccuguccgacagcgagggcaacgagacccccgggggcuacugccugacccgcuggaugcucaucgaggccgagcugaagugcuucgggaacacggccguggccaagugcaacgagaagcacgacgaggaguucugcgacaugcugcggcuguucgacuucugcaagcaggcgauccgccggcugaagaccgaggcccagauguccauccagcugaucaacaaggccgugaacgcccucaucaacgaccagcugaucaugaagaaccaccuccgcgacaucaugggcauccccuacugcaacuacagcaaguacugcuaccucaaccacaccgucaccgggaagacgucccugccccggugcugccuggugagcaacggcuccuaccucaacgagacccacuucagcgacgacaucgagcagcaggccgacaacaugaucaccgagcugcugcagaaggaguacaucgaccgccagggcaagaccccgcuggggcucguggaccuguucgucuucuccacgagcuucuaccugaucuccaucuuccuccaccuggugaagaucccgacccaccggcacaucaccggcaagcccugccccaagccccaccgccugaaccacauggggaucugcagcugcggccucuacaaccacccgggggugcccgucaaguggaagcggugaggacuagucccuguucccagagcccacuuuuuuuucuuuuuuugaaauaaaauagccugucuuucagaucucaaaggcucuuuucagagccaccaaaaaaaaaaaaaaaaaaaaaaaaaaaaaaaaaaaaaaaaaaaaaaaaaaaaaaaaaaaaaaaaaaaaaaaaaaaaaaaaaaaaaaaaaaaaaaaaaaaaa

SEQ ID NO: 40625 - RNA, 1764 nt, Artificial Sequence
  mRNA product Design a-2 (hSL-A100) comprising derived and/or modified sequence from LASV(Lassa virus/H.sapiens-wt/NGA/2016/ISTH_0017;Clade II)__AVO03567__GPCmut12 (opt1)
aggagaguccgcucagccagguugcagaagcggcuuagcguguguccuaaucuucucucugcguguagguaggccugugccgcaaacaagcuuaccaugggccagaucaucaccuucuuccaggaggugccccacgucaucgaggaggugaugaacaucgugcugaucgcccucagccugcuggccauccucaaggggaucuacaacgucgcgaccugcggccuguucgggcugguguccuuccuccugcugugcggccgcagcugcuccacgaccuacaaggggguguacgagcuccagacccuggagcuggacauggccagccucaacaugugcaugccgcuguccugcaccaagaacaacagccaccacuacaucauggucggcaacgagacgggccuggagcucacccugaccaacaccuccaucaucaaccacaaguucugcaaccugagcgacgcccacaagaagaaccucuacgaccacgcccugauguccaucaucagcacguuccaccuguccauccccaacuucaaccaguacgaggccaugagcugcgacuucaacgggggcaagaucuccgugcaguacaaccucagccacaccuacgcgaucgacgccgccaaccacugcgggaccaucgccaacggcgugcugcagaccuucaugcggauggcguggggcggguccuacaucgcccuggacagcggcaagggguccugggacugcaucaugacgagcuaccaguaccucaucauccagaacaccaccugggaggaccacugccaguucucccgccccagccccaucggcuaccuggggcugcucagccagcggacccgcgacaucuacaucucccggcgccugcugggcacguucaccuggacccucagcgacuccgagggcaacgagacccccgggggcuacugccugacgcgguggaugcugaucgaggccgagcucaagugcuucgggaacaccgccgucgccaagugcaacgagaagcacgacgaggaguucugcgacaugcugcgccuguucgacuucugcaagcaggcgauccggcgccucaagaccgaggcccagaugagcauccagcugaucaacaaggccgugaacgcccugaucaacgaccagcucaucaugaagaaccaccuccgggacaucaugggcaucccguacugcaacuacuccaaguacugcuaccugaaccacaccgugacggggaagaccagccugccccgcugcugccuggucuccaacggcagcuaccugaacgagacccacuucuccgacgacaucgagcagcaggccgacaacaugaucaccgagcuccugcagaaggaguacauggaccggcagggcaagacgccccuggggcugguggaccucuucguguucagcaccuccuucuaccugaucagcaucuuccugcaccucguccgcaucccgacccaccggcacgugaucggcaagcccugccccaagccccaccgccugaaccacauggggaucugcuccugcggccuguacaagcacccgggggugcccgucaaguggaagcggugaggacuagucccuguucccagagcccacuuuuuuuucuuuuuuugaaauaaaauagccugucuuucagaucucaaaggcucuuuucagagccaccaaaaaaaaaaaaaaaaaaaaaaaaaaaaaaaaaaaaaaaaaaaaaaaaaaaaaaaaaaaaaaaaaaaaaaaaaaaaaaaaaaaaaaaaaaaaaaaaaaaaa

SEQ ID NO: 40626 - RNA, 1764 nt, Artificial Sequence
  mRNA product Design a-2 (hSL-A100) comprising derived and/or modified sequence from LASV(Lassa virus/H.sapiens-wt/NGA/2018/ISTH_0959;Clade II)__AVV65099__GPCmut12 (opt1)
aggagaguccgcucagccagguugcagaagcggcuuagcguguguccuaaucuucucucugcguguagguaggccugugccgcaaacaagcuuaccaugggccagaucaucaccuucuuccaggaggugccccacgucaucgaggaggugaugaacaucgugcugaucgcccucagccugcuggccauccucaaggggaucuacaacgucgugaccugcggccuguucgggcugguguccuuccuccugcugugcggccgcagcugcuccacgaccuacaagggggucuacgagcuccagacccuggagcuggacauggcgagccucaacaugugcaugccgcuguccugcaccaagaacaacagccaccacuacaucauggugggcaacgagacgggccuggagcucacccugaccaacaccuccaucaucaaccacaaguucugcaaccugagcgacgcccacaagaagaaccucuacgaccacgcccugauguccaucaucagcacguuccaccuguccauccccaacuucaaccaguacgaggccaugagcugcgacuucaacgggggcaagaucuccgugcaguacaaccucagccacgccuacgcgaucgacgccgccaaccacugcgggaccaucgccaacggcguccugcagaccuucaugcggauggcguggggcggguccuacaucgcccuggacagcggcaagggguccugggacugcaucaugaccagcuaccaguaccucaucauccagaacacgaccugggaggaccacugccaguucucccgccccagccccaucggcuaccuggggcugcucagccagcggacccgcgacaucuacaucucccggcgccugcugggcaccuucacguggacccucagcgacuccgagggcaacgagacccccgggggcuacugccugacccgguggaugcugaucgaggccgagcucaagugcuucgggaacacggccguggccaagugcaacgagaagcacgacgaggaguucugcgacaugcugcgccuguucgacuucugcaagcaggcgauccggcgccucaagaccgaggcccagaugagcauccagcugaucaacaaggccgugaacgcccugaucaacgaccagcucaucaugaagaaccaccuccgggacaucaugggcauccccuacugcaacuacuccaaguacugcuaccugaaccacaccgucaccgggaagacgagccugccccgcugcugccugguguccaacggcagcuaccugaacgagacccacuucuccgacgacaucgagcagcaggccgacaacaugaucaccgagcuccugcagaaggaguacaucgaccggcagggcaagaccccgcuggggcugguggaccucuucgucuucagcacguccuucuaccugaucagcaucuuccugcaccucgugaagaucccgacccaccgccacgugaucggcaagcccugccccaagccccaccggcugaaccacauggggaucugcuccugcggccuguacaagcacccggggguccccgugaaguggaagcgcugaggacuagucccuguucccagagcccacuuuuuuuucuuuuuuugaaauaaaauagccugucuuucagaucucaaaggcucuuuucagagccaccaaaaaaaaaaaaaaaaaaaaaaaaaaaaaaaaaaaaaaaaaaaaaaaaaaaaaaaaaaaaaaaaaaaaaaaaaaaaaaaaaaaaaaaaaaaaaaaaaaaaa

SEQ ID NO: 40627 - RNA, 1764 nt, Artificial Sequence
  mRNA product Design a-2 (hSL-A100) comprising derived and/or modified sequence from LASV(LASV003-NIG-2008;Clade II)__AIT17580__GPCmut12 (opt1)
aggagaguccgcucagccagguugcagaagcggcuuagcguguguccuaaucuucucucugcguguagguaggccugugccgcaaacaagcuuaccaugggccagaucaucaccuucuuccaggaggugccccacgucaucgaggaggugaugaacaucgugcugaucgcccucagccugcuggccauccucaaggggaucuacaacgucgcgaccugcggccuguucgggcugguguccuuccuccugcugugcggccgcagcugcuccacgaccuacaaggggguguacgagcuccagacccuggagcuggacauggccagccucaacaugugcaugccgcuguccugcaccaagaacaacagccaccacuacaucauggucggcaacgagacgggccuggagcucacccugaccaacaccuccaucaucaaccacaaguucugcaaccugagcgacgcccacaagaagaaccucuacgaccacgcccugauguccaucaucagcacguuccaccuguccauccccaacuucaaccaguacgaggccaugagcugcgacuucaacgggggcaagaucuccgugcaguacaaccucagccacaccuacgcgguggacgccgccaaccacugcgggaccaucgccaacggcguccugcagaccuucaugcggauggcguggggcggguccuacaucgcccuggacagcggcaagggguccugggacugcaucaugacgagcuaccaguaccucaucauccagaacaccaccugggaggaccacugccaguucucccgccccagccccaucggcuaccuggggcugcucagccagcggacccgcgacaucuacaucucccggcgccugcugggcacguucaccuggacccucagcgacuccgagagcaacgagaccccgggcggguacugccugacgcgguggaugcugaucgaggccgagcucaagugcuucggcaacaccgccguggccaagugcaacgagaagcacgacgaggaguucugcgacaugcugcgccuguucgacuucugcaagcaggcgauccggcgccucaaggccgaggcccagauguccauccagcugaucaacaaggccgugaacgcccugaucaacgaccagcucaucaugaagaaccaccuccgggacaucauggggauccccuacugcaacuacagcaaguacugcuaccugaaccacaccgucaccggccgcacgucccugccccggugcugccuggugagcaacggguccuaccugaacgagacccacuucagcgacgacaucgagcagcaggcggacaacaugaucaccgagcuccugcagaaggaguacauggaccgccagggcaagacgccccugggccugguggaccucuucgucuucuccaccagcuucuaccugaucuccaucuuccugcaccucgugaagaucccgacccaccggcacgugaucgggaagcccugccccaagccccaccgccugaaccacaugggcaucugcagcugcgggcuguacaagcacccgggcguccccgugaaguggaagcggugaggacuagucccuguucccagagcccacuuuuuuuucuuuuuuugaaauaaaauagccugucuuucagaucucaaaggcucuuuucagagccaccaaaaaaaaaaaaaaaaaaaaaaaaaaaaaaaaaaaaaaaaaaaaaaaaaaaaaaaaaaaaaaaaaaaaaaaaaaaaaaaaaaaaaaaaaaaaaaaaaaaaa

SEQ ID NO: 40628 - RNA, 1764 nt, Artificial Sequence
  mRNA product Design a-2 (hSL-A100) comprising derived and/or modified sequence from LASV(LASV035-NIG-2009;Clade II)__AIT17588__GPCmut12 (opt1)
aggagaguccgcucagccagguugcagaagcggcuuagcguguguccuaaucuucucucugcguguagguaggccugugccgcaaacaagcuuaccaugggccagaucaucaccuucuuccaggaggugccccacgucaucgaggaggugaugaacaucgugcugaucgcccucagccugcuggccauccucaaggggaucuacaacgucgcgaccugcggccuguucgggcugguguccuuccuccugcugugcggccgcagcugcuccacgaccuacaaggggguguacgagcuccagacccuggagcuggacauggccagccucaacaugugcaugccgcuguccugcaccaagaacaacagccaccacuacaucauggucggcaacgagacgggccuggagcucacccugaccaacaccuccaucaucaaccacaaguucugcaaccugagcgacgcccacaagaagaaccucuacgaccacgcccugauguccaucaucagcacguuccaccuguccauccccaacuucaaccaguacgaggccaugagcugcgacuucaacgggggcaagaucuccgugcaguacaaccucagccacgcguacgccguggacgccgccaaccacugcgggaccaucgcgaacggcguccugcagaccuucaugcggauggccuggggcggguccuacaucgcccuggacagcggcaagggguccugggacugcaucaugaccagcuaccaguaccucaucauccagaacacgaccugggaggaccacugccaguucucccgccccagccccaucggcuaccuggggcugcucagccagcggacccgcgacaucuacaucucccggcgccugcugggcaccuucacguggacccucagcgacuccgagggcaacgagacccccgggggcuacugccugacccgguggaugcugaucgaggccgagcucaagugcuucgggaacacggccguggcgaagugcaacgagaagcacgacgaggaguucugcgacaugcugcgccuguucgacuucugcaagcaggccauccggcgccucaaggccgaggcccagaugagcauccagcugaucaacaaggccgugaacgcgcugaucaacgaccagcucaucaugaagaaccaccuccgggacaucaugggcauccccuacugcaacuacuccaaguacugcuaccugaaccacaccgucaccgggaagaccagccugccccgcugcugccugguguccaacggcagcuaccugaacgagacgcacuucuccgacgacaucgagcagcaggccgacaacaugaucaccgagcuccugcagaaggaguacaucgaccggcagggcaagaccccgcuggggcugguggaccucuucgucuucagcaccuccuucuaccugaucagcaucuuccugcaccucgugaagaucccgacgcaccgccacgugaucggcaagcccugccccaagccccaccggcugaaccacauggggaucugcuccugcggccuguacaagcacccggggguccccgugaaguggaagcgcugaggacuagucccuguucccagagcccacuuuuuuuucuuuuuuugaaauaaaauagccugucuuucagaucucaaaggcucuuuucagagccaccaaaaaaaaaaaaaaaaaaaaaaaaaaaaaaaaaaaaaaaaaaaaaaaaaaaaaaaaaaaaaaaaaaaaaaaaaaaaaaaaaaaaaaaaaaaaaaaaaaaaa

SEQ ID NO: 40629 - RNA, 1764 nt, Artificial Sequence
  mRNA product Design a-2 (hSL-A100) comprising derived and/or modified sequence from LASV(LASV1000-NIG-2009;Clade II)__AIT17782__GPCmut12 (opt1)
aggagaguccgcucagccagguugcagaagcggcuuagcguguguccuaaucuucucucugcguguagguaggccugugccgcaaacaagcuuaccaugggccagaucaucaccuucuuccaggaggugccccacgucaucgaggaggugaugaacaucgugcugaucgcccucagccugcuggccauccucaaggggaucuacaacgucgcgaccugcggccuguucgggcugguguccuuccuccugcugugcggccgcagcugcuccacgaccuacaaggggguguacgagcuccagacccuggagcuggacauggccagccucaacaugugcaugccgcuguccugcaccaagaacaacagccaccacuacaucauggucggcaacgagacgggccuggagcucacccugaccaacaccuccaucaucaaccacaaguucugcaaccugagcgacgcccacaagaagaaccucuacgaccacgcccugauguccaucaucagcacguuccaccuguccauccccaacuucaaccaguacgaggccaugagcugcgacuucaacgggggcaagaucuccgugcaguacaaccucagccacaccuacgcgguggacgccgccaaccacugcgggaccaucgccaacggcguccugcagaccuucaugcggauggcguggggcggguccuacaucgcccuggacagcggcaagggguccugggacugcaucaugacgagcuaccaguaccucaucauccagaacaccaccugggaggaccacugccaguucucccgccccagccccaucggcuaccuggggcugcucagccagcggacccgcgacaucuacaucucccggcgccugcugggcacguucaccuggacccucagcgacuccgagggcaacgagacccccgggggcuacugccugacgcgguggaugcugaucgaggccgagcucaagugcuucgggaacaccgccguggccaagugcaacgagaagcacgacgaggaguucugcgacaugcugcgccuguucgacuucugcaagcaggcgaucaagcggcucaagaccgaggcccagaugagcauccagcugaucaacaaggccgugaacgcccugaucaacgaccagcucaucaugaagaaccaccuccgcgacaucaugggcaucccguacugcaacuacuccaaguacugcuaccugaaccacaccgucacggggaagaccagccugccccggugcugccugguguccaacggcagcuaccugaacgagacccacuucuccgacgacaucgagcagcaggccgacaacaugaucaccgagcuccugcagaaggaguacaucgaccgccagggcaagacgccccuggggcugguggaccucuucgucuucagcaccuccuucuaccugaucagcaucuuccugcaccucgugaagaucccgacccaccggcacguggucggcaagcccugccccaagccccaccgccugaaccacauggggaucugcuccugcggccuguacaagcacccgggggugcccgugaaguggaagcggugaggacuagucccuguucccagagcccacuuuuuuuucuuuuuuugaaauaaaauagccugucuuucagaucucaaaggcucuuuucagagccaccaaaaaaaaaaaaaaaaaaaaaaaaaaaaaaaaaaaaaaaaaaaaaaaaaaaaaaaaaaaaaaaaaaaaaaaaaaaaaaaaaaaaaaaaaaaaaaaaaaaaa

SEQ ID NO: 40630 - RNA, 1764 nt, Artificial Sequence
  mRNA product Design a-2 (hSL-A100) comprising derived and/or modified sequence from LASV(LASV221-NIG-2010;Clade II)__AIT17624__GPCmut12 (opt1)
aggagaguccgcucagccagguugcagaagcggcuuagcguguguccuaaucuucucucugcguguagguaggccugugccgcaaacaagcuuaccaugggccagaucaucaccuucuuccaggaggugccccacgucaucgaggaggugaugaacaucgugcugaucgcccucagccugcuggccauccucaaggggaucuacaacgucgcgaccugcggccuguucgggcugguguccuuccuccugcugugcggccgcagcugcuccacgaccuacaaggggguguacgagcuccagacccuggagcuggacauggccagccucaacaugugcaugccgcuguccugcaccaagaacaacagccaccacuacaucauggucggcaacgagacgggccuggagcucacccugaccaacaccuccaucaucaaccacaaguucugcaaccugagcgacgcccacaagaagaaccucuacgaccacgcccugauguccaucaucagcacguuccaccuguccauccccaacuucaaccaguacgaggccaugagcugcgacuucaacgggggcaagaucuccgugcaguacaaccucagccacaccuacgcgaucgacgccgccaaccacugcgggaccaucgccaacggcgugcugcagaccuucaugcggauggcguggggcggguccuacaucgcccuggacagcggcaagggguccugggacugcaucaugacgagcuaccaguaccucaucauccagaacaccaccugggaggaccacugccaguucucccgccccagccccaucggcuaccuggggcugcucagccagcggacccgcgacaucuacaucucccggcgccugcugggcacguucaccuggacccucagcgacuccgagggcaacgagacccccgggggcuacugccugacgcgguggaugcugaucgaggccgagcucaagugcuucgggaacaccgccgucgccaagugcaacgagaagcacgacgaggaguucugcgacaugcugcgccuguucgacuucugcaagcaggcgauccggcgccucaagaccgaggcccagaugagcauccagcugaucaacaaggccgugaacgcccugaucaacgaccagcucaucaugaagaaccaccuccgggacaucaugggcaucccguacugcaacuacuccaaguacugcuaccugaaccacaccgugacggggaagaccagccugccccgcugcugccuggucuccaacggcagcuaccugaacgagacccacuucuccgacgacaucgagcagcaggccgacaacaugaucaccgagaugcuccagaaggaguacauggaccggcagggcaagacgccccuggggcugguggaccuguucguguucagcaccuccuucuaccucaucagcaucuuccugcaccuggucaagaucccgacccaccgccacgugaucggcaagcccugccccaagccccaccggcucaaccacauggggaucugcuccugcggccuguacaagcacccgggggugcccgucaaguggaagcgcugaggacuagucccuguucccagagcccacuuuuuuuucuuuuuuugaaauaaaauagccugucuuucagaucucaaaggcucuuuucagagccaccaaaaaaaaaaaaaaaaaaaaaaaaaaaaaaaaaaaaaaaaaaaaaaaaaaaaaaaaaaaaaaaaaaaaaaaaaaaaaaaaaaaaaaaaaaaaaaaaaaaaa

SEQ ID NO: 40631 - RNA, 1764 nt, Artificial Sequence
  mRNA product Design a-2 (hSL-A100) comprising derived and/or modified sequence from LASV(LASV237-NIG-2010;Clade II)__AIT17638__GPCmut12 (opt1)
aggagaguccgcucagccagguugcagaagcggcuuagcguguguccuaaucuucucucugcguguagguaggccugugccgcaaacaagcuuaccaugggccagaucaucaccuucuuccaggaggugccccacgucaucgaggaggugaugaacaucgugcugaucgcccucagccugcuggccauccucaaggggaucuacaacgucgcgaccugcggccuguucgggcugguguccuuccuccugcugugcggccgcagcugcuccacgaccuacaaggggguguacgagcuccagacccuggagcuggacauggccagccucaacaugugcaugccgcuguccugcaccaagaacaacagccaccacuacaucauggucggcaacgagacgggccuggagcucacccugaccaacaccuccaucaucaaccacaaguucugcaaccugagcgacgcccacaagaaggaccucuacgaccacgcccugauguccaucaucagcacguuccaccuguccauccccaacuucaaccaguacgaggccaugagcugcgacuucaacgggggcaagaucuccgugcaguacaaccucagccacaccuacgcgguggacgccgccaaccacugcgggaccaucgccaacggcguccugcagaccuucaugcggauggcguggggcggguccuacaucgcccuggacagcggcaagggguccugggacugcaucaugacgagcuaccaguaccucaucauccagaacaccaccugggaggaccacugccaguucucccgccccagccccaucggcuaccuggggcugcucagccagcggacccgcgacaucuacaucucccggcgccugcugggcacguucaccuggacccucagcgacuccgagggcaacgagacccccgggggcuacugccugacgcgguggaugcugaucgaggccgagcucaagugcuucgggaacaccgccguggccaagugcaacgagaagcacgacgaggaguucugcgacaugcugcgccuguucgacuucugcaagcaggcgauccggcgccucaagaccgaggcccagaugagcauccagcugaucaacaaggccgugaacgcccugaucaacgaccagcucaucaugaagaaccaccuccgggacaucaugggcaucccguacugcaacuacuccaaguacugcuaccugaaccacaccgucacggggaagaccagccugccccgcugcugccugguguccaacggcagcuaccugaacgagacccacuucuccgacgacaucgagcagcaggccgacaacaugaucaccgagcuccugcagaaggaguacauggaccggcagggcaagacgccccuggggcugguggaccucuucgucuucagcaccuccuucuaccugaucagcaucuuccugcaccucaucaagaucccgacccaccgccacaucaccggcaagcccugccccaagccccaccggcugaaccacauggggaucugcuccugcggccuguacaagcacccgggggugcccgugaaguggaagcgcugaggacuagucccuguucccagagcccacuuuuuuuucuuuuuuugaaauaaaauagccugucuuucagaucucaaaggcucuuuucagagccaccaaaaaaaaaaaaaaaaaaaaaaaaaaaaaaaaaaaaaaaaaaaaaaaaaaaaaaaaaaaaaaaaaaaaaaaaaaaaaaaaaaaaaaaaaaaaaaaaaaaaa

SEQ ID NO: 40632 - RNA, 1764 nt, Artificial Sequence
  mRNA product Design a-2 (hSL-A100) comprising derived and/or modified sequence from LASV(LASV253-NIG-2011;Clade II)__AIT17670__GPCmut12 (opt1)
aggagaguccgcucagccagguugcagaagcggcuuagcguguguccuaaucuucucucugcguguagguaggccugugccgcaaacaagcuuaccaugggccagaucaucaccuucuuccaggaggugccccacgucaucgaggaggugaugaacaucgugcugaucgcccucagccugcuggccauccucaaggggaucuacaacgucgcgaccugcggccuguucgggcugguguccuuccuccugcugugcggccgcagcugcuccacgaccuacaaggggguguacgagcuccagacccuggagcuggacauggccagccucaacaugugcaugccgcuguccugcaccaagaacaacagccaccacuacaucauggucggcaacgagacgggccuggagcucacccugaccaacaccuccaucaucaaccacaaguucugcaaccugagcgacgcccacaagaagaaccucuacgaccacgcccugauguccaucaucagcacguuccaccuguccauccccaacuucaaccaguacgaggccaugagcugcgacuucaacgggggcaagaucuccgugcaguacaaccucagccacaccuacgcgguggacgccgccaaccacugcgggaccaucgccaacggcguccugcagaccuucaugcggauggcguggggcggguccuacaucgcccuggacagcggcaagggguccugggacugcaucaugacgagcuaccaguaccucaucauccagaacaccaccugggaggaccacugccaguucucccgccccagccccaucggcuaccuggggcugcucagccagcggacccgcgacaucuacaucucccggcgccugcugggcacguucaccuggacccucagcgacuccgagggcaacgagacccccgggggcuacugccugacgcgguggaugcugaucgaggccgagcucaagugcuucgggaacaccgccguggccaagugcaacgagaagcacgacgaggaguucugcgacaugcugcgccuguucgacuucugcaagcaggcgauccggcgccucaaggccgaggcccagaugagcauccagcugaucaacaaggccgugaacgcccugaucaacgaccagcucaucaugaagaaccaccuccgggacaucaugggcauccccuacugcaacuacuccaaguacugcuaccugaaccacaccgucaccgggcgcacgagccugccccggugcugccugguguccaacggcagcuaccugaacgagacccacuucuccgacgacaucgagcagcaggcggacaacaugaucaccgagcuccugcagaaggaguacaucgaccgccagggcaagaccccgcuggggcugguggaccucuucgucuucagcacguccuucuaccugaucagcaucuuccugcaccucgugaagaucccgacccaccggcacaucaucggcaagcccugccccaagccccaccgccugaaccacauggggaucugcuccugcggccuguacaagcacccgggggugcccgucaaguggaagcggugaggacuagucccuguucccagagcccacuuuuuuuucuuuuuuugaaauaaaauagccugucuuucagaucucaaaggcucuuuucagagccaccaaaaaaaaaaaaaaaaaaaaaaaaaaaaaaaaaaaaaaaaaaaaaaaaaaaaaaaaaaaaaaaaaaaaaaaaaaaaaaaaaaaaaaaaaaaaaaaaaaaaa

SEQ ID NO: 40633 - RNA, 1764 nt, Artificial Sequence
  mRNA product Design a-2 (hSL-A100) comprising derived and/or modified sequence from LASV(LASV254-NIG-2011;Clade II)__AIT17674__GPCmut12 (opt1)
aggagaguccgcucagccagguugcagaagcggcuuagcguguguccuaaucuucucucugcguguagguaggccugugccgcaaacaagcuuaccaugggccagaucaucaccuucuuccaggaggugccccacgucaucgaggaggugaugaacaucgugcugaucgcccucagccugcuggccauccucaaggggaucuacaacgucgcgaccugcggccuguucgggcugguguccuuccuccugcugugcggccgcagcugcuccacgaccuacaaggggguguacgagcuccagacccuggagcuggacaugaccaaccucaacaugugcaugccgcugagcugcacgaagaacaacucccaccacuacaucauggucggcaacgagaccggccuggagcucacccugaccaacacgagcaucaucaaccacaaguucugcaaccuguccgacgcccacaagaagaaccucuacaaccacgcccugaugagcaucaucuccaccuuccaccugagcauccccaacuucaaccaguacgaggccauguccugcgacuucaacgggggcaagaucagcgugcaguacaaccucucccacagcuacgccguggacgcggccaaccacugcgggaccaucgccaacggcguccugcagaccuucaugcggauggccuggggcggguccuacaucgcgcuggacagcggcaaggggaacugggacugcaucaugacguccuaccaguaccucaucauccagaacaccaccugggaggaccacugccaguucagccgccccucccccaucggcuaccuggggcugcucagccagcggacccgcgacaucuacaucagccggcgccugcugggcacguucaccuggacccucuccgacagcgagggcaacgagacccccgggggcuacugccugacgcgguggaugcugaucgaggccgagcucaagugcuucgggaacaccgccguggccaagugcaacgagaagcacgacgaggaguucugcgacaugcugcgccuguucgacuucugcaagcaggccauccggcgccucaagaccgaggcgcaggccaacauccagcugaucaacaaggccgugaacgcccugaucaacgaccagcucaucaugaagaaccaccuccgggacaucaugggcaucccguacugcaacuacuccaaguacugcuaccugaaccacaccgucacggggaagaccagccugccccgcugcugccugguguccaacggcagcuaccugaacgagacccacuucuccgacgacaucgagcagcaggccgacaacaugaucaccgagcuccugcagaaggaguacauggaccggcagggcaagacgccccuggggcugguggaccucuucgucuucagcaccuccuucuaccugaucagcaucuuccugcaccucgugaagaucccgacccaccgccacgugaucggcaagcccugccccaagccccaccggcugaaccacauggggaucugcuccugcggccuguacaagcacccggggguccccgugaaguggaagcgcugaggacuagucccuguucccagagcccacuuuuuuuucuuuuuuugaaauaaaauagccugucuuucagaucucaaaggcucuuuucagagccaccaaaaaaaaaaaaaaaaaaaaaaaaaaaaaaaaaaaaaaaaaaaaaaaaaaaaaaaaaaaaaaaaaaaaaaaaaaaaaaaaaaaaaaaaaaaaaaaaaaaaa

SEQ ID NO: 40634 - RNA, 1764 nt, Artificial Sequence
  mRNA product Design a-2 (hSL-A100) comprising derived and/or modified sequence from LASV(Nig08-A19;Clade III)__ADU56618__GPCmut12 (opt1)
aggagaguccgcucagccagguugcagaagcggcuuagcguguguccuaaucuucucucugcguguagguaggccugugccgcaaacaagcuuaccaugggccagaucgugaccuucuuccaggaggucccccacgugaucgaggaggugaugaacaucguccugaucgcccucagcauccuggccauccugaaggggcucuacaacaucgcgaccugcggccugaucgggcuggugacguuccuccugcuguccggccgcagcugcuccaugaccuacaaggggguguacgagcuccagacccuggagcugaacaugaacacccucaacaugugcaugccgcugagcugcacgaagaacaacucccaccacuacaucauggucggcaacgagaccggccuggagcucacccugaccaacacgagccugcuccaccacaaguucugcaaccuguccgacgcccacaagaagaaccuguacgaccacacccucaugagcaucaucuccaccuuccaccugagcauccccaacuucaaccaguacgaggccauguccugcgacuucaacgggggcaagaucaccgugcaguacaaccugagccacuccuacgccaucgacgccgcgaaccacugcgggacgguggccaacggcguccuccagaccuucaugcggauggccuggggcgggagcuacaucgcccuggacuccggccgcgggaagugggacugcaucaugaccagcuaccaguaccugaucauccagaacaccacgugggaggaccacugccaguucucccggcccagccccaucggcuaccucgggcugcugucccagcgcacccgggacaucuacaucagccgccggcuccugggcaccuucaccuggacgcugagcgacuccgagggcaacgagacccccgggggcuacugccucacccgcuggaugcugaucgaggcggagcugaagugcuucgggaacaccgccguggccaagugcaacgagaagcacgacgaggaguucugcgacaugcuccggcuguucgacuucugcaagcaggccauccgccggcugaaggccgaggcgcagaugagcauccagcucaucaacaaggccgugaacgcccugaucaacgaccagcugaucaugaagaaccaccuccgcgacaucaugggcauccccuacugcaacuacuccaaguacugcuaccugaaccacacgagcaccgggcggaccucccugccccgcugcugccucgucagcaacggcuccuaccugaacgagacccacuucagcgacgacaucgagcagcaggccgacaacaugaucacggagaugcugcagaaggaguaccuggaccggcagggcaagaccccgcucgggcugguggaccuguucguguucuccaccagcuucuaccucaucuccaucuuccugcaccuggucaagaucccgacccaccgccacaucgugggcaagcccugccccaagccccaccggcucaaccacauggggaucugcagcugcggccuguacaagcagccgggggugcccguccgcuggaagcggugaggacuagucccuguucccagagcccacuuuuuuuucuuuuuuugaaauaaaauagccugucuuucagaucucaaaggcucuuuucagagccaccaaaaaaaaaaaaaaaaaaaaaaaaaaaaaaaaaaaaaaaaaaaaaaaaaaaaaaaaaaaaaaaaaaaaaaaaaaaaaaaaaaaaaaaaaaaaaaaaaaaaa

SEQ ID NO: 40635 - RNA, 1767 nt, Artificial Sequence
  mRNA product Design a-2 (hSL-A100) comprising derived and/or modified sequence from LASV(G1180-SLE-2010;Clade IV)__AIT17168__GPCmut12 (opt1)
aggagaguccgcucagccagguugcagaagcggcuuagcguguguccuaaucuucucucugcguguagguaggccugugccgcaaacaagcuuaccaugggccagaucgugaccuucuuccaggaggucccccacgugaucgaggaggugaugaacaucguccugaucgcccucagcauccuggccgugcugaaggggcucuacaacuucgcgaccugcggccugguggggcugcucacguuccugcugcucugcggccgcuccugcaccgccagccgguacaagggggucuacgagcugcagacccuggagcucaacauggagacccugaacaugugcaugccgcuguccugcacgaagaacaacagccaccacuacaucauggugggcaacgagaccggccucgagcugacccugaccaacacguccaucaucaaccacaaguucugcaaccucagcgacgcccacaagaagaaccuguacgaccacgcccugauguccaucaucagcaccuuccaccucuccauccccaacuucaaccaguacgaggccaugagcugcgacuucaacgggggcaagaucuccgugcaguacaaccugagccacuccuacgcgggggacgccgccaaccacugcggcaccgucgccaacggggugcugcagaccuucaugcgcauggcguggggcggcagcuacaucgcccucgacuccgggcacggcagcugggacugcaucaugacguccuaccaguaccugaucauccagaacaccaccugggaggaccacugccaguucagccggcccucccccaucggguaccugggccuccugagccagcgcacccgggacaucuacaucagccgccggcugcucggcacguucaccuggacccuguccgacagcgaggggaaggacaccccgggcggguacugccugacgcgcuggaugcucaucgaggccgagcugaagugcuucggcaacaccgccguggccaagugcaacgagaagcacgacgaggaguucugcgacaugcugcggcuguucgacuucugcaagcaggcgauccagcgccugaaggccgaggcccagauguccauccagcugaucaacaaggccgucaacgcccucaucaacgaccagcugaucaugaagaaccaccuccgggacaucauggggauccccuacugcaacuacagcaaguacugcuaccucaaccacaccaccacgggcaagaccucccugcccaagugcugccuggugagcaacggcuccuaccucaacgagacccacuucagcgacgacaucgagcagcaggcggacaacaugaucaccgagaugcugcagaaggaguacauggagcgccaggggaagacgccccugggccugguggaccucuucgucuucuccaccagcuucuaccugaucuccaucuuccugcaccucgugaagaucccgacccaccggcacaucgugggcaagagcugccccaagccccaccgccugaaccacauggggaucugcuccugcgggcuguacaagcagcccggcgucccggugaaguggaagcggugaggacuagucccuguucccagagcccacuuuuuuuucuuuuuuugaaauaaaauagccugucuuucagaucucaaaggcucuuuucagagccaccaaaaaaaaaaaaaaaaaaaaaaaaaaaaaaaaaaaaaaaaaaaaaaaaaaaaaaaaaaaaaaaaaaaaaaaaaaaaaaaaaaaaaaaaaaaaaaaaaaaaa

SEQ ID NO: 40636 - RNA, 1767 nt, Artificial Sequence
  mRNA product Design a-2 (hSL-A100) comprising derived and/or modified sequence from LASV(G1442-SLE-2011;Clade IV)__AIT17180__GPCmut12 (opt1)
aggagaguccgcucagccagguugcagaagcggcuuagcguguguccuaaucuucucucugcguguagguaggccugugccgcaaacaagcuuaccaugggccagaucgugaccuucuuccaggaggucccccacgugaucgaggaggugaugaacaucguccugaucgcccucagcauccuggccgugcugaaggggcucuacaacguggcgaccugcggccugaucgggcuggucaccuuccuccugcugugcggccgcuccugcaccaccacccucuacaaggggguguacgagcugcagacgcuggagcucaacauggagacccugaacaugugcaugccgcugagcugcaccaagaacaacucccaccacuacauccgggugggcaacgagaccggccucgagcugacgcugaccaacaccagcaucaucaaccacaaguucugcaaccucuccgacgcccacaagaagaaccuguacgaccacgcccugaugagcaucaucuccaccuuccaccucagcauccccaacuucaaccaguacgaggccauguccugcgacuucaacgggggcaagaucagcguccaguacaaccugucccacagcuacgccggggacgcggccaaccacugcggcacgguggccaacggggugcugcagaccuucaugcgcauggccuggggcggcuccuacaucgcgcucgacagcgggcggggcaacugggacugcaucaugaccuccuaccaguaccugaucauccagaacaccacgugggacgaccacugccaguucagccgccccucccccaucggguaccugggccuccugagccagcggacccgcgacgucuacaucucccggcgccugcucggcaccuucaccuggacgcugagcgacagcgaggggaaggacaccccgggcggguacugccugacccgguggaugcucaucgaggccgagcugaagugcuucggcaacaccgccguggccaagugcaacgagaagcacgacgaggaguucugcgacaugcugcgccucuucgacuucugcaagcaggccauccagcggcugaaggcggaggcccagauguccauccagcugaucaacaaggccgugaacgcccucaucaacgaccagcugaucaugaagaaccaccuccgcgacaucauggggauccccuacugcaacuacagcaaguacugcuaccugaacaacacggccaccggcaagaccucccugcccaagugcugccugaucagcaacggcuccuaccucaacgagacccacuucagcgacgacaucgagcaggaggcggacaacaugaucacggagaugcugcagaaggaguacauggagcggcaggggaagacgccccugggccuggucgaccucuucguguucuccaccagcuucuaccugaucuccaucuuccugcaccucgugaagaucccgacccaccgccacaucgucggcaagagcugccccaagccccaccggcugaaccacauggggaucugcuccugcgggcuguacaagcagcccggcgugccggugcgcuggaagcggugaggacuagucccuguucccagagcccacuuuuuuuucuuuuuuugaaauaaaauagccugucuuucagaucucaaaggcucuuuucagagccaccaaaaaaaaaaaaaaaaaaaaaaaaaaaaaaaaaaaaaaaaaaaaaaaaaaaaaaaaaaaaaaaaaaaaaaaaaaaaaaaaaaaaaaaaaaaaaaaaaaaaa

SEQ ID NO: 40637 - RNA, 1767 nt, Artificial Sequence
  mRNA product Design a-2 (hSL-A100) comprising derived and/or modified sequence from LASV(G3010-SLE-2013;Clade IV)__AIT17344__GPCmut12 (opt1)
aggagaguccgcucagccagguugcagaagcggcuuagcguguguccuaaucuucucucugcguguagguaggccugugccgcaaacaagcuuaccaugggccagaucgugaccuucuuccaggaggucccccacgugaucgaggaggugaugaacaucguccugaucgcccucagcauccuggccgugcugaaggggcucuacaacuucgcgaccugcggccugguggggcuggucacguuccuccugcugugcggccgcuccugcaccaccagccucuacaaggggguguacgagcugcagacccuggagcucaacauggagacgcugaacaugugcaugccgcuguccugcaccaagaacaacagccaccacuacaucauggugggcaacgagaccggccucgagcugacccugacgaacaccuccaucaucaaccacaaguucugcaaccucagcgacgcccacaagaagaaccuguacaaccacgcccugauguccaucaucagcaccuuccaccucuccauccccaacuucaaccaguacgaggccaugagcugcgacuucaacgggggcaagaucuccguccaguacaaccugagccacuccuacgccggggacgcggccagccacugcggcaccguggccaacggggugcugcagacguucaugcggauggccuggggcggcuccuacaucgcgcucgacagcggguacggcaagugggacugcaucaugaccuccuaccaguaccugaucauccagaacaccaccugggaggaccacugccaguucagccgccccucccccaucggguaccugggccuccugagccagcggacgcgcgacaucuacaucagccggcgccugcucggcaccuucaccuggacccuguccgacagcgaggggaaggacacgccgggcggguacugccugacccgguggaugcucaucgaggccgagcugaagugcuucggcaacaccgccgucgccaagugcaacgagaagcacgacgaggaguucugcgacaugcugcgccucuucgacuucugcaagcaggccauccagcggcugaagaccgaggcgcagauguccauccagcugaucaacaaggccgugaacgcccucaucaacgaccagcugaucaugaagaaccaccuccgcgacaucauggggauccccuacugcaacuacagcaaguacugcuaccugaaccacacgaccaccggcaagaccucccugcccaagugcugccuggugagcaacggcuccuaccucaacgagacgcacuucagcgacgacaucgagcagcaggccgacaacaugaucaccgagaugcugcagaaggaguacauggagcggcaggggaagacgccccugggccuggucgaccucuucguguucuccaccagcuucuaccugaucuccaucuuccugcaccucgugaagaucccgacccaccgccacaucgucggcaagagcugccccaagccccaccggcugaaccacauggggaucugcuccugcgggcuguacaagcagcccggcgugccggugcgcuggaagcggugaggacuagucccuguucccagagcccacuuuuuuuucuuuuuuugaaauaaaauagccugucuuucagaucucaaaggcucuuuucagagccaccaaaaaaaaaaaaaaaaaaaaaaaaaaaaaaaaaaaaaaaaaaaaaaaaaaaaaaaaaaaaaaaaaaaaaaaaaaaaaaaaaaaaaaaaaaaaaaaaaaaaa

SEQ ID NO: 40638 - RNA, 1767 nt, Artificial Sequence
  mRNA product Design a-2 (hSL-A100) comprising derived and/or modified sequence from LASV(G502-SLE-2009;Clade IV)__AIT17126__GPCmut12 (opt1)
aggagaguccgcucagccagguugcagaagcggcuuagcguguguccuaaucuucucucugcguguagguaggccugugccgcaaacaagcuuaccaugggccagaucgugaccuucuuccaggaggucccccacgugaucgaggaggugaugaacaucguccugaucgcccucagcauccuggccgugcugaaggggcucuacaacuucgcgaccugcggccugguggggcugcucacguuccugcugcucugcggccgcuccugcaccaccgggcuguacaagggcgucuacgagcugcagacccucgagcugaacauggagacgcugaacaugugcaugccgcucagcugcaccaagaacaacucccaccacuacaucauggugggcaacgagaccgggcuggagcugacccucacgaacaccagcaucaucaaccacaaguucugcaaccuguccgacgcccacaagaagaaccuguacgaccacgcccucaugagcaucaucuccaccuuccaccugagcauccccaacuucaaccaguacgaggccauguccugcgacuucaacggcgggaagaucagcgugcaguacaaccugucccacagcuacgccggcgacgcggccgaccacugcgggaccgucgccaacggcgugcuccagacguucaugcggauggccuggggcggguccuacaucgcgcuggacagcggccgcgggcggugggacugcaucaugaccuccuaccaguaccugaucauccagaacaccaccugggaggaccacugccaguucagccgccccucccccaucggcuaccucggccugcugagccagcggacgcgcgacaucuacaucucccggcgccuccuggggaccuucaccuggacccugagcgacagcgagggcaaggacacgcccgggggcuacugccucacccgguggaugcugaucgaggccgagcugaagugcuucgggaacaccgccguggccaagugcaacgagaagcacgacgaggaguucugcgacaugcuccgccuguucgacuucugcaagcaggccauccagcggcugaaggcggaggcccagauguccauccagcucaucaacaaggccgucaacgcccugaucaacgaccagcuggugaugaagaaccaccuccgcgacaucaugggcauccccuacugcaacuacagccgguacugcuaccugaaccacaccacgaccggccgcaccucccugcccaagugcugccucgugagcaacggguccuaccugaacgagacccacuucagcgacgacaucgagcagcaggccgacaacaugaucacggagaugcugcagaaggaguacauggagcggcagggcaagaccccgcuggggcucgucgaccuguucguguucuccaccagcuucuaccugaucuccaucuuccuccaccuggugaagaucccgacccaccgccacaucgucggcaagagcugccccaagccccaccggcugaaccacauggggaucugcuccugcggccucuacaagcagcccggcgugccggugaaguggaagcgcugaggacuagucccuguucccagagcccacuuuuuuuucuuuuuuugaaauaaaauagccugucuuucagaucucaaaggcucuuuucagagccaccaaaaaaaaaaaaaaaaaaaaaaaaaaaaaaaaaaaaaaaaaaaaaaaaaaaaaaaaaaaaaaaaaaaaaaaaaaaaaaaaaaaaaaaaaaaaaaaaaaaaa

SEQ ID NO: 40639 - RNA, 1767 nt, Artificial Sequence
  mRNA product Design a-2 (hSL-A100) comprising derived and/or modified sequence from LASV(G733-SLE-2010;Clade IV)__AIT17154__GPCmut12 (opt1)
aggagaguccgcucagccagguugcagaagcggcuuagcguguguccuaaucuucucucugcguguagguaggccugugccgcaaacaagcuuaccaugggccagaucgugaccuucuuccaggaggucccccacgugaucgaggaggugaugaacaucguccugaucgcccucagcauccuggccgugcugaaggggcucuacaacuucgcgaccugcggcaucguggggcuggucuccuuccugcuccugugcggccgcagcugcacgaccucccuguacaaggggguguacgagcuccagacccuggagcugaacauggagacccucaacaugugcaugccgcugagcugcacgaagaacaacucccaccacuacaucauggugggcaacgagaccggccuggagcucacccugaccaacacgagcaucaucaaccacaaguucugcaaccuguccgacgcccacaagaagaaccucuacgaccacgcccugaugagcaucaucuccaccuuccaccugagcauccccaacuucaaccaguacgaggccauguccugcgacuucaacgggggcaagaucagcguccaguacaaccucucccacagcuacgccggggacgcggccaaccacugcggcaccaucgccaacggggugcugcagaccuucaugcggauggccuggggcggcuccuacaucgcgcuggacagcgggcgcgaccggugggacugcaucaugacguccuaccaguaccucaucauccagaacaccaccugggaggaccacugccaguucagccgccccucccccaucggcuaccuggggcugcucagccagcggacccgcgacaucuacaucagccggcgccugcugggcacguucaccuggacccucuccgacagcgagggcaaggacacccccgggggcuacugccugacgcgguggaugcugaucgaggccgagcucaagugcuucgggaacaccgccguggccaagugcaacgagaagcacgacgaggaguucugcgacaugcugcgccuguucgacuucugcaagcaggccauccagcggcucaaggcggaggcccagauguccauccagcugaucaacaaggccgucaacgcccugaucaacgaccagcucaucaugaagaaccaccuccgcgacaucaugggcaucccguacugcaacuacagcaaguacugcuaccugaaccacaccaccacggggaagaccucccugcccaagugcugccuggugagcaacggcuccuaccugaacgagacccacuucagcgacgacaucgagcagcaggccgacaacaugaucaccgagaugcuccagaaggaguacauggagcggcagggcaagacgccccuggggcugguggaccuguucgucuucuccaccagcuucuaccucaucuccaucuuccugcaccuggugaagaucccgacccaccgccacguggucggcaagagcugccccaagccccaccggcucaaccacauggggaucugcuccugcggccuguacgggcagcccggcgugccggugaaguggaagcgcugaggacuagucccuguucccagagcccacuuuuuuuucuuuuuuugaaauaaaauagccugucuuucagaucucaaaggcucuuuucagagccaccaaaaaaaaaaaaaaaaaaaaaaaaaaaaaaaaaaaaaaaaaaaaaaaaaaaaaaaaaaaaaaaaaaaaaaaaaaaaaaaaaaaaaaaaaaaaaaaaaaaaa

SEQ ID NO: 40640 - RNA, 1767 nt, Artificial Sequence
  mRNA product Design a-2 (hSL-A100) comprising derived and/or modified sequence from MOPV/LASV reassortant(IGS-1;Clade IV)__AFY05576__GPCmut12 (opt1)
aggagaguccgcucagccagguugcagaagcggcuuagcguguguccuaaucuucucucugcguguagguaggccugugccgcaaacaagcuuaccaugggccagaucgugaccuucuuccaggaggucccccacgugaucgaggaggugaugaacaucguccugaucgcccucagcgugcuggccgugcugaaggggcucuacaacuucgcgaccugcggccuggucgggcuggugaccuuccuccugcugugcggccgcuccugcaccaccagccucuacaaggggguguacgagcugcagacccuggagcucaacauggagacgcugaacaugugcaugccgcuguccugcaccaagaacaacagccaccacuacaucauggucggcaacgagaccggccucgagcugacccugacgaacaccuccaucaucaaccacaaguucugcaaccucagcgacgcccacaagaagaaccuguacgaccacgcccugauguccaucaucagcaccuuccaccucuccauccccaacuucaaccaguacgaggccaugagcugcgacuucaacgggggcaagaucuccgugcaguacaaccugagccacuccuacgccggggacgcggccaaccacugcggcaccguggccaacgggguccugcagacguucaugcggauggccuggggcggcagcuacaucgcgcucgacuccgggcgcggcaacugggacugcaucaugaccagcuaccaguaccugaucauccagaacaccaccugggaggaccacugccaguucucccggcccagccccaucggguaccugggccuccugucccagcgcacgcgggacaucuacaucagccgccggcugcucggcaccuucaccuggacccugagcgacuccgagggggaggacacgccgggcggguacugccugacccgcuggaugcucaucgaggccgagcugaagugcuucggcaacaccgccguggccaagugcaacgagaagcacgacgaggaguucugcgacaugcugcggcuguucgacuucugcaagcaggccauccagcgccugaaggcggaggcccagaugagcauccagcugaucaacaaggccgugaacgcccucaucaacgaccagcugaucaugaagaaccaccuccgggacaucauggggauccccuacugcaacuacuccaaguacugcuaccucaaccacaccacgaccggccgcaccagccugcccaagugcugccuggucuccaacggcagcuaccucaacgagacccacuucuccgacgacaucgagcagcaggccgacaacaugaucacggagaugcugcagaaggaguacauggagcggcaggggaagacgccccugggccugguggaccucuucguguucagcaccuccuucuaccugaucagcaucuuccugcaccucgucaagaucccgacccaccgccacaucguggggaaguccugccccaagccccaccggcugaaccacaugggcaucugcagcugcgggcuguacaagcagcccggcgugccggucaaguggaagcgcugaggacuagucccuguucccagagcccacuuuuuuuucuuuuuuugaaauaaaauagccugucuuucagaucucaaaggcucuuuucagagccaccaaaaaaaaaaaaaaaaaaaaaaaaaaaaaaaaaaaaaaaaaaaaaaaaaaaaaaaaaaaaaaaaaaaaaaaaaaaaaaaaaaaaaaaaaaaaaaaaaaaaa

SEQ ID NO: 40641 - RNA, 1767 nt, Artificial Sequence
  mRNA product Design a-2 (hSL-A100) comprising derived and/or modified sequence from LASV(LM765-SLE-2012;Clade IV)__AIT17814__GPCmut12 (opt1)
aggagaguccgcucagccagguugcagaagcggcuuagcguguguccuaaucuucucucugcguguagguaggccugugccgcaaacaagcuuaccaugggccagaucgugaccuucuuccaggaggucccccacgugaucgaggaggugaugaacaucguccugaucgcccucagcauccuggccgugcugaaggggcucuacaacuucgcgaccugcggccugguggggcuggucacguuccuccugcugugcggccgcuccugcaccaccagccucuacaaggggguguacgagcugcagacccuggagcucaacauggagacgcugaacaugugcaugccgcuguccugcaccaagaacaacagccaccacuacaucauggugggcaacgagaccggccucgagcugacccugacgaacaccuccaucaucgaccacaaguucugcaaccucagcgacgcccaccggaagaaccuguacgaccacgcccugauguccaucaucagcaccuuccaccucuccauccccaacuucaaccaguacgaggccaugagcugcgacuucaacgggggcaagaucuccguccaguacaaccugagccacuccuacgccaaggacgcggccgaccacugcgggaccguggccaacggcgugcugcagacguucaugcgcauggccuggggcgggagcuacaucgcgcucgacuccggccgggggcgcugggacugcaucaugaccagcuaccaguaccugaucauccagaacaccaccugggaggaccacugccaguucucccggcccagccccaucggcuaccuggggcuccugucccagcgcacgcgggacaucuacaucagccgccggcugcucggcaccuucaccuggacccugagcgacuccgagggcaaggacacgcccgggggcuacugccugacccgcuggaugcucaucgaggccgagcugaagugcuucgggaacaccgccgucgccaagugcaacgagaagcacgacgaggaguucugcgacaugcugcggcuguucgacuucugcaagcaggccauccagcgccugaaggcggaggcccagaugagcauccagcugaucaacaaggccgugaacgcccucaucaacgaccagcugaucaugaagaaccaccuccgggacaucaugggcauccccuacugcaacuacuccaaguacugcuaccucaaccacaccacgaccgggaagaccagccugcccaagugcugccugguguccaacggcagcuaccucaacgagacccacuucuccgacgacaucgagcagcaggccgacaacaugaucacggagaugcugcagaaggaguacauggagcgccagggcaagaccccgcuggggcuggucgaccucuucguguucagcaccuccuucuaccugaucagcaucuuccugcaccucgugaagaucccgacccaccggcacaucgucggcaagcccugccccaagccccaccgccugaaccacauggggaucugcuccugcggccuguacaagcagccgggggugcccgugaaguggaagcggugaggacuagucccuguucccagagcccacuuuuuuuucuuuuuuugaaauaaaauagccugucuuucagaucucaaaggcucuuuucagagccaccaaaaaaaaaaaaaaaaaaaaaaaaaaaaaaaaaaaaaaaaaaaaaaaaaaaaaaaaaaaaaaaaaaaaaaaaaaaaaaaaaaaaaaaaaaaaaaaaaaaaa

SEQ ID NO: 40642 - RNA, 1767 nt, Artificial Sequence
  mRNA product Design a-2 (hSL-A100) comprising derived and/or modified sequence from LASV(LM776-SLE-2012;Clade IV)__AIT17824__GPCmut12 (opt1)
aggagaguccgcucagccagguugcagaagcggcuuagcguguguccuaaucuucucucugcguguagguaggccugugccgcaaacaagcuuaccaugggccagaucgugaccuucuuccaggaggucccccacgugaucgaggaggugaugaacaucguccugaucgcccucagcauccuggccgugcugaaggggcucuacaacuucgcgaccugcggccugguggggcuggucaccuuccuccugcugugcggccgcuccugcaccaccagcguguacaaggggguguacgagcuccagacccuggagcugaacauggagacgcucaacaugugcaugccgcuguccugcaccaagaacaacagccaccacuacaucauggucggcaacgagaccggccuggagcucacccugacgaacaccuccaucaucaaccacaaguucugcaaccugagcgacgcccacaagaagaaccucuacgaccacgcccugauguccaucaucagcaccuuccaccuguccauccccaacuucaaccaguacgaggccaugagcugcgacuucaacgggggcaagaucuccgugcaguacaaccucagccacuccuacgccggggacgcggccaaccacugcggcaccguggccaacgggguccugcagacguucaugcggauggccuggggcggcagcuacaucgcgcuggacuccgggcacggcaagugggacugcaucaugaccagcuaccaguaccucaucauccagaacaccaccugggaggaccacugccaguucucccgccccagccccaucggguaccugggccugcucucccagcggacgcgcgacaucuacaucagccggcgccugcugggcaccuucaccuggacccucagcgacuccgaggggaaggacacgccgggcggguacugccugacccgguggaugcugaucgaggccgagcucaagugcuucggcaacaccgccguggccaagugcaacgagaagcacgacgaggaguucugcgacaugcugcgccuguucgacuucugcaagcaggccauccagcggcucaaggcggaggcccagaugagcauccagcugaucaacaaggccgugaacgcccugaucaacgaccagcucaucaugaagaaccaccuccgcgacaucauggggauccccuacugcaacuacuccaaguacugcuaccugaaccacaccacgaccggcaagaccagccugcccaagugcugccuggucuccaacggcagcuaccugaacgagacccacuucuccgacgacaucgagcagcaggccgacaacaugaucacggagaugcuccagaaggaguacauggagcggcaggggaagacgccccugggccugguggaccuguucguguucagcaccuccuucuaccucaucagcaucuuccugcaccuggucaagaucccgacccaccgccacaucguggggaaguccugccccaagccccaccggcucaaccacaugggcaucugcagcugcgggcuguacaagcagcccggcgugccgguccgcuggaagcggugaggacuagucccuguucccagagcccacuuuuuuuucuuuuuuugaaauaaaauagccugucuuucagaucucaaaggcucuuuucagagccaccaaaaaaaaaaaaaaaaaaaaaaaaaaaaaaaaaaaaaaaaaaaaaaaaaaaaaaaaaaaaaaaaaaaaaaaaaaaaaaaaaaaaaaaaaaaaaaaaaaaaa

SEQ ID NO: 40643 - RNA, 1767 nt, Artificial Sequence
  mRNA product Design a-2 (hSL-A100) comprising derived and/or modified sequence from LASV(Mad39;Clade IV)__ANH09722__GPCmut12 (opt1)
aggagaguccgcucagccagguugcagaagcggcuuagcguguguccuaaucuucucucugcguguagguaggccugugccgcaaacaagcuuaccaugggccagaucgugaccuucuuccaggaggucccccacgugaucgaggaggugaugaacaucguccugaucgcccucagcauccuggccgugcugaaggggcucuacaacguggcgaccugcggccugaucgggcuggucacguuccuccugcugugcggccgcuccugcaccaccacccucuacaaggggguguacgagcugcaggcccuggagcucaacauggagacgcugaacaugugcaugccgcugagcugcaccaagaacaacucccaccacuacauccgggugggcaacgagaccggccucgagcugacccugacgaacaccagccucaucaaccacaaguucugcaaccuguccgacgcccacaagaagaaccuguacgaccacgcccucaugagcaucaucuccaccuuccaccugagcauccccaacuucaaccaguacgaggccauguccugcgacuucaacgacgggaagaucagcguccaguacaaccugucccacaccuacgcgggcgacacggccaaccacugcgggaccguggccaacggcgugcuccagaccuucaugcgcauggccuggggcgggagcuacaucgcgcuggacuccggccgcgggggcugggacugcaucaugaccagcuaccaguaccugaucauccagaacacgaccugggaggaccacugccaguucucccggcccagccccaucggguaccucggccugcugucccagcggacccgcgacaucuacaucagccggcgccuccugggcaccuucacguggacccuguccgacagcgaggggaaggacaccccgggcggguacugccucacccgguggaugcugaucgaggccgagcugaagugcuucggcaacacggccgucgccaagugcaacgagaagcacgacgaggaguucugcgacaugcuccgccuguucgacuucugcaagcaggccauccagcggcugaaggcggaggcccagaugagcauccagcucaucaacaaggccgugaacgcccugaucaacgaccagcugaucaugaagaaccaccuccgcgacaucauggggauccccuacugcaacuacuccaaguacugcuaccugaaccacaccgugaccggcaagaccagccugcccaagugcugccucgucuccaacggcagcuaccugaacgagacgcacuucuccgacgacaucgagcagcaggccgacaacaugaucaccgagaugcugcagaaggaguacauggagcggcaggggaagacgccccugggccucguggaccuguucguguucagcaccuccuucuaccugaucagcaucuuccuccaccuggucaagaucccgacccaccgccacgugguggggaagcccugccccaagccccaccggcugaaccacaugggcaucugcuccugcggguucuacaagcagccgggcguccccgugcgcuggaagcggugaggacuagucccuguucccagagcccacuuuuuuuucuuuuuuugaaauaaaauagccugucuuucagaucucaaaggcucuuuucagagccaccaaaaaaaaaaaaaaaaaaaaaaaaaaaaaaaaaaaaaaaaaaaaaaaaaaaaaaaaaaaaaaaaaaaaaaaaaaaaaaaaaaaaaaaaaaaaaaaaaaaaa

SEQ ID NO: 40644 - RNA, 1767 nt, Artificial Sequence
  mRNA product Design a-2 (hSL-A100) comprising derived and/or modified sequence from LASV(Z0947-SLE-2011;Clade IV)__AIT17840__GPCmut12 (opt1)
aggagaguccgcucagccagguugcagaagcggcuuagcguguguccuaaucuucucucugcguguagguaggccugugccgcaaacaagcuuaccaugggccagaucgugaccuucuuccaggaggucccccacgugaucgaggaggugaugaacaucguccugaucgcccucagcauccuggccgugcugaaggggcucuacaacuucgcgaccugcggccugguggggcuggucacguuccuccugcugugcggccgcuccugcaccaucagccucuacaaggggguguacgagcugcagacccuggagcucaacauggagacccugaacaugugcaugccgcuguccugcacgaagaacaacagccaccacuacaucauggugggcaacgagaccggccucgagcugacccugaccaacacguccaucaucaaccacaaguucugcaaccucagcgacgcccacaagaagaaccuguacgaccacgcccugauguccaucaucagcaccuuccaccucuccauccccaacuucaaccaguacgaggccaugagcugcgacuucaacgggggcaagaucuccguccaguacaaccugagccacuccuacgccggggacgcggccaaccacugcggcaccguggccaacggggugcugcagaccuucaugcggauggccuggggcggcagcuacaucgcgcucgacuccgggcgcgaccggugggacugcaucaugacgagcuaccaguaccugaucauccagaacaccaccugggaggaccacugccaguucucccgccccagccccaucggcuaccuggggcuccugucccagcggacccgcgacaucuacaucagccggcgccugcucggcacguucaccuggacccugagcgacuccgagggcaaggacacccccgggggcuacugccugacgcgguggaugcucaucgaggccgagcugaagugcuucgggaacaccgccgucgccaagugcaacgagaagcacgacgaggaguucugcgacaugcugcgccucuucgacuucugcaagcaggccauccagcggcugaaggcggaggcccagaugagcauccagcugaucaacaaggccgugaacgcccucaucaacgaccagcugaucaugaagaaccaccuccgcgacaucaugggcaucccguacugcaacuacuccaaguacugcuaccugaaccacaccaccacggggaagaccagccugcccaagugcugccugguguccaacggcagcuaccucaacgagacccacuucuccgacgacaucgagcagcaggccgacaacaugaucaccgagaugcugcagaaggaguacauggagcggcagggcaagacgccccuggggcuggucgaccucuucguguucagcaccuccuucuaccugaucagcaucuuccugcaccucgugaagaucccgacccaccgccacaucgucggcaagcccugccccaagccccaccggcugaaccacauggggaucugcuccugcggccuguacaagcagccgggggugcccgugaaguggaagcgcugaggacuagucccuguucccagagcccacuuuuuuuucuuuuuuugaaauaaaauagccugucuuucagaucucaaaggcucuuuucagagccaccaaaaaaaaaaaaaaaaaaaaaaaaaaaaaaaaaaaaaaaaaaaaaaaaaaaaaaaaaaaaaaaaaaaaaaaaaaaaaaaaaaaaaaaaaaaaaaaaaaaaa

SEQ ID NO: 40645 - RNA, 1767 nt, Artificial Sequence
  mRNA product Design a-2 (hSL-A100) comprising derived and/or modified sequence from LASV(Josiah;Clade IV)__NP_694870__GPCmut12 (opt4)
aggagaguccgcucagccagguugcagaagcggcuuagcguguguccuaaucuucucucugcguguagguaggccugugccgcaaacaagcuuaccaugggccagaucgugaccuucuuccaggaggugccccacgugaucgaggaggugaugaacaucgugcugaucgcccugagcgugcuggccgugcugaagggccuguacaacuucgccaccugcggccuggugggccuggugaccuuccugcugcugugcggcagaagcugcaccaccagccuguacaagggcguguacgagcugcagacccuggagcugaacauggagacccugaacaugugcaugccccugagcugcaccaagaacaacagccaccacuacaucauggugggcaacgagaccggccuggagcugacccugaccaacaccagcaucaucaaccacaaguucugcaaccugagcgacgcccacaagaagaaccuguacgaccacgcccugaugagcaucaucagcaccuuccaccugagcauccccaacuucaaccaguacgaggccaugagcugcgacuucaacggcggcaagaucagcgugcaguacaaccugagccacagcuacgccggcgacgccgccaaccacugcggcaccguggccaacggcgugcugcagaccuucaugagaauggccuggggcggcagcuacaucgcccuggacagcggcagaggcaacugggacugcaucaugaccagcuaccaguaccugaucauccagaacaccaccugggaggaccacugccaguucagcagacccagccccaucggcuaccugggccugcugagccagagaaccagagacaucuacaucagcagaagacugcugggcaccuucaccuggacccugagcgacagcgagggcaaggacacccccggcggcuacugccugaccagauggaugcugaucgaggccgagcugaagugcuucggcaacaccgccguggccaagugcaacgagaagcacgacgaggaguucugcgacaugcugagacuguucgacuucugcaagcaggccauccagagacugaaggccgaggcccagaugagcauccagcugaucaacaaggccgugaacgcccugaucaacgaccagcugaucaugaagaaccaccugagagacaucaugggcauccccuacugcaacuacagcaaguacugcuaccugaaccacaccaccaccggcagaaccagccugcccaagugcugccuggugagcaacggcagcuaccugaacgagacccacuucagcgacgacaucgagcagcaggccgacaacaugaucaccgagaugcugcagaaggaguacauggagagacagggcaagaccccccugggccugguggaccuguucguguucagcaccagcuucuaccugaucagcaucuuccugcaccuggugaagauccccacccacagacacaucgugggcaagagcugccccaagccccacagacugaaccacaugggcaucugcagcugcggccuguacaagcagcccggcgugcccgugaaguggaagagaugaggacuagucccuguucccagagcccacuuuuuuuucuuuuuuugaaauaaaauagccugucuuucagaucucaaaggcucuuuucagagccaccaaaaaaaaaaaaaaaaaaaaaaaaaaaaaaaaaaaaaaaaaaaaaaaaaaaaaaaaaaaaaaaaaaaaaaaaaaaaaaaaaaaaaaaaaaaaaaaaaaaaa

SEQ ID NO: 40646 - RNA, 1764 nt, Artificial Sequence
  mRNA product Design a-2 (hSL-A100) comprising derived and/or modified sequence from LASV(LP;Clade I)__AAF86701__GPCmut12 (opt4)
aggagaguccgcucagccagguugcagaagcggcuuagcguguguccuaaucuucucucugcguguagguaggccugugccgcaaacaagcuuaccaugggccagaucaucaccuucuuccaggaggugccccacgugaucgaggaggugaugaacaucgugcugaucgcccugagccugcuggccauccugaagggccuguacaacaucgccaccugcggcaucaucggccugguggccuuccuguuccugugcggcaagagcugcagccugacccugaagggcggcuacgagcugcagacccuggagcugaacauggagacccugaacaugugcaugccccugagcugcaccaagaacagcagccaccacuacaucagagugggcaacgagaccggccuggagcugacccugaccaacaccagcaucaucaaccacaaguucugcaaccugagcgacgcccacaagaagaaccuguacgaccacgcccugaugagcaucaucagcaccuuccaccugagcauccccaacuucaaccaguacgaggccaugagcugcgacuucaacggcggcaagaucagcgugcaguacaaccugagccacagcuacgccggcgacgccgccgagcacugcggcaccguggccaacggcgugcugcagaccuucaugagaauggccuggggcggcagauacaucgcccuggacagcggcaagggcaacugggacugcaucaugaccagcuaccaguaccugaucauccagaacaccaccugggaggaccacugccaguucagcagacccagccccaucggcuaccugggccugcugagccagagaaccagagacaucuacaucagcagaagacugcugggcaccuucaccuggacccugagcgacagcgagggcaacgagacccccggcggcuacugccugaccagauggaugcugaucgaggccgagcugaagugcuucggcaacaccgccguggccaagugcaacgagaagcacgacgaggaguucugcgacaugcugagacuguucgacuucugcaagcaggccaucagaagacugaaggccgaggcccagaugagcauccagcugaucaacaaggccgugaacgcccugaucaacgaccagcugaucaugaagaaccaccugagagacaucaugggcauccccuacugcaacuacagcaaguacugcuaccugaaccacaccagcagcggcagaaccagccugcccaagugcugccugaucagcaacggcagcuaccugaacgagacccaguucagcgacgacaucgagcagcaggccgacaacaugaucaccgagaugcugcagaaggaguacaucgagagacagggcaagaccccccugggccugguggacaucuucaucuucagcaccagcuucuaccugaucagcaucuuccugcaccugaucaagauccccacccacagacacaucgugggcaagcccugccccaagccccacagacugaaccacaugggcgugugcagcugcggccuguacaagcaccccggcgugcccaccaaguggaagagaugaggacuagucccuguucccagagcccacuuuuuuuucuuuuuuugaaauaaaauagccugucuuucagaucucaaaggcucuuuucagagccaccaaaaaaaaaaaaaaaaaaaaaaaaaaaaaaaaaaaaaaaaaaaaaaaaaaaaaaaaaaaaaaaaaaaaaaaaaaaaaaaaaaaaaaaaaaaaaaaaaaaaa

SEQ ID NO: 40647 - RNA, 1764 nt, Artificial Sequence
  mRNA product Design a-2 (hSL-A100) comprising derived and/or modified sequence from LASV(803213;Clade II)__AAF86703__GPCmut12 (opt4)
aggagaguccgcucagccagguugcagaagcggcuuagcguguguccuaaucuucucucugcguguagguaggccugugccgcaaacaagcuuaccaugggccagaucaucaccuucuuccaggaggugccccacgugaucgaggaggugaugaacaucgugcugaucgcccugagccugcuggccauccugaagggcaucuacaacguggccaccugcggccuguucggccugaucagcuuccugcugcugugcggcagaagcugcagcgugaccuacaagggcguguacgagcugcagacccuggagcugaacauggccaaccugaacaugugcaugccccugagcugcaccaagaacaacagccaccacuacaucauggugggcaacgagaccggccuggagcugacccugaccaacaccagcaucaucaaccacaaguucugcaaccugagcgacgcccacaagaagaaccuguacgaccacgcccugaugagcaucaucagcaccuuccaccugagcauccccaacuucaaccaguacgaggccaugagcugcgacuucaacggcggcaagaucagcgugcaguacaaccugagccacagcuucgccguggacgccgccaaccacugcggcaccaucgccaacggcgugcugcagaccuucaugagaauggccuggggcggcagcuacaucgcccuggacagcggcaagggcaacugggacugcaucaugaccagcuaccaguaccugaucauccagaacaccaccugggaggaccacugccaguucagcagacccagccccaucggcuaccugggccugcugagccagagaaccagagacaucuacaucagcagaagacugcugggcaccuucaccuggacccugagcgacagcgagggcaacgaggcccccggcggcuacugccugaccagauggaugcugaucgaggccgagcugaagugcuucggcaacaccgccguggccaagugcaacgagaagcacgacgaggaguucugcgacaugcugagacuguucgacuucugcaagcaggccaucaagagacugaagaccgaggcccagaugagcauccagcugaucaacaaggccgugaacgcccugaucaacgaccagcugaucaugaagaaccaccugagagacaucaugggcauccccuacugcaacuacagcagauacugcuaccugaaccacaccgugaccggcaagaccagccugcccagaugcugccuggugagcaacggcagcuaccugaacgagacccacuucagcgacgacaucgagcagcaggccgacaacaugaucaccgagaugcugcagaaggaguacauggacagacagggcaagaccccccugggccugguggaccuguucguguucagcaccagcuucuaccugaucagcaucuuccugcaccuggugaagauccccacccacagacacaucgugggcaagcccugccccaagccccacagacugaaccacaugggcaucugcagcugcggccuguacaagcaccccggcgugcccgugaaguggaagagaugaggacuagucccuguucccagagcccacuuuuuuuucuuuuuuugaaauaaaauagccugucuuucagaucucaaaggcucuuuucagagccaccaaaaaaaaaaaaaaaaaaaaaaaaaaaaaaaaaaaaaaaaaaaaaaaaaaaaaaaaaaaaaaaaaaaaaaaaaaaaaaaaaaaaaaaaaaaaaaaaaaaaa

SEQ ID NO: 40648 - RNA, 1764 nt, Artificial Sequence
  mRNA product Design a-2 (hSL-A100) comprising derived and/or modified sequence from LASV(GA391;Clade III)__CAA36645__GPCmut12 (opt4)
aggagaguccgcucagccagguugcagaagcggcuuagcguguguccuaaucuucucucugcguguagguaggccugugccgcaaacaagcuuaccaugggccagaucgugaccuucuuccaggaggugccccacgugaucgaggaggugaugaacaucgugcugaucgcccugagcauccuggccauccugaagggccuguacaacguggccaccugcggccugaucggccuggugaccuuccugcugcugagcggcagaagcugcagccugaucuacaagggcaccuacgagcugcagacccuggagcugaacauggagacccugaacaugugcaugccccugagcugcaccaagaacaacagccaccacuacaucagagugggcaacgagaccggccuggagcugacccugaccaacaccagcauccugaaccacaaguucugcaaccugagcgacgcccacaagagaaaccuguacgaccacagccugaugagcaucaucagcaccuuccaccugagcauccccaacuucaaccaguacgaggccaugagcugcgacuucaacggcggcaagaucaccgugcaguacaaccugagccacagcuucgccguggacgccgccggccacugcggcacccuggccaacggcgugcugcagaccuucaugagaauggccuggggcggcagcuacaucgcccuggacagcggcagaggcaacugggacugcaucaugaccagcuaccaguaccugaucauccagaacaccaccugggacgaccacugccaguucagcagacccagccccaucggcuaccugggccugcugagccagagaaccagagacaucuacaucagcagaagacugcugggcaccuucaccuggacccugagcgacagcgagggcaacgagacccccggcggcuacugccugaccagauggaugcugaucgaggccgagcugaagugcuucggcaacaccgccguggccaagugcaacgagaagcacgacgaggaguucugcgacaugcugagacuguucgacuucugcaagcaggccaucagaagacugaagaccgaggcccagaugagcauccagcugaucaacaaggccgugaacgcccugaucaacgaccagcugaucaugaagaaccaccugagagacaucaugggcauccccuacugcaacuacagcagauacugcuaccugaaccacaccagcaccggcaagaccagccugcccagaugcugccugaucagcaacggcagcuaccugaacgagaccaaguucagcgacgacaucgagcagcaggccgacaacaugaucaccgagaugcugcagaaggaguacaucgacagacagggcaagaccccccugggccugguggaccuguucguguucagcaccagcuucuaccugaucagcaucuuccugcaccuggugaagauccccacccacagacacaucgugggcaagcccugccccaagccccacagacugaaccacaugggcaucugcagcugcggccuguacaagcagcccggcgugcccgugagauggaagagaugaggacuagucccuguucccagagcccacuuuuuuuucuuuuuuugaaauaaaauagccugucuuucagaucucaaaggcucuuuucagagccaccaaaaaaaaaaaaaaaaaaaaaaaaaaaaaaaaaaaaaaaaaaaaaaaaaaaaaaaaaaaaaaaaaaaaaaaaaaaaaaaaaaaaaaaaaaaaaaaaaaaaa

SEQ ID NO: 40649 - RNA, 1767 nt, Artificial Sequence
  mRNA product Design a-2 (hSL-A100) comprising derived and/or modified sequence from LASV(AV;Clade V)__CCA30314__GPCmut12 (opt4)
aggagaguccgcucagccagguugcagaagcggcuuagcguguguccuaaucuucucucugcguguagguaggccugugccgcaaacaagcuuaccaugggccagaucgugaccuucuuccaggaggugccccacgugaucgaggaggugaugaacaucgugcugaucgcccugagcauccuggccgugcugaagggccuguacaacaucgccaccugcggccugaucggccugaucaccuuccugcugcugugcggcagaagcugcagcagcaaccuguacaagggcguguacgagcugcagagccuggaccugaacauggagacccugaacaugugcaugccccugagcugcaccaagaacaacagccaccacuacaucagagugggcaacgacaccggccuggagcugacccugaccaacaccagcauccugaaccacaaguucugcaaccugagcgacgcccacaagaaggaccuguacgaccacgcccugaugagcaucaucagcaccuuccaccugagcauccccaacuucaaccaguacgaggccaugagcugcgacuucaacggcggcaagaucagcgugcaguacaaccugagccacagcuacgccaucgacgccgccaaccacugcggcaccguggccaacggcauccugcagaccuucaugagaauggccuggggcggcagcuacaucgcccuggacagcggcagaggcaacugggacugcaucaugaccagcuaccaguaccugaucauccagaacaccaccugggagaaccacugccaguucagcagacccagccccaucggcuaccugggccugcugagccagagaaccagagacaucuacaucagcagaagacugcugggcaccuucaccuggacccugagcgacagcgagggcaacgccacccccggcggcuacugccugaccagauggaugcugaucgaggccgagcugaagugcuucggcaacaccgccguggccaagugcaacgagaagcacgacgaggaguucugcgacaugcugagacuguucgacuucugcaagcaggccaucagcagacugaagagcgaggcccagaugagcauccagcugaucaacaaggccgugaacgcccugaucaacgaccagcugaucaugaagaaccaccugagagacaucaugggcauccccuacugcaacuacagcaaguacugcuaccugaaccacaccaucaccggcaagaccagccugcccaagugcugccuggugagcaacggcagcuaccugaacgagacccacuucagcgacgacaucgagcagcaggccgacaacaugaucaccgagaugcugcagaaggaguacauggagagacagggcaagaccccccugggccugguggaccuguucguguucagcaccagcuucuaccugaucagcaucuuccugagacuggugaagauccccacccacagacacaucgugggcaagcccugccccaagccccacagacugaaccacaugggcaucugcagcugcggccuguacaagcagcccggcgugcccgugagauggaagagaugaggacuagucccuguucccagagcccacuuuuuuuucuuuuuuugaaauaaaauagccugucuuucagaucucaaaggcucuuuucagagccaccaaaaaaaaaaaaaaaaaaaaaaaaaaaaaaaaaaaaaaaaaaaaaaaaaaaaaaaaaaaaaaaaaaaaaaaaaaaaaaaaaaaaaaaaaaaaaaaaaaaaa

SEQ ID NO: 40650 - RNA, 1764 nt, Artificial Sequence
  mRNA product Design a-2 (hSL-A100) comprising derived and/or modified sequence from LASV(Togo/2016/7082;Clade VI)__AMR44577__GPCmut12 (opt4)
aggagaguccgcucagccagguugcagaagcggcuuagcguguguccuaaucuucucucugcguguagguaggccugugccgcaaacaagcuuaccaugggccagaucaucaccuucuuccaggaggugccccacgugaucgaggaggugaugaacaucgugcugaucgcccugagccugcuggccauccugaagggcguguacaacguggccaccugcggcaucaucggccuggugaccuuccuguuccugugcggcagaagcugcagccugaucuacaagggcagcuacgagcugcagacccuggagcugaacauggagacccugaacaugugcaugccccugagcugcaccaagaacagcagccaccacuacaucagagugggcaacgagaccggccuggagcugacccugaccaacaccagcaucaucaaccacaaguucugcaaccugagcgacgcccacaagagaaaccuguacgaccacgcccugaugagcauccugagcaccuuccaccugagcauccccaacuucaaccaguacgaggccaugagcugcgacuucaacggcggcaagaucagcgugcaguacaaccugagccacgccuacgccguggacgccgccgagcacugcggcaccguggccaacggcgugcugcagaccuucaugagaauggccuggggcggcagcuacaucgcccuggacagcggcagaggcaacugggacugcaucaugaccagcuaccaguaccugaucauccagaacaccaccugggaggaccacugccaguucagcagacccagccccaucggcuaccugggccugcugagccagagaaccagagacaucuacaucagcagaagacugcugggcaccuucaccuggacccugagcgacagcgagggcaacgagacccccggcggcuacugccugaccagauggaugcugaucgaggccgagcugaagugcuucggcaacaccgccguggccaagugcaacgagaagcacgacgaggaguucugcgacaugcugagacuguucgacuucugcaagcaggccauccagagacugaagagcgaggcccagaugagcauccagcugaucaacaaggccgugaacgcccugaucaacgaccagcugaucaugaagaaccaccugagagacaugaugggcauccccuacugcaacuacagcaaguacugcuaccugaaccacaccagcagcggcagaaccagccugcccaagugcugccuggugagcaacggcagcuaccugaacgagacccacuucagcgacgacaucgagcagcaggccgacaacaugaucaccgagaugcugcagaaggaguacaucgacagacagggcaagaccccccugggccugguggaccuguucguguucagcaccagcuucuaccugaucagcaucuuccugcaccugaucaagauccccacccacagacacaucgugggcaagcccugccccaagccccacagacugaaccacaugggcaucugcagcugcggccuguacaagcagcccggcgugcccaccagauggaagagaugaggacuagucccuguucccagagcccacuuuuuuuucuuuuuuugaaauaaaauagccugucuuucagaucucaaaggcucuuuucagagccaccaaaaaaaaaaaaaaaaaaaaaaaaaaaaaaaaaaaaaaaaaaaaaaaaaaaaaaaaaaaaaaaaaaaaaaaaaaaaaaaaaaaaaaaaaaaaaaaaaaaaa

SEQ ID NO: 40651 - RNA, 1764 nt, Artificial Sequence
  mRNA product Design a-2 (hSL-A100) comprising derived and/or modified sequence from LASV(KAK-428;Clade n.d. (VII))__ANH09740__GPCmut12 (opt4)
aggagaguccgcucagccagguugcagaagcggcuuagcguguguccuaaucuucucucugcguguagguaggccugugccgcaaacaagcuuaccaugggccagaucgugaccuucuuccaggaggugccccacgugaucgaggaggugaugaacaucgugcugaucgcccugagccugcuggccauccugaagggccuguacaacuucgccaccugcggcgugaucggccugaucaccuuccugcugcugugcggcagaagcugcagcgccaccuacaagggccaguacgagcugcagacccuggagcugaacauggagagccugaacaugugcaugccccugagcugcaccaagaacaacagccaccacuacaucagagccggcaacaacaccggccuggagcugacccugaccaacaccagcaucaucagccacaaguucugcaaccugagcgacgcccacaagaagaaccuguacgaccacacccugaugagcaucaucaccaccuuccaccugagcauccccaacuucaaccaguacgaggccaugagcugcgacuucaacggcggcaagaucagcauccaguacaaccugagccacagcuacgccggcgacgccgcccagcacugcggcaccguggccaacggcgugcugcagaccuucaugagaauggccuggggcggcagcuaccuggcccuggacagcggcagaagaggcugggacugcaucaucagcagcuaccaguaccugaucauccagaacaccaccugggacgaccacugccaguucagcagacccagccccaucggcuaccugggcuucgugagccagaagaccagagacaucuacaucagcagaagacugcugggcaccuucaccuggacccugagcgacagcgagggccacgacaugcccggcggcuacugccugaccagauggaugcugaucgaggccgaccugaagugcuucggcaacaccgccguggccaagugcaacgagaagcacgacgaggaguucugcgacauguggagacuguucgacuucugcaagcaggccauccagagacugaaggccgaggcccagaugaacauccagcugaucaacaaggccgugaacgcccugaucaacgaccagcugaugaugaagaaccaccugagagacaucaugggcauccccuacugcaacuacagcaaguucugcuaccugaacaacaccaccaccggcagaaccagccugcccagaugcugccugaucagcaacggcagcuaccugaacgagacccacuucagcgacgacaucgagcagcaggccgacaacaugaucaccgagaugcugcagaaggaguacauggacagacagggcaagaccccccugggccugguggaccuguucguguucagcaccagcuucuaccugaucaccaucuuccugcaccuggugaagauccccacccacagacacaucgugggcaagcccugccccaagccccacagacugaaccacaugggcaucugcagcugcggccuguacaagcagcccggcgugcccgugagauggaagagaugaggacuagucccuguucccagagcccacuuuuuuuucuuuuuuugaaauaaaauagccugucuuucagaucucaaaggcucuuuucagagccaccaaaaaaaaaaaaaaaaaaaaaaaaaaaaaaaaaaaaaaaaaaaaaaaaaaaaaaaaaaaaaaaaaaaaaaaaaaaaaaaaaaaaaaaaaaaaaaaaaaaaa

SEQ ID NO: 40652 - RNA, 1764 nt, Artificial Sequence; identical to SEQ ID NO: 40646
  mRNA product Design a-2 (hSL-A100) comprising derived and/or modified sequence from LASV(Pinneo-NIG-1969;Clade I)__AIT17836__GPCmut12 (opt4)

SEQ ID NO: 40653 - RNA, 1764 nt, Artificial Sequence
  mRNA product Design a-2 (hSL-A100) comprising derived and/or modified sequence from LASV(ISTH0009-NIG-2011;Clade II)__AIT17404__GPCmut12 (opt4)
aggagaguccgcucagccagguugcagaagcggcuuagcguguguccuaaucuucucucugcguguagguaggccugugccgcaaacaagcuuaccaugggccagaucaucaccuucuuccaggaggugccccacgugaucgaggaggugaugaacaucgugcugaucgcccugagccugcuggccauccugaagggcaucuacaacguggccaccugcggccuguucggccuggugagcuuccugcugcugugcggcagaagcugcagcaccaccuacaagggcguguacgagcugcagacccuggagcuggacauggccagccugaacaugugcaugccccugagcugcaccaagaacaacagccaccacuacaucauggugggcaacgagaccggccuggagcugacccugaccaacaccagcaucaucaaccacaaguucugcaaccugagcgacgcccacaagaagaaccuguacgaccacgcccugaugagcaucaucagcaccuuccaccugagcauccccaacuucaaccaguacgaggccaugagcugcgacuucaacggcggcaagaucagcgugcaguacaaccugagccacgccuacgccguggacgccgccaaccacugcggcaccaucgccaacggcgugcugcagaccuucaugagaauggccuggggcggcagcuacaucgcccuggacagcggcaagggcagcugggacugcaucaugaccagcuaccaguaccugaucauccagaacaccaccugggaggaccacugccaguucagcagacccagccccaucggcuaccugggccugcugagccagagaaccagagacaucuacaucagcagaagacugcugggcaccuucaccuggacccugagcgacagcgagggcaacgagacccccggcggcuacugccugaccagauggaugcugaucgaggccgagcugaagugcuucggcaacaccgccguggccaagugcaacgagaagcacgacgaggaguucugcgacaugcugagacuguucgacuucugcaagcaggccaucagaagacugaagaccgaggcccagaugagcauccagcugaucaacaaggccgugaacgcccugaucaacgaccagcugaucaugaagaaccaccugagagacaucaugggcauccccuacugcaacuacagcaaguacugcuaccugaaccacaccgugaccggcaagaccagccugcccagaugcugccuggugagcaacggcagcuaccugaacgagacccacuucagcgacgacaucgagcagcaggccgacaacaugaucaccgagcugcugcagaaggaguacauggacagacagggcaagaccccccugggccugguggaccuguucguguucagcaccagcuucuaccugaucagcaucuuccugcaccugaucaagauccccacccacagacacaucaccggcaagcccugccccaagccccacagacugaaccacaugggcaucugcagcugcggccuguacaagcaccccggcgugcccgugaaguggaagagaugaggacuagucccuguucccagagcccacuuuuuuuucuuuuuuugaaauaaaauagccugucuuucagaucucaaaggcucuuuucagagccaccaaaaaaaaaaaaaaaaaaaaaaaaaaaaaaaaaaaaaaaaaaaaaaaaaaaaaaaaaaaaaaaaaaaaaaaaaaaaaaaaaaaaaaaaaaaaaaaaaaaaa

SEQ ID NO: 40654 - RNA, 1764 nt, Artificial Sequence
  mRNA product Design a-2 (hSL-A100) comprising derived and/or modified sequence from LASV(ISTH2010-NIG-2012;Clade II)__AIT17482__GPCmut12 (opt4)
aggagaguccgcucagccagguugcagaagcggcuuagcguguguccuaaucuucucucugcguguagguaggccugugccgcaaacaagcuuaccaugggccagaucaucaccuucuuccaggaggugccccacgugaucgaggaggugaugaacaucgugcugaucgcccugagccugcuggccauccugaagggcaucuacaacguggccaccugcggccuguucggccuggugagcuuccugcugcugugcggcagaagcugcagcaccaccuacaagggcguguacgagcugcagacccuggagcuggacauggccagccugaacaugugcaugccccugagcugcaccaagaacaacagccaccacuacaucauggugggcaacgagaccggccuggagcugacccugaccaacaccagcaucaucaaccacaaguucugcaaccugagcgacgcccacaagaagaaccuguacgaccacgcccugaugagcaucaucagcaccuuccaccugagcauccccaacuucaaccaguacgaggccaugagcugcgacuucaacggcggcaagaucagcgugcaguacaaccugagccacgccuacgccguggacgccgccaaccacugcggcaccaucgccaacggcgugcugcagaccuucaugagaauggccuggggcggcagcuacaucgcccuggacagcggcaagggcagcugggacugcaucaugaccagcuaccaguaccugaucauccagaacaucaccugggaggaccacugccaguucagcagacccagccccaucggcuaccugggccugcugagccagagaaccagagacaucuacaucagcagaagacugcugggcaccuucaccuggacccugagcgacagcgagggcaacgagacccccggcggcuacugccugaccagauggaugcugaucgaggccgagcugaagugcuucggcaacaccgccguggccaagugcaacgagaagcacgacgaggaguucugcgacaugcugagacuguucgacuucugcaagcaggccaucagaagacugaagaccgaggcccagaugagcauccagcugaucaacaaggccgugaacgcccugaucaacgaccagcugaucaugaagaaccaccugagagacaucaugggcauccccuacugcaacuacagcaaguacugcuaccugaaccacaccgugaccggcaagaccagccugcccagaugcugccuggugagcaacggcagcuaccugaacgagacccacuucagcgacgacaucgagcagcaggccgacaacaugaucaccgagcugcugcagaaggaguacaucgacagacagggcaagaccccccugggccugguggaccuguucguguucagcaccagcuucuaccugaucagcaucuuccugcaccuggugaagauccccacccacagacacguggugggcaagcccugccccaagccccacagacugaaccacaugggcaucugcagcugcggccuguacaagcaccccggcgugcccgugaaguggaagagaugaggacuagucccuguucccagagcccacuuuuuuuucuuuuuuugaaauaaaauagccugucuuucagaucucaaaggcucuuuucagagccaccaaaaaaaaaaaaaaaaaaaaaaaaaaaaaaaaaaaaaaaaaaaaaaaaaaaaaaaaaaaaaaaaaaaaaaaaaaaaaaaaaaaaaaaaaaaaaaaaaaaaa

SEQ ID NO: 40655 - RNA, 1764 nt, Artificial Sequence
  mRNA product Design a-2 (hSL-A100) comprising derived and/or modified sequence from LASV(Lassa virus/H.sapiens-wt/NGA/2015/ISTH_0543;Clade II)__AVO03639__GPCmut12 (opt4)
aggagaguccgcucagccagguugcagaagcggcuuagcguguguccuaaucuucucucugcguguagguaggccugugccgcaaacaagcuuaccaugggccagaucaucaccuucuuccaggaggugccccacgugaucgaggaggugaugaacaucgugcugaucgcccugagccugcuggccauccugaagggcaucuacaacguggccaccugcggccuguucggccuggugagcuuccugcugcugugcggcagaagcugcagcaccaccuacaagggcguguacgagcugcagacccuggagcuggacauggccaaccugaacaugugcaugccccugagcugcaccaagaacaacagccaccacuacaucauggugggcaacgagaccggccuggagcugacccugaccaacaccagcaucaucaaccacaaguucugcaaccugagcgacgcccacaagaagaaccuguacgaccacgcccugaugagcaucaucagcaccuuccaccugagcauccccaacuucaaccaguacgaggccaugagcugcgacuucaacggcggcaagaucagcgugcaguacaaccugagccacaccuacgccguggacgccgccaaccacugcggcaccaucgccaacggcgugcugcagaccuucaugagaauggccuggggcggcagcuacaucgcccuggacagcggcaagggcagcugggacugcaucaugaccagcuaccaguaccuggugauccagaacaccaccugggaggaccacugccaguucagcagacccagccccaucggcuaccugggccugcugagccagagaaccagagacaucuacaucagcagaagacugcugggcaccuucaccuggacccugagcgacagcgagggcaacgagacccccggcggcuacugccugaccagauggaugcugaucgaggccgagcugaagugcuucggcaacaccgccguggccaagugcaacgagaagcacgacgaggaguucugcgacaugcugagacuguucgacuucugcaagcaggccaucagaagacugaagaccgaggcccagaugagcauccagcugaucaacaaggccgugaacgcccugaucaacgaccagcugaucaugaagaaccaccugagagacaucaugggcauccccuacugcaacuacagcaaguacugcuaccugaaccacaccgugaccggcaagaccagccugcccagaugcugccuggugagcaacggcagcuaccugaacgagacccacuucagcgacgacaucgagcagcaggccgacaacaugaucaccgagcugcugcagaaggaguacaucgacagacagggcaagaccccccugggccugguggaccuguucguguucagcaccagcuucuaccugaucagcaucuuccugcaccuggugaagauccccacccacagacacaucaccggcaagcccugccccaagccccacagacugaaccacaugggcaucugcagcugcggccuguacaagcaccccggcgugcccgugaaguggaagagaugaggacuagucccuguucccagagcccacuuuuuuuucuuuuuuugaaauaaaauagccugucuuucagaucucaaaggcucuuuucagagccaccaaaaaaaaaaaaaaaaaaaaaaaaaaaaaaaaaaaaaaaaaaaaaaaaaaaaaaaaaaaaaaaaaaaaaaaaaaaaaaaaaaaaaaaaaaaaaaaaaaaaa

SEQ ID NO: 40656 - RNA, 1764 nt, Artificial Sequence
  mRNA product Design a-2 (hSL-A100) comprising derived and/or modified sequence from LASV(Lassa virus/H.sapiens-wt/NGA/2016/ISTH_0009;Clade II)__AVO03571__GPCmut12 (opt4)
aggagaguccgcucagccagguugcagaagcggcuuagcguguguccuaaucuucucucugcguguagguaggccugugccgcaaacaagcuuaccaugggccagaucaucaccuucuuccaggaggugccccacgugaucgaggaggugaugaacaucgugcugaucgcccugagccugcuggccauccugaagggcaucuacaacguggccaccugcggccugcugggccuggugagcuuccugcugcugugcggcagaagcugcagcaccaccuacaagggcguguacgagcugcagacccuggagcuggacauggccagccugaacaugugcaugccccugagcugcaccaagaacaacagccaccacuacaucauggugggcaacgagaccggccuggagcugacccugaccaacaccagcaucaucaaccacaaguucugcaaccugagcgacgcccacaagaagaaccuguacgaccacgcccugaugagcaucaucagcaccuuccaccugagcauccccaacuucaaccaguacgaggccaugagcugcgacuucaacggcggcagaaucagcgugcaguacaaccugagccacagcuacgccguggacgccgccaaccacugcggcaccaucgccaacggcgugcugcagaccuucaugagaauggccuggggcggcagcuacaucgcccuggacagcggcaagggcagcugggacugcaucaugaccagcuaccaguaccugaucauccagaacaccaccugggaggaccacugccaguucagcagacccagccccaucggcuaccugggccugcugagccagagaaccagagacaucuacaucagcagaagacugcugggcaccuucaccuggacccugagcgacagcgagggcaacgagacccccggcggcuacugccugaccagauggaugcugaucgaggccgagcugaagugcuucggcaacaccgccguggccaagugcaacgagaagcacgacgaggaguucugcgacaugcugagacuguucgacuucugcaagcaggccaucagaagacugaagaccgaggcccagaugagcauccagcugaucaacaaggccgugaacgcccugaucaacgaccagcugaucaugaagaaccaccugagagacaucaugggcauccccuacugcaacuacagcaaguacugcuaccugaaccacaccgugaccggcaagaccagccugcccagaugcugccuggugagcaacggcagcuaccugaacgagacccacuucagcgacgacaucgagcagcaggccgacaacaugaucaccgagcugcugcagaaggaguacaucgacagacagggcaagaccccccugggccugguggaccuguucguguucagcaccagcuucuaccugaucagcaucuuccugcaccuggugaagauccccacccacagacacaucaccggcaagcccugccccaagccccacagacugaaccacaugggcaucugcagcugcggccuguacaaccaccccggcgugcccgugaaguggaagagaugaggacuagucccuguucccagagcccacuuuuuuuucuuuuuuugaaauaaaauagccugucuuucagaucucaaaggcucuuuucagagccaccaaaaaaaaaaaaaaaaaaaaaaaaaaaaaaaaaaaaaaaaaaaaaaaaaaaaaaaaaaaaaaaaaaaaaaaaaaaaaaaaaaaaaaaaaaaaaaaaaaaaa

SEQ ID NO: 40657 - RNA, 1764 nt, Artificial Sequence
  mRNA product Design a-2 (hSL-A100) comprising derived and/or modified sequence from LASV(Lassa virus/H.sapiens-wt/NGA/2016/ISTH_0017;Clade II)__AVO03567__GPCmut12 (opt4)
aggagaguccgcucagccagguugcagaagcggcuuagcguguguccuaaucuucucucugcguguagguaggccugugccgcaaacaagcuuaccaugggccagaucaucaccuucuuccaggaggugccccacgugaucgaggaggugaugaacaucgugcugaucgcccugagccugcuggccauccugaagggcaucuacaacguggccaccugcggccuguucggccuggugagcuuccugcugcugugcggcagaagcugcagcaccaccuacaagggcguguacgagcugcagacccuggagcuggacauggccagccugaacaugugcaugccccugagcugcaccaagaacaacagccaccacuacaucauggugggcaacgagaccggccuggagcugacccugaccaacaccagcaucaucaaccacaaguucugcaaccugagcgacgcccacaagaagaaccuguacgaccacgcccugaugagcaucaucagcaccuuccaccugagcauccccaacuucaaccaguacgaggccaugagcugcgacuucaacggcggcaagaucagcgugcaguacaaccugagccacaccuacgccaucgacgccgccaaccacugcggcaccaucgccaacggcgugcugcagaccuucaugagaauggccuggggcggcagcuacaucgcccuggacagcggcaagggcagcugggacugcaucaugaccagcuaccaguaccugaucauccagaacaccaccugggaggaccacugccaguucagcagacccagccccaucggcuaccugggccugcugagccagagaaccagagacaucuacaucagcagaagacugcugggcaccuucaccuggacccugagcgacagcgagggcaacgagacccccggcggcuacugccugaccagauggaugcugaucgaggccgagcugaagugcuucggcaacaccgccguggccaagugcaacgagaagcacgacgaggaguucugcgacaugcugagacuguucgacuucugcaagcaggccaucagaagacugaagaccgaggcccagaugagcauccagcugaucaacaaggccgugaacgcccugaucaacgaccagcugaucaugaagaaccaccugagagacaucaugggcauccccuacugcaacuacagcaaguacugcuaccugaaccacaccgugaccggcaagaccagccugcccagaugcugccuggugagcaacggcagcuaccugaacgagacccacuucagcgacgacaucgagcagcaggccgacaacaugaucaccgagcugcugcagaaggaguacauggacagacagggcaagaccccccugggccugguggaccuguucguguucagcaccagcuucuaccugaucagcaucuuccugcaccuggugagaauccccacccacagacacgugaucggcaagcccugccccaagccccacagacugaaccacaugggcaucugcagcugcggccuguacaagcaccccggcgugcccgugaaguggaagagaugaggacuagucccuguucccagagcccacuuuuuuuucuuuuuuugaaauaaaauagccugucuuucagaucucaaaggcucuuuucagagccaccaaaaaaaaaaaaaaaaaaaaaaaaaaaaaaaaaaaaaaaaaaaaaaaaaaaaaaaaaaaaaaaaaaaaaaaaaaaaaaaaaaaaaaaaaaaaaaaaaaaaa

SEQ ID NO: 40658 - RNA, 1764 nt, Artificial Sequence
  mRNA product Design a-2 (hSL-A100) comprising derived and/or modified sequence from LASV(Lassa virus/H.sapiens-wt/NGA/2018/ISTH_0959;Clade II)__AVV65099__GPCmut12 (opt4)
aggagaguccgcucagccagguugcagaagcggcuuagcguguguccuaaucuucucucugcguguagguaggccugugccgcaaacaagcuuaccaugggccagaucaucaccuucuuccaggaggugccccacgugaucgaggaggugaugaacaucgugcugaucgcccugagccugcuggccauccugaagggcaucuacaacguggugaccugcggccuguucggccuggugagcuuccugcugcugugcggcagaagcugcagcaccaccuacaagggcguguacgagcugcagacccuggagcuggacauggccagccugaacaugugcaugccccugagcugcaccaagaacaacagccaccacuacaucauggugggcaacgagaccggccuggagcugacccugaccaacaccagcaucaucaaccacaaguucugcaaccugagcgacgcccacaagaagaaccuguacgaccacgcccugaugagcaucaucagcaccuuccaccugagcauccccaacuucaaccaguacgaggccaugagcugcgacuucaacggcggcaagaucagcgugcaguacaaccugagccacgccuacgccaucgacgccgccaaccacugcggcaccaucgccaacggcgugcugcagaccuucaugagaauggccuggggcggcagcuacaucgcccuggacagcggcaagggcagcugggacugcaucaugaccagcuaccaguaccugaucauccagaacaccaccugggaggaccacugccaguucagcagacccagccccaucggcuaccugggccugcugagccagagaaccagagacaucuacaucagcagaagacugcugggcaccuucaccuggacccugagcgacagcgagggcaacgagacccccggcggcuacugccugaccagauggaugcugaucgaggccgagcugaagugcuucggcaacaccgccguggccaagugcaacgagaagcacgacgaggaguucugcgacaugcugagacuguucgacuucugcaagcaggccaucagaagacugaagaccgaggcccagaugagcauccagcugaucaacaaggccgugaacgcccugaucaacgaccagcugaucaugaagaaccaccugagagacaucaugggcauccccuacugcaacuacagcaaguacugcuaccugaaccacaccgugaccggcaagaccagccugcccagaugcugccuggugagcaacggcagcuaccugaacgagacccacuucagcgacgacaucgagcagcaggccgacaacaugaucaccgagcugcugcagaaggaguacaucgacagacagggcaagaccccccugggccugguggaccuguucguguucagcaccagcuucuaccugaucagcaucuuccugcaccuggugaagauccccacccacagacacgugaucggcaagcccugccccaagccccacagacugaaccacaugggcaucugcagcugcggccuguacaagcaccccggcgugcccgugaaguggaagagaugaggacuagucccuguucccagagcccacuuuuuuuucuuuuuuugaaauaaaauagccugucuuucagaucucaaaggcucuuuucagagccaccaaaaaaaaaaaaaaaaaaaaaaaaaaaaaaaaaaaaaaaaaaaaaaaaaaaaaaaaaaaaaaaaaaaaaaaaaaaaaaaaaaaaaaaaaaaaaaaaaaaaa

SEQ ID NO: 40659 - RNA, 1764 nt, Artificial Sequence
  mRNA product Design a-2 (hSL-A100) comprising derived and/or modified sequence from LASV(LASV003-NIG-2008;Clade II)__AIT17580__GPCmut12 (opt4)
aggagaguccgcucagccagguugcagaagcggcuuagcguguguccuaaucuucucucugcguguagguaggccugugccgcaaacaagcuuaccaugggccagaucaucaccuucuuccaggaggugccccacgugaucgaggaggugaugaacaucgugcugaucgcccugagccugcuggccauccugaagggcaucuacaacguggccaccugcggccuguucggccuggugagcuuccugcugcugugcggcagaagcugcagcaccaccuacaagggcguguacgagcugcagacccuggagcuggacauggccagccugaacaugugcaugccccugagcugcaccaagaacaacagccaccacuacaucauggugggcaacgagaccggccuggagcugacccugaccaacaccagcaucaucaaccacaaguucugcaaccugagcgacgcccacaagaagaaccuguacgaccacgcccugaugagcaucaucagcaccuuccaccugagcauccccaacuucaaccaguacgaggccaugagcugcgacuucaacggcggcaagaucagcgugcaguacaaccugagccacaccuacgccguggacgccgccaaccacugcggcaccaucgccaacggcgugcugcagaccuucaugagaauggccuggggcggcagcuacaucgcccuggacagcggcaagggcagcugggacugcaucaugaccagcuaccaguaccugaucauccagaacaccaccugggaggaccacugccaguucagcagacccagccccaucggcuaccugggccugcugagccagagaaccagagacaucuacaucagcagaagacugcugggcaccuucaccuggacccugagcgacagcgagagcaacgagacccccggcggcuacugccugaccagauggaugcugaucgaggccgagcugaagugcuucggcaacaccgccguggccaagugcaacgagaagcacgacgaggaguucugcgacaugcugagacuguucgacuucugcaagcaggccaucagaagacugaaggccgaggcccagaugagcauccagcugaucaacaaggccgugaacgcccugaucaacgaccagcugaucaugaagaaccaccugagagacaucaugggcauccccuacugcaacuacagcaaguacugcuaccugaaccacaccgugaccggcagaaccagccugcccagaugcugccuggugagcaacggcagcuaccugaacgagacccacuucagcgacgacaucgagcagcaggccgacaacaugaucaccgagcugcugcagaaggaguacauggacagacagggcaagaccccccugggccugguggaccuguucguguucagcaccagcuucuaccugaucagcaucuuccugcaccuggugaagauccccacccacagacacgugaucggcaagcccugccccaagccccacagacugaaccacaugggcaucugcagcugcggccuguacaagcaccccggcgugcccgugaaguggaagagaugaggacuagucccuguucccagagcccacuuuuuuuucuuuuuuugaaauaaaauagccugucuuucagaucucaaaggcucuuuucagagccaccaaaaaaaaaaaaaaaaaaaaaaaaaaaaaaaaaaaaaaaaaaaaaaaaaaaaaaaaaaaaaaaaaaaaaaaaaaaaaaaaaaaaaaaaaaaaaaaaaaaaa

SEQ ID NO: 40660 - RNA, 1764 nt, Artificial Sequence
  mRNA product Design a-2 (hSL-A100) comprising derived and/or modified sequence from LASV(LASV035-NIG-2009;Clade II)__AIT17588__GPCmut12 (opt4)
aggagaguccgcucagccagguugcagaagcggcuuagcguguguccuaaucuucucucugcguguagguaggccugugccgcaaacaagcuuaccaugggccagaucaucaccuucuuccaggaggugccccacgugaucgaggaggugaugaacaucgugcugaucgcccugagccugcuggccauccugaagggcaucuacaacguggccaccugcggccuguucggccuggugagcuuccugcugcugugcggcagaagcugcagcaccaccuacaagggcguguacgagcugcagacccuggagcuggacauggccagccugaacaugugcaugccccugagcugcaccaagaacaacagccaccacuacaucauggugggcaacgagaccggccuggagcugacccugaccaacaccagcaucaucaaccacaaguucugcaaccugagcgacgcccacaagaagaaccuguacgaccacgcccugaugagcaucaucagcaccuuccaccugagcauccccaacuucaaccaguacgaggccaugagcugcgacuucaacggcggcaagaucagcgugcaguacaaccugagccacgccuacgccguggacgccgccaaccacugcggcaccaucgccaacggcgugcugcagaccuucaugagaauggccuggggcggcagcuacaucgcccuggacagcggcaagggcagcugggacugcaucaugaccagcuaccaguaccugaucauccagaacaccaccugggaggaccacugccaguucagcagacccagccccaucggcuaccugggccugcugagccagagaaccagagacaucuacaucagcagaagacugcugggcaccuucaccuggacccugagcgacagcgagggcaacgagacccccggcggcuacugccugaccagauggaugcugaucgaggccgagcugaagugcuucggcaacaccgccguggccaagugcaacgagaagcacgacgaggaguucugcgacaugcugagacuguucgacuucugcaagcaggccaucagaagacugaaggccgaggcccagaugagcauccagcugaucaacaaggccgugaacgcccugaucaacgaccagcugaucaugaagaaccaccugagagacaucaugggcauccccuacugcaacuacagcaaguacugcuaccugaaccacaccgugaccggcaagaccagccugcccagaugcugccuggugagcaacggcagcuaccugaacgagacccacuucagcgacgacaucgagcagcaggccgacaacaugaucaccgagcugcugcagaaggaguacaucgacagacagggcaagaccccccugggccugguggaccuguucguguucagcaccagcuucuaccugaucagcaucuuccugcaccuggugaagauccccacccacagacacgugaucggcaagcccugccccaagccccacagacugaaccacaugggcaucugcagcugcggccuguacaagcaccccggcgugcccgugaaguggaagagaugaggacuagucccuguucccagagcccacuuuuuuuucuuuuuuugaaauaaaauagccugucuuucagaucucaaaggcucuuuucagagccaccaaaaaaaaaaaaaaaaaaaaaaaaaaaaaaaaaaaaaaaaaaaaaaaaaaaaaaaaaaaaaaaaaaaaaaaaaaaaaaaaaaaaaaaaaaaaaaaaaaaaa

SEQ ID NO: 40661 - RNA, 1764 nt, Artificial Sequence
  mRNA product Design a-2 (hSL-A100) comprising derived and/or modified sequence from LASV(LASV1000-NIG-2009;Clade II)__AIT17782__GPCmut12 (opt4)
aggagaguccgcucagccagguugcagaagcggcuuagcguguguccuaaucuucucucugcguguagguaggccugugccgcaaacaagcuuaccaugggccagaucaucaccuucuuccaggaggugccccacgugaucgaggaggugaugaacaucgugcugaucgcccugagccugcuggccauccugaagggcaucuacaacguggccaccugcggccuguucggccuggugagcuuccugcugcugugcggcagaagcugcagcaccaccuacaagggcguguacgagcugcagacccuggagcuggacauggccagccugaacaugugcaugccccugagcugcaccaagaacaacagccaccacuacaucauggugggcaacgagaccggccuggagcugacccugaccaacaccagcaucaucaaccacaaguucugcaaccugagcgacgcccacaagaagaaccuguacgaccacgcccugaugagcaucaucagcaccuuccaccugagcauccccaacuucaaccaguacgaggccaugagcugcgacuucaacggcggcaagaucagcgugcaguacaaccugagccacaccuacgccguggacgccgccaaccacugcggcaccaucgccaacggcgugcugcagaccuucaugagaauggccuggggcggcagcuacaucgcccuggacagcggcaagggcagcugggacugcaucaugaccagcuaccaguaccugaucauccagaacaccaccugggaggaccacugccaguucagcagacccagccccaucggcuaccugggccugcugagccagagaaccagagacaucuacaucagcagaagacugcugggcaccuucaccuggacccugagcgacagcgagggcaacgagacccccggcggcuacugccugaccagauggaugcugaucgaggccgagcugaagugcuucggcaacaccgccguggccaagugcaacgagaagcacgacgaggaguucugcgacaugcugagacuguucgacuucugcaagcaggccaucaagagacugaagaccgaggcccagaugagcauccagcugaucaacaaggccgugaacgcccugaucaacgaccagcugaucaugaagaaccaccugagagacaucaugggcauccccuacugcaacuacagcaaguacugcuaccugaaccacaccgugaccggcaagaccagccugcccagaugcugccuggugagcaacggcagcuaccugaacgagacccacuucagcgacgacaucgagcagcaggccgacaacaugaucaccgagcugcugcagaaggaguacaucgacagacagggcaagaccccccugggccugguggaccuguucguguucagcaccagcuucuaccugaucagcaucuuccugcaccuggugaagauccccacccacagacacguggugggcaagcccugccccaagccccacagacugaaccacaugggcaucugcagcugcggccuguacaagcaccccggcgugcccgugaaguggaagagaugaggacuagucccuguucccagagcccacuuuuuuuucuuuuuuugaaauaaaauagccugucuuucagaucucaaaggcucuuuucagagccaccaaaaaaaaaaaaaaaaaaaaaaaaaaaaaaaaaaaaaaaaaaaaaaaaaaaaaaaaaaaaaaaaaaaaaaaaaaaaaaaaaaaaaaaaaaaaaaaaaaaaa

SEQ ID NO: 40662 - RNA, 1764 nt, Artificial Sequence
  mRNA product Design a-2 (hSL-A100) comprising derived and/or modified sequence from LASV(LASV221-NIG-2010;Clade II)__AIT17624__GPCmut12 (opt4)
aggagaguccgcucagccagguugcagaagcggcuuagcguguguccuaaucuucucucugcguguagguaggccugugccgcaaacaagcuuaccaugggccagaucaucaccuucuuccaggaggugccccacgugaucgaggaggugaugaacaucgugcugaucgcccugagccugcuggccauccugaagggcaucuacaacguggccaccugcggccuguucggccuggugagcuuccugcugcugugcggcagaagcugcagcaccaccuacaagggcguguacgagcugcagacccuggagcuggacauggccagccugaacaugugcaugccccugagcugcaccaagaacaacagccaccacuacaucauggugggcaacgagaccggccuggagcugacccugaccaacaccagcaucaucaaccacaaguucugcaaccugagcgacgcccacaagaagaaccuguacgaccacgcccugaugagcaucaucagcaccuuccaccugagcauccccaacuucaaccaguacgaggccaugagcugcgacuucaacggcggcaagaucagcgugcaguacaaccugagccacaccuacgccaucgacgccgccaaccacugcggcaccaucgccaacggcgugcugcagaccuucaugagaauggccuggggcggcagcuacaucgcccuggacagcggcaagggcagcugggacugcaucaugaccagcuaccaguaccugaucauccagaacaccaccugggaggaccacugccaguucagcagacccagccccaucggcuaccugggccugcugagccagagaaccagagacaucuacaucagcagaagacugcugggcaccuucaccuggacccugagcgacagcgagggcaacgagacccccggcggcuacugccugaccagauggaugcugaucgaggccgagcugaagugcuucggcaacaccgccguggccaagugcaacgagaagcacgacgaggaguucugcgacaugcugagacuguucgacuucugcaagcaggccaucagaagacugaagaccgaggcccagaugagcauccagcugaucaacaaggccgugaacgcccugaucaacgaccagcugaucaugaagaaccaccugagagacaucaugggcauccccuacugcaacuacagcaaguacugcuaccugaaccacaccgugaccggcaagaccagccugcccagaugcugccuggugagcaacggcagcuaccugaacgagacccacuucagcgacgacaucgagcagcaggccgacaacaugaucaccgagaugcugcagaaggaguacauggacagacagggcaagaccccccugggccugguggaccuguucguguucagcaccagcuucuaccugaucagcaucuuccugcaccuggugaagauccccacccacagacacgugaucggcaagcccugccccaagccccacagacugaaccacaugggcaucugcagcugcggccuguacaagcaccccggcgugcccgugaaguggaagagaugaggacuagucccuguucccagagcccacuuuuuuuucuuuuuuugaaauaaaauagccugucuuucagaucucaaaggcucuuuucagagccaccaaaaaaaaaaaaaaaaaaaaaaaaaaaaaaaaaaaaaaaaaaaaaaaaaaaaaaaaaaaaaaaaaaaaaaaaaaaaaaaaaaaaaaaaaaaaaaaaaaaaa

SEQ ID NO: 40663 - RNA, 1764 nt, Artificial Sequence
  mRNA product Design a-2 (hSL-A100) comprising derived and/or modified sequence from LASV(LASV237-NIG-2010;Clade II)__AIT17638__GPCmut12 (opt4)
aggagaguccgcucagccagguugcagaagcggcuuagcguguguccuaaucuucucucugcguguagguaggccugugccgcaaacaagcuuaccaugggccagaucaucaccuucuuccaggaggugccccacgugaucgaggaggugaugaacaucgugcugaucgcccugagccugcuggccauccugaagggcaucuacaacguggccaccugcggccuguucggccuggugagcuuccugcugcugugcggcagaagcugcagcaccaccuacaagggcguguacgagcugcagacccuggagcuggacauggccagccugaacaugugcaugccccugagcugcaccaagaacaacagccaccacuacaucauggugggcaacgagaccggccuggagcugacccugaccaacaccagcaucaucaaccacaaguucugcaaccugagcgacgcccacaagaaggaccuguacgaccacgcccugaugagcaucaucagcaccuuccaccugagcauccccaacuucaaccaguacgaggccaugagcugcgacuucaacggcggcaagaucagcgugcaguacaaccugagccacaccuacgccguggacgccgccaaccacugcggcaccaucgccaacggcgugcugcagaccuucaugagaauggccuggggcggcagcuacaucgcccuggacagcggcaagggcagcugggacugcaucaugaccagcuaccaguaccugaucauccagaacaccaccugggaggaccacugccaguucagcagacccagccccaucggcuaccugggccugcugagccagagaaccagagacaucuacaucagcagaagacugcugggcaccuucaccuggacccugagcgacagcgagggcaacgagacccccggcggcuacugccugaccagauggaugcugaucgaggccgagcugaagugcuucggcaacaccgccguggccaagugcaacgagaagcacgacgaggaguucugcgacaugcugagacuguucgacuucugcaagcaggccaucagaagacugaagaccgaggcccagaugagcauccagcugaucaacaaggccgugaacgcccugaucaacgaccagcugaucaugaagaaccaccugagagacaucaugggcauccccuacugcaacuacagcaaguacugcuaccugaaccacaccgugaccggcaagaccagccugcccagaugcugccuggugagcaacggcagcuaccugaacgagacccacuucagcgacgacaucgagcagcaggccgacaacaugaucaccgagcugcugcagaaggaguacauggacagacagggcaagaccccccugggccugguggaccuguucguguucagcaccagcuucuaccugaucagcaucuuccugcaccugaucaagauccccacccacagacacaucaccggcaagcccugccccaagccccacagacugaaccacaugggcaucugcagcugcggccuguacaagcaccccggcgugcccgugaaguggaagagaugaggacuagucccuguucccagagcccacuuuuuuuucuuuuuuugaaauaaaauagccugucuuucagaucucaaaggcucuuuucagagccaccaaaaaaaaaaaaaaaaaaaaaaaaaaaaaaaaaaaaaaaaaaaaaaaaaaaaaaaaaaaaaaaaaaaaaaaaaaaaaaaaaaaaaaaaaaaaaaaaaaaaa

SEQ ID NO: 40664 - RNA, 1764 nt, Artificial Sequence
  mRNA product Design a-2 (hSL-A100) comprising derived and/or modified sequence from LASV(LASV253-NIG-2011;Clade II)__AIT17670__GPCmut12 (opt4)
aggagaguccgcucagccagguugcagaagcggcuuagcguguguccuaaucuucucucugcguguagguaggccugugccgcaaacaagcuuaccaugggccagaucaucaccuucuuccaggaggugccccacgugaucgaggaggugaugaacaucgugcugaucgcccugagccugcuggccauccugaagggcaucuacaacguggccaccugcggccuguucggccuggugagcuuccugcugcugugcggcagaagcugcagcaccaccuacaagggcguguacgagcugcagacccuggagcuggacauggccagccugaacaugugcaugccccugagcugcaccaagaacaacagccaccacuacaucauggugggcaacgagaccggccuggagcugacccugaccaacaccagcaucaucaaccacaaguucugcaaccugagcgacgcccacaagaagaaccuguacgaccacgcccugaugagcaucaucagcaccuuccaccugagcauccccaacuucaaccaguacgaggccaugagcugcgacuucaacggcggcaagaucagcgugcaguacaaccugagccacaccuacgccguggacgccgccaaccacugcggcaccaucgccaacggcgugcugcagaccuucaugagaauggccuggggcggcagcuacaucgcccuggacagcggcaagggcagcugggacugcaucaugaccagcuaccaguaccugaucauccagaacaccaccugggaggaccacugccaguucagcagacccagccccaucggcuaccugggccugcugagccagagaaccagagacaucuacaucagcagaagacugcugggcaccuucaccuggacccugagcgacagcgagggcaacgagacccccggcggcuacugccugaccagauggaugcugaucgaggccgagcugaagugcuucggcaacaccgccguggccaagugcaacgagaagcacgacgaggaguucugcgacaugcugagacuguucgacuucugcaagcaggccaucagaagacugaaggccgaggcccagaugagcauccagcugaucaacaaggccgugaacgcccugaucaacgaccagcugaucaugaagaaccaccugagagacaucaugggcauccccuacugcaacuacagcaaguacugcuaccugaaccacaccgugaccggcagaaccagccugcccagaugcugccuggugagcaacggcagcuaccugaacgagacccacuucagcgacgacaucgagcagcaggccgacaacaugaucaccgagcugcugcagaaggaguacaucgacagacagggcaagaccccccugggccugguggaccuguucguguucagcaccagcuucuaccugaucagcaucuuccugcaccuggugaagauccccacccacagacacaucaucggcaagcccugccccaagccccacagacugaaccacaugggcaucugcagcugcggccuguacaagcaccccggcgugcccgugaaguggaagagaugaggacuagucccuguucccagagcccacuuuuuuuucuuuuuuugaaauaaaauagccugucuuucagaucucaaaggcucuuuucagagccaccaaaaaaaaaaaaaaaaaaaaaaaaaaaaaaaaaaaaaaaaaaaaaaaaaaaaaaaaaaaaaaaaaaaaaaaaaaaaaaaaaaaaaaaaaaaaaaaaaaaaa

SEQ ID NO: 40665 - RNA, 1764 nt, Artificial Sequence
  mRNA product Design a-2 (hSL-A100) comprising derived and/or modified sequence from LASV(LASV254-NIG-2011;Clade II)__AIT17674__GPCmut12 (opt4)
aggagaguccgcucagccagguugcagaagcggcuuagcguguguccuaaucuucucucugcguguagguaggccugugccgcaaacaagcuuaccaugggccagaucaucaccuucuuccaggaggugccccacgugaucgaggaggugaugaacaucgugcugaucgcccugagccugcuggccauccugaagggcaucuacaacguggccaccugcggccuguucggccuggugagcuuccugcugcugugcggcagaagcugcagcaccaccuacaagggcguguacgagcugcagacccuggagcuggacaugaccaaccugaacaugugcaugccccugagcugcaccaagaacaacagccaccacuacaucauggugggcaacgagaccggccuggagcugacccugaccaacaccagcaucaucaaccacaaguucugcaaccugagcgacgcccacaagaagaaccuguacaaccacgcccugaugagcaucaucagcaccuuccaccugagcauccccaacuucaaccaguacgaggccaugagcugcgacuucaacggcggcaagaucagcgugcaguacaaccugagccacagcuacgccguggacgccgccaaccacugcggcaccaucgccaacggcgugcugcagaccuucaugagaauggccuggggcggcagcuacaucgcccuggacagcggcaagggcaacugggacugcaucaugaccagcuaccaguaccugaucauccagaacaccaccugggaggaccacugccaguucagcagacccagccccaucggcuaccugggccugcugagccagagaaccagagacaucuacaucagcagaagacugcugggcaccuucaccuggacccugagcgacagcgagggcaacgagacccccggcggcuacugccugaccagauggaugcugaucgaggccgagcugaagugcuucggcaacaccgccguggccaagugcaacgagaagcacgacgaggaguucugcgacaugcugagacuguucgacuucugcaagcaggccaucagaagacugaagaccgaggcccaggccaacauccagcugaucaacaaggccgugaacgcccugaucaacgaccagcugaucaugaagaaccaccugagagacaucaugggcauccccuacugcaacuacagcaaguacugcuaccugaaccacaccgugaccggcaagaccagccugcccagaugcugccuggugagcaacggcagcuaccugaacgagacccacuucagcgacgacaucgagcagcaggccgacaacaugaucaccgagcugcugcagaaggaguacauggacagacagggcaagaccccccugggccugguggaccuguucguguucagcaccagcuucuaccugaucagcaucuuccugcaccuggugaagauccccacccacagacacgugaucggcaagcccugccccaagccccacagacugaaccacaugggcaucugcagcugcggccuguacaagcaccccggcgugcccgugaaguggaagagaugaggacuagucccuguucccagagcccacuuuuuuuucuuuuuuugaaauaaaauagccugucuuucagaucucaaaggcucuuuucagagccaccaaaaaaaaaaaaaaaaaaaaaaaaaaaaaaaaaaaaaaaaaaaaaaaaaaaaaaaaaaaaaaaaaaaaaaaaaaaaaaaaaaaaaaaaaaaaaaaaaaaaa

SEQ ID NO: 40666 - RNA, 1764 nt, Artificial Sequence
  mRNA product Design a-2 (hSL-A100) comprising derived and/or modified sequence from LASV(Nig08-A19;Clade III)__ADU56618__GPCmut12 (opt4)
aggagaguccgcucagccagguugcagaagcggcuuagcguguguccuaaucuucucucugcguguagguaggccugugccgcaaacaagcuuaccaugggccagaucgugaccuucuuccaggaggugccccacgugaucgaggaggugaugaacaucgugcugaucgcccugagcauccuggccauccugaagggccuguacaacaucgccaccugcggccugaucggccuggugaccuuccugcugcugagcggcagaagcugcagcaugaccuacaagggcguguacgagcugcagacccuggagcugaacaugaacacccugaacaugugcaugccccugagcugcaccaagaacaacagccaccacuacaucauggugggcaacgagaccggccuggagcugacccugaccaacaccagccugcugcaccacaaguucugcaaccugagcgacgcccacaagaagaaccuguacgaccacacccugaugagcaucaucagcaccuuccaccugagcauccccaacuucaaccaguacgaggccaugagcugcgacuucaacggcggcaagaucaccgugcaguacaaccugagccacagcuacgccaucgacgccgccaaccacugcggcaccguggccaacggcgugcugcagaccuucaugagaauggccuggggcggcagcuacaucgcccuggacagcggcagaggcaagugggacugcaucaugaccagcuaccaguaccugaucauccagaacaccaccugggaggaccacugccaguucagcagacccagccccaucggcuaccugggccugcugagccagagaaccagagacaucuacaucagcagaagacugcugggcaccuucaccuggacccugagcgacagcgagggcaacgagacccccggcggcuacugccugaccagauggaugcugaucgaggccgagcugaagugcuucggcaacaccgccguggccaagugcaacgagaagcacgacgaggaguucugcgacaugcugagacuguucgacuucugcaagcaggccaucagaagacugaaggccgaggcccagaugagcauccagcugaucaacaaggccgugaacgcccugaucaacgaccagcugaucaugaagaaccaccugagagacaucaugggcauccccuacugcaacuacagcaaguacugcuaccugaaccacaccagcaccggcagaaccagccugcccagaugcugccuggugagcaacggcagcuaccugaacgagacccacuucagcgacgacaucgagcagcaggccgacaacaugaucaccgagaugcugcagaaggaguaccuggacagacagggcaagaccccccugggccugguggaccuguucguguucagcaccagcuucuaccugaucagcaucuuccugcaccuggugaagauccccacccacagacacaucgugggcaagcccugccccaagccccacagacugaaccacaugggcaucugcagcugcggccuguacaagcagcccggcgugcccgugagauggaagagaugaggacuagucccuguucccagagcccacuuuuuuuucuuuuuuugaaauaaaauagccugucuuucagaucucaaaggcucuuuucagagccaccaaaaaaaaaaaaaaaaaaaaaaaaaaaaaaaaaaaaaaaaaaaaaaaaaaaaaaaaaaaaaaaaaaaaaaaaaaaaaaaaaaaaaaaaaaaaaaaaaaaaa

SEQ ID NO: 40667 - RNA, 1767 nt, Artificial Sequence
  mRNA product Design a-2 (hSL-A100) comprising derived and/or modified sequence from LASV(G1180-SLE-2010;Clade IV)__AIT17168__GPCmut12 (opt4)
aggagaguccgcucagccagguugcagaagcggcuuagcguguguccuaaucuucucucugcguguagguaggccugugccgcaaacaagcuuaccaugggccagaucgugaccuucuuccaggaggugccccacgugaucgaggaggugaugaacaucgugcugaucgcccugagcauccuggccgugcugaagggccuguacaacuucgccaccugcggccuggugggccugcugaccuuccugcugcugugcggcagaagcugcaccgccagcagauacaagggcguguacgagcugcagacccuggagcugaacauggagacccugaacaugugcaugccccugagcugcaccaagaacaacagccaccacuacaucauggugggcaacgagaccggccuggagcugacccugaccaacaccagcaucaucaaccacaaguucugcaaccugagcgacgcccacaagaagaaccuguacgaccacgcccugaugagcaucaucagcaccuuccaccugagcauccccaacuucaaccaguacgaggccaugagcugcgacuucaacggcggcaagaucagcgugcaguacaaccugagccacagcuacgccggcgacgccgccaaccacugcggcaccguggccaacggcgugcugcagaccuucaugagaauggccuggggcggcagcuacaucgcccuggacagcggccacggcagcugggacugcaucaugaccagcuaccaguaccugaucauccagaacaccaccugggaggaccacugccaguucagcagacccagccccaucggcuaccugggccugcugagccagagaaccagagacaucuacaucagcagaagacugcugggcaccuucaccuggacccugagcgacagcgagggcaaggacacccccggcggcuacugccugaccagauggaugcugaucgaggccgagcugaagugcuucggcaacaccgccguggccaagugcaacgagaagcacgacgaggaguucugcgacaugcugagacuguucgacuucugcaagcaggccauccagagacugaaggccgaggcccagaugagcauccagcugaucaacaaggccgugaacgcccugaucaacgaccagcugaucaugaagaaccaccugagagacaucaugggcauccccuacugcaacuacagcaaguacugcuaccugaaccacaccaccaccggcaagaccagccugcccaagugcugccuggugagcaacggcagcuaccugaacgagacccacuucagcgacgacaucgagcagcaggccgacaacaugaucaccgagaugcugcagaaggaguacauggagagacagggcaagaccccccugggccugguggaccuguucguguucagcaccagcuucuaccugaucagcaucuuccugcaccuggugaagauccccacccacagacacaucgugggcaagagcugccccaagccccacagacugaaccacaugggcaucugcagcugcggccuguacaagcagcccggcgugcccgugaaguggaagagaugaggacuagucccuguucccagagcccacuuuuuuuucuuuuuuugaaauaaaauagccugucuuucagaucucaaaggcucuuuucagagccaccaaaaaaaaaaaaaaaaaaaaaaaaaaaaaaaaaaaaaaaaaaaaaaaaaaaaaaaaaaaaaaaaaaaaaaaaaaaaaaaaaaaaaaaaaaaaaaaaaaaaa

SEQ ID NO: 40668 - RNA, 1767 nt, Artificial Sequence
  mRNA product Design a-2 (hSL-A100) comprising derived and/or modified sequence from LASV(G1442-SLE-2011;Clade IV)__AIT17180__GPCmut12 (opt4)
aggagaguccgcucagccagguugcagaagcggcuuagcguguguccuaaucuucucucugcguguagguaggccugugccgcaaacaagcuuaccaugggccagaucgugaccuucuuccaggaggugccccacgugaucgaggaggugaugaacaucgugcugaucgcccugagcauccuggccgugcugaagggccuguacaacguggccaccugcggccugaucggccuggugaccuuccugcugcugugcggcagaagcugcaccaccacccuguacaagggcguguacgagcugcagacccuggagcugaacauggagacccugaacaugugcaugccccugagcugcaccaagaacaacagccaccacuacaucagagugggcaacgagaccggccuggagcugacccugaccaacaccagcaucaucaaccacaaguucugcaaccugagcgacgcccacaagaagaaccuguacgaccacgcccugaugagcaucaucagcaccuuccaccugagcauccccaacuucaaccaguacgaggccaugagcugcgacuucaacggcggcaagaucagcgugcaguacaaccugagccacagcuacgccggcgacgccgccaaccacugcggcaccguggccaacggcgugcugcagaccuucaugagaauggccuggggcggcagcuacaucgcccuggacagcggcagaggcaacugggacugcaucaugaccagcuaccaguaccugaucauccagaacaccaccugggacgaccacugccaguucagcagacccagccccaucggcuaccugggccugcugagccagagaaccagagacguguacaucagcagaagacugcugggcaccuucaccuggacccugagcgacagcgagggcaaggacacccccggcggcuacugccugaccagauggaugcugaucgaggccgagcugaagugcuucggcaacaccgccguggccaagugcaacgagaagcacgacgaggaguucugcgacaugcugagacuguucgacuucugcaagcaggccauccagagacugaaggccgaggcccagaugagcauccagcugaucaacaaggccgugaacgcccugaucaacgaccagcugaucaugaagaaccaccugagagacaucaugggcauccccuacugcaacuacagcaaguacugcuaccugaacaacaccgccaccggcaagaccagccugcccaagugcugccugaucagcaacggcagcuaccugaacgagacccacuucagcgacgacaucgagcaggaggccgacaacaugaucaccgagaugcugcagaaggaguacauggagagacagggcaagaccccccugggccugguggaccuguucguguucagcaccagcuucuaccugaucagcaucuuccugcaccuggugaagauccccacccacagacacaucgugggcaagagcugccccaagccccacagacugaaccacaugggcaucugcagcugcggccuguacaagcagcccggcgugcccgugagauggaagagaugaggacuagucccuguucccagagcccacuuuuuuuucuuuuuuugaaauaaaauagccugucuuucagaucucaaaggcucuuuucagagccaccaaaaaaaaaaaaaaaaaaaaaaaaaaaaaaaaaaaaaaaaaaaaaaaaaaaaaaaaaaaaaaaaaaaaaaaaaaaaaaaaaaaaaaaaaaaaaaaaaaaaa

SEQ ID NO: 40669 - RNA, 1767 nt, Artificial Sequence
  mRNA product Design a-2 (hSL-A100) comprising derived and/or modified sequence from LASV(G3010-SLE-2013;Clade IV)__AIT17344__GPCmut12 (opt4)
aggagaguccgcucagccagguugcagaagcggcuuagcguguguccuaaucuucucucugcguguagguaggccugugccgcaaacaagcuuaccaugggccagaucgugaccuucuuccaggaggugccccacgugaucgaggaggugaugaacaucgugcugaucgcccugagcauccuggccgugcugaagggccuguacaacuucgccaccugcggccuggugggccuggugaccuuccugcugcugugcggcagaagcugcaccaccagccuguacaagggcguguacgagcugcagacccuggagcugaacauggagacccugaacaugugcaugccccugagcugcaccaagaacaacagccaccacuacaucauggugggcaacgagaccggccuggagcugacccugaccaacaccagcaucaucaaccacaaguucugcaaccugagcgacgcccacaagaagaaccuguacaaccacgcccugaugagcaucaucagcaccuuccaccugagcauccccaacuucaaccaguacgaggccaugagcugcgacuucaacggcggcaagaucagcgugcaguacaaccugagccacagcuacgccggcgacgccgccagccacugcggcaccguggccaacggcgugcugcagaccuucaugagaauggccuggggcggcagcuacaucgcccuggacagcggcuacggcaagugggacugcaucaugaccagcuaccaguaccugaucauccagaacaccaccugggaggaccacugccaguucagcagacccagccccaucggcuaccugggccugcugagccagagaaccagagacaucuacaucagcagaagacugcugggcaccuucaccuggacccugagcgacagcgagggcaaggacacccccggcggcuacugccugaccagauggaugcugaucgaggccgagcugaagugcuucggcaacaccgccguggccaagugcaacgagaagcacgacgaggaguucugcgacaugcugagacuguucgacuucugcaagcaggccauccagagacugaagaccgaggcccagaugagcauccagcugaucaacaaggccgugaacgcccugaucaacgaccagcugaucaugaagaaccaccugagagacaucaugggcauccccuacugcaacuacagcaaguacugcuaccugaaccacaccaccaccggcaagaccagccugcccaagugcugccuggugagcaacggcagcuaccugaacgagacccacuucagcgacgacaucgagcagcaggccgacaacaugaucaccgagaugcugcagaaggaguacauggagagacagggcaagaccccccugggccugguggaccuguucguguucagcaccagcuucuaccugaucagcaucuuccugcaccuggugaagauccccacccacagacacaucgugggcaagagcugccccaagccccacagacugaaccacaugggcaucugcagcugcggccuguacaagcagcccggcgugcccgugagauggaagagaugaggacuagucccuguucccagagcccacuuuuuuuucuuuuuuugaaauaaaauagccugucuuucagaucucaaaggcucuuuucagagccaccaaaaaaaaaaaaaaaaaaaaaaaaaaaaaaaaaaaaaaaaaaaaaaaaaaaaaaaaaaaaaaaaaaaaaaaaaaaaaaaaaaaaaaaaaaaaaaaaaaaaa

SEQ ID NO: 40670 - RNA, 1767 nt, Artificial Sequence
  mRNA product Design a-2 (hSL-A100) comprising derived and/or modified sequence from LASV(G502-SLE-2009;Clade IV)__AIT17126__GPCmut12 (opt4)
aggagaguccgcucagccagguugcagaagcggcuuagcguguguccuaaucuucucucugcguguagguaggccugugccgcaaacaagcuuaccaugggccagaucgugaccuucuuccaggaggugccccacgugaucgaggaggugaugaacaucgugcugaucgcccugagcauccuggccgugcugaagggccuguacaacuucgccaccugcggccuggugggccugcugaccuuccugcugcugugcggcagaagcugcaccaccggccuguacaagggcguguacgagcugcagacccuggagcugaacauggagacccugaacaugugcaugccccugagcugcaccaagaacaacagccaccacuacaucauggugggcaacgagaccggccuggagcugacccugaccaacaccagcaucaucaaccacaaguucugcaaccugagcgacgcccacaagaagaaccuguacgaccacgcccugaugagcaucaucagcaccuuccaccugagcauccccaacuucaaccaguacgaggccaugagcugcgacuucaacggcggcaagaucagcgugcaguacaaccugagccacagcuacgccggcgacgccgccgaccacugcggcaccguggccaacggcgugcugcagaccuucaugagaauggccuggggcggcagcuacaucgcccuggacagcggcagaggcagaugggacugcaucaugaccagcuaccaguaccugaucauccagaacaccaccugggaggaccacugccaguucagcagacccagccccaucggcuaccugggccugcugagccagagaaccagagacaucuacaucagcagaagacugcugggcaccuucaccuggacccugagcgacagcgagggcaaggacacccccggcggcuacugccugaccagauggaugcugaucgaggccgagcugaagugcuucggcaacaccgccguggccaagugcaacgagaagcacgacgaggaguucugcgacaugcugagacuguucgacuucugcaagcaggccauccagagacugaaggccgaggcccagaugagcauccagcugaucaacaaggccgugaacgcccugaucaacgaccagcuggugaugaagaaccaccugagagacaucaugggcauccccuacugcaacuacagcagauacugcuaccugaaccacaccaccaccggcagaaccagccugcccaagugcugccuggugagcaacggcagcuaccugaacgagacccacuucagcgacgacaucgagcagcaggccgacaacaugaucaccgagaugcugcagaaggaguacauggagagacagggcaagaccccccugggccugguggaccuguucguguucagcaccagcuucuaccugaucagcaucuuccugcaccuggugaagauccccacccacagacacaucgugggcaagagcugccccaagccccacagacugaaccacaugggcaucugcagcugcggccuguacaagcagcccggcgugcccgugaaguggaagagaugaggacuagucccuguucccagagcccacuuuuuuuucuuuuuuugaaauaaaauagccugucuuucagaucucaaaggcucuuuucagagccaccaaaaaaaaaaaaaaaaaaaaaaaaaaaaaaaaaaaaaaaaaaaaaaaaaaaaaaaaaaaaaaaaaaaaaaaaaaaaaaaaaaaaaaaaaaaaaaaaaaaaa

SEQ ID NO: 40671 - RNA, 1767 nt, Artificial Sequence
  mRNA product Design a-2 (hSL-A100) comprising derived and/or modified sequence from LASV(G733-SLE-2010;Clade IV)__AIT17154__GPCmut12 (opt4)
aggagaguccgcucagccagguugcagaagcggcuuagcguguguccuaaucuucucucugcguguagguaggccugugccgcaaacaagcuuaccaugggccagaucgugaccuucuuccaggaggugccccacgugaucgaggaggugaugaacaucgugcugaucgcccugagcauccuggccgugcugaagggccuguacaacuucgccaccugcggcaucgugggccuggugagcuuccugcugcugugcggcagaagcugcaccaccagccuguacaagggcguguacgagcugcagacccuggagcugaacauggagacccugaacaugugcaugccccugagcugcaccaagaacaacagccaccacuacaucauggugggcaacgagaccggccuggagcugacccugaccaacaccagcaucaucaaccacaaguucugcaaccugagcgacgcccacaagaagaaccuguacgaccacgcccugaugagcaucaucagcaccuuccaccugagcauccccaacuucaaccaguacgaggccaugagcugcgacuucaacggcggcaagaucagcgugcaguacaaccugagccacagcuacgccggcgacgccgccaaccacugcggcaccaucgccaacggcgugcugcagaccuucaugagaauggccuggggcggcagcuacaucgcccuggacagcggcagagacagaugggacugcaucaugaccagcuaccaguaccugaucauccagaacaccaccugggaggaccacugccaguucagcagacccagccccaucggcuaccugggccugcugagccagagaaccagagacaucuacaucagcagaagacugcugggcaccuucaccuggacccugagcgacagcgagggcaaggacacccccggcggcuacugccugaccagauggaugcugaucgaggccgagcugaagugcuucggcaacaccgccguggccaagugcaacgagaagcacgacgaggaguucugcgacaugcugagacuguucgacuucugcaagcaggccauccagagacugaaggccgaggcccagaugagcauccagcugaucaacaaggccgugaacgcccugaucaacgaccagcugaucaugaagaaccaccugagagacaucaugggcauccccuacugcaacuacagcaaguacugcuaccugaaccacaccaccaccggcaagaccagccugcccaagugcugccuggugagcaacggcagcuaccugaacgagacccacuucagcgacgacaucgagcagcaggccgacaacaugaucaccgagaugcugcagaaggaguacauggagagacagggcaagaccccccugggccugguggaccuguucguguucagcaccagcuucuaccugaucagcaucuuccugcaccuggugaagauccccacccacagacacguggugggcaagagcugccccaagccccacagacugaaccacaugggcaucugcagcugcggccuguacggccagcccggcgugcccgugaaguggaagagaugaggacuagucccuguucccagagcccacuuuuuuuucuuuuuuugaaauaaaauagccugucuuucagaucucaaaggcucuuuucagagccaccaaaaaaaaaaaaaaaaaaaaaaaaaaaaaaaaaaaaaaaaaaaaaaaaaaaaaaaaaaaaaaaaaaaaaaaaaaaaaaaaaaaaaaaaaaaaaaaaaaaaa

SEQ ID NO: 40672 - RNA, 1767 nt, Artificial Sequence
  mRNA product Design a-2 (hSL-A100) comprising derived and/or modified sequence from MOPV/LASV reassortant(IGS-1;Clade IV)__AFY05576__GPCmut12 (opt4)
aggagaguccgcucagccagguugcagaagcggcuuagcguguguccuaaucuucucucugcguguagguaggccugugccgcaaacaagcuuaccaugggccagaucgugaccuucuuccaggaggugccccacgugaucgaggaggugaugaacaucgugcugaucgcccugagcgugcuggccgugcugaagggccuguacaacuucgccaccugcggccuggugggccuggugaccuuccugcugcugugcggcagaagcugcaccaccagccuguacaagggcguguacgagcugcagacccuggagcugaacauggagacccugaacaugugcaugccccugagcugcaccaagaacaacagccaccacuacaucauggugggcaacgagaccggccuggagcugacccugaccaacaccagcaucaucaaccacaaguucugcaaccugagcgacgcccacaagaagaaccuguacgaccacgcccugaugagcaucaucagcaccuuccaccugagcauccccaacuucaaccaguacgaggccaugagcugcgacuucaacggcggcaagaucagcgugcaguacaaccugagccacagcuacgccggcgacgccgccaaccacugcggcaccguggccaacggcgugcugcagaccuucaugagaauggccuggggcggcagcuacaucgcccuggacagcggcagaggcaacugggacugcaucaugaccagcuaccaguaccugaucauccagaacaccaccugggaggaccacugccaguucagcagacccagccccaucggcuaccugggccugcugagccagagaaccagagacaucuacaucagcagaagacugcugggcaccuucaccuggacccugagcgacagcgagggcgaggacacccccggcggcuacugccugaccagauggaugcugaucgaggccgagcugaagugcuucggcaacaccgccguggccaagugcaacgagaagcacgacgaggaguucugcgacaugcugagacuguucgacuucugcaagcaggccauccagagacugaaggccgaggcccagaugagcauccagcugaucaacaaggccgugaacgcccugaucaacgaccagcugaucaugaagaaccaccugagagacaucaugggcauccccuacugcaacuacagcaaguacugcuaccugaaccacaccaccaccggcagaaccagccugcccaagugcugccuggugagcaacggcagcuaccugaacgagacccacuucagcgacgacaucgagcagcaggccgacaacaugaucaccgagaugcugcagaaggaguacauggagagacagggcaagaccccccugggccugguggaccuguucguguucagcaccagcuucuaccugaucagcaucuuccugcaccuggugaagauccccacccacagacacaucgugggcaagagcugccccaagccccacagacugaaccacaugggcaucugcagcugcggccuguacaagcagcccggcgugcccgugaaguggaagagaugaggacuagucccuguucccagagcccacuuuuuuuucuuuuuuugaaauaaaauagccugucuuucagaucucaaaggcucuuuucagagccaccaaaaaaaaaaaaaaaaaaaaaaaaaaaaaaaaaaaaaaaaaaaaaaaaaaaaaaaaaaaaaaaaaaaaaaaaaaaaaaaaaaaaaaaaaaaaaaaaaaaaa

SEQ ID NO: 40673 - RNA, 1767 nt, Artificial Sequence
  mRNA product Design a-2 (hSL-A100) comprising derived and/or modified sequence from LASV(LM765-SLE-2012;Clade IV)__AIT17814__GPCmut12 (opt4)
aggagaguccgcucagccagguugcagaagcggcuuagcguguguccuaaucuucucucugcguguagguaggccugugccgcaaacaagcuuaccaugggccagaucgugaccuucuuccaggaggugccccacgugaucgaggaggugaugaacaucgugcugaucgcccugagcauccuggccgugcugaagggccuguacaacuucgccaccugcggccuggugggccuggugaccuuccugcugcugugcggcagaagcugcaccaccagccuguacaagggcguguacgagcugcagacccuggagcugaacauggagacccugaacaugugcaugccccugagcugcaccaagaacaacagccaccacuacaucauggugggcaacgagaccggccuggagcugacccugaccaacaccagcaucaucgaccacaaguucugcaaccugagcgacgcccacagaaagaaccuguacgaccacgcccugaugagcaucaucagcaccuuccaccugagcauccccaacuucaaccaguacgaggccaugagcugcgacuucaacggcggcaagaucagcgugcaguacaaccugagccacagcuacgccaaggacgccgccgaccacugcggcaccguggccaacggcgugcugcagaccuucaugagaauggccuggggcggcagcuacaucgcccuggacagcggcagaggcagaugggacugcaucaugaccagcuaccaguaccugaucauccagaacaccaccugggaggaccacugccaguucagcagacccagccccaucggcuaccugggccugcugagccagagaaccagagacaucuacaucagcagaagacugcugggcaccuucaccuggacccugagcgacagcgagggcaaggacacccccggcggcuacugccugaccagauggaugcugaucgaggccgagcugaagugcuucggcaacaccgccguggccaagugcaacgagaagcacgacgaggaguucugcgacaugcugagacuguucgacuucugcaagcaggccauccagagacugaaggccgaggcccagaugagcauccagcugaucaacaaggccgugaacgcccugaucaacgaccagcugaucaugaagaaccaccugagagacaucaugggcauccccuacugcaacuacagcaaguacugcuaccugaaccacaccaccaccggcaagaccagccugcccaagugcugccuggugagcaacggcagcuaccugaacgagacccacuucagcgacgacaucgagcagcaggccgacaacaugaucaccgagaugcugcagaaggaguacauggagagacagggcaagaccccccugggccugguggaccuguucguguucagcaccagcuucuaccugaucagcaucuuccugcaccuggugaagauccccacccacagacacaucgugggcaagcccugccccaagccccacagacugaaccacaugggcaucugcagcugcggccuguacaagcagcccggcgugcccgugaaguggaagagaugaggacuagucccuguucccagagcccacuuuuuuuucuuuuuuugaaauaaaauagccugucuuucagaucucaaaggcucuuuucagagccaccaaaaaaaaaaaaaaaaaaaaaaaaaaaaaaaaaaaaaaaaaaaaaaaaaaaaaaaaaaaaaaaaaaaaaaaaaaaaaaaaaaaaaaaaaaaaaaaaaaaaa

SEQ ID NO: 40674 - RNA, 1767 nt, Artificial Sequence
  mRNA product Design a-2 (hSL-A100) comprising derived and/or modified sequence from LASV(LM776-SLE-2012;Clade IV)__AIT17824__GPCmut12 (opt4)
aggagaguccgcucagccagguugcagaagcggcuuagcguguguccuaaucuucucucugcguguagguaggccugugccgcaaacaagcuuaccaugggccagaucgugaccuucuuccaggaggugccccacgugaucgaggaggugaugaacaucgugcugaucgcccugagcauccuggccgugcugaagggccuguacaacuucgccaccugcggccuggugggccuggugaccuuccugcugcugugcggcagaagcugcaccaccagcguguacaagggcguguacgagcugcagacccuggagcugaacauggagacccugaacaugugcaugccccugagcugcaccaagaacaacagccaccacuacaucauggugggcaacgagaccggccuggagcugacccugaccaacaccagcaucaucaaccacaaguucugcaaccugagcgacgcccacaagaagaaccuguacgaccacgcccugaugagcaucaucagcaccuuccaccugagcauccccaacuucaaccaguacgaggccaugagcugcgacuucaacggcggcaagaucagcgugcaguacaaccugagccacagcuacgccggcgacgccgccaaccacugcggcaccguggccaacggcgugcugcagaccuucaugagaauggccuggggcggcagcuacaucgcccuggacagcggccacggcaagugggacugcaucaugaccagcuaccaguaccugaucauccagaacaccaccugggaggaccacugccaguucagcagacccagccccaucggcuaccugggccugcugagccagagaaccagagacaucuacaucagcagaagacugcugggcaccuucaccuggacccugagcgacagcgagggcaaggacacccccggcggcuacugccugaccagauggaugcugaucgaggccgagcugaagugcuucggcaacaccgccguggccaagugcaacgagaagcacgacgaggaguucugcgacaugcugagacuguucgacuucugcaagcaggccauccagagacugaaggccgaggcccagaugagcauccagcugaucaacaaggccgugaacgcccugaucaacgaccagcugaucaugaagaaccaccugagagacaucaugggcauccccuacugcaacuacagcaaguacugcuaccugaaccacaccaccaccggcaagaccagccugcccaagugcugccuggugagcaacggcagcuaccugaacgagacccacuucagcgacgacaucgagcagcaggccgacaacaugaucaccgagaugcugcagaaggaguacauggagagacagggcaagaccccccugggccugguggaccuguucguguucagcaccagcuucuaccugaucagcaucuuccugcaccuggugaagauccccacccacagacacaucgugggcaagagcugccccaagccccacagacugaaccacaugggcaucugcagcugcggccuguacaagcagcccggcgugcccgugagauggaagagaugaggacuagucccuguucccagagcccacuuuuuuuucuuuuuuugaaauaaaauagccugucuuucagaucucaaaggcucuuuucagagccaccaaaaaaaaaaaaaaaaaaaaaaaaaaaaaaaaaaaaaaaaaaaaaaaaaaaaaaaaaaaaaaaaaaaaaaaaaaaaaaaaaaaaaaaaaaaaaaaaaaaaa

SEQ ID NO: 40675 - RNA, 1767 nt, Artificial Sequence
  mRNA product Design a-2 (hSL-A100) comprising derived and/or modified sequence from LASV(Mad39;Clade IV)__ANH09722__GPCmut12 (opt4)
aggagaguccgcucagccagguugcagaagcggcuuagcguguguccuaaucuucucucugcguguagguaggccugugccgcaaacaagcuuaccaugggccagaucgugaccuucuuccaggaggugccccacgugaucgaggaggugaugaacaucgugcugaucgcccugagcauccuggccgugcugaagggccuguacaacguggccaccugcggccugaucggccuggugaccuuccugcugcugugcggcagaagcugcaccaccacccuguacaagggcguguacgagcugcaggcccuggagcugaacauggagacccugaacaugugcaugccccugagcugcaccaagaacaacagccaccacuacaucagagugggcaacgagaccggccuggagcugacccugaccaacaccagccugaucaaccacaaguucugcaaccugagcgacgcccacaagaagaaccuguacgaccacgcccugaugagcaucaucagcaccuuccaccugagcauccccaacuucaaccaguacgaggccaugagcugcgacuucaacgacggcaagaucagcgugcaguacaaccugagccacaccuacgccggcgacaccgccaaccacugcggcaccguggccaacggcgugcugcagaccuucaugagaauggccuggggcggcagcuacaucgcccuggacagcggcagaggcggcugggacugcaucaugaccagcuaccaguaccugaucauccagaacaccaccugggaggaccacugccaguucagcagacccagccccaucggcuaccugggccugcugagccagagaaccagagacaucuacaucagcagaagacugcugggcaccuucaccuggacccugagcgacagcgagggcaaggacacccccggcggcuacugccugaccagauggaugcugaucgaggccgagcugaagugcuucggcaacaccgccguggccaagugcaacgagaagcacgacgaggaguucugcgacaugcugagacuguucgacuucugcaagcaggccauccagagacugaaggccgaggcccagaugagcauccagcugaucaacaaggccgugaacgcccugaucaacgaccagcugaucaugaagaaccaccugagagacaucaugggcauccccuacugcaacuacagcaaguacugcuaccugaaccacaccgugaccggcaagaccagccugcccaagugcugccuggugagcaacggcagcuaccugaacgagacccacuucagcgacgacaucgagcagcaggccgacaacaugaucaccgagaugcugcagaaggaguacauggagagacagggcaagaccccccugggccugguggaccuguucguguucagcaccagcuucuaccugaucagcaucuuccugcaccuggugaagauccccacccacagacacguggugggcaagcccugccccaagccccacagacugaaccacaugggcaucugcagcugcggcuucuacaagcagcccggcgugcccgugagauggaagagaugaggacuagucccuguucccagagcccacuuuuuuuucuuuuuuugaaauaaaauagccugucuuucagaucucaaaggcucuuuucagagccaccaaaaaaaaaaaaaaaaaaaaaaaaaaaaaaaaaaaaaaaaaaaaaaaaaaaaaaaaaaaaaaaaaaaaaaaaaaaaaaaaaaaaaaaaaaaaaaaaaaaaa

SEQ ID NO: 40676 - RNA, 1767 nt, Artificial Sequence
  mRNA product Design a-2 (hSL-A100) comprising derived and/or modified sequence from LASV(Z0947-SLE-2011;Clade IV)__AIT17840__GPCmut12 (opt4)
aggagaguccgcucagccagguugcagaagcggcuuagcguguguccuaaucuucucucugcguguagguaggccugugccgcaaacaagcuuaccaugggccagaucgugaccuucuuccaggaggugccccacgugaucgaggaggugaugaacaucgugcugaucgcccugagcauccuggccgugcugaagggccuguacaacuucgccaccugcggccuggugggccuggugaccuuccugcugcugugcggcagaagcugcaccaucagccuguacaagggcguguacgagcugcagacccuggagcugaacauggagacccugaacaugugcaugccccugagcugcaccaagaacaacagccaccacuacaucauggugggcaacgagaccggccuggagcugacccugaccaacaccagcaucaucaaccacaaguucugcaaccugagcgacgcccacaagaagaaccuguacgaccacgcccugaugagcaucaucagcaccuuccaccugagcauccccaacuucaaccaguacgaggccaugagcugcgacuucaacggcggcaagaucagcgugcaguacaaccugagccacagcuacgccggcgacgccgccaaccacugcggcaccguggccaacggcgugcugcagaccuucaugagaauggccuggggcggcagcuacaucgcccuggacagcggcagagacagaugggacugcaucaugaccagcuaccaguaccugaucauccagaacaccaccugggaggaccacugccaguucagcagacccagccccaucggcuaccugggccugcugagccagagaaccagagacaucuacaucagcagaagacugcugggcaccuucaccuggacccugagcgacagcgagggcaaggacacccccggcggcuacugccugaccagauggaugcugaucgaggccgagcugaagugcuucggcaacaccgccguggccaagugcaacgagaagcacgacgaggaguucugcgacaugcugagacuguucgacuucugcaagcaggccauccagagacugaaggccgaggcccagaugagcauccagcugaucaacaaggccgugaacgcccugaucaacgaccagcugaucaugaagaaccaccugagagacaucaugggcauccccuacugcaacuacagcaaguacugcuaccugaaccacaccaccaccggcaagaccagccugcccaagugcugccuggugagcaacggcagcuaccugaacgagacccacuucagcgacgacaucgagcagcaggccgacaacaugaucaccgagaugcugcagaaggaguacauggagagacagggcaagaccccccugggccugguggaccuguucguguucagcaccagcuucuaccugaucagcaucuuccugcaccuggugaagauccccacccacagacacaucgugggcaagcccugccccaagccccacagacugaaccacaugggcaucugcagcugcggccuguacaagcagcccggcgugcccgugaaguggaagagaugaggacuagucccuguucccagagcccacuuuuuuuucuuuuuuugaaauaaaauagccugucuuucagaucucaaaggcucuuuucagagccaccaaaaaaaaaaaaaaaaaaaaaaaaaaaaaaaaaaaaaaaaaaaaaaaaaaaaaaaaaaaaaaaaaaaaaaaaaaaaaaaaaaaaaaaaaaaaaaaaaaaaa

SEQ ID NO: 40677 - RNA, 1767 nt, Artificial Sequence
  mRNA product Design a-2 (hSL-A100) comprising derived and/or modified sequence from LASV(Josiah;Clade IV)__NP_694870__GPCmut12 (opt5)
aggagaguccgcucagccagguugcagaagcggcuuagcguguguccuaaucuucucucugcguguagguaggccugugccgcaaacaagcuuaccaugggccagaucgugaccuucuuucaagaggucccccacguuauugaagaggugaugaacaucgugcugauugcccucagcguccuggcugugcuuaaggggcuguacaauuucgccacaugcggacucguuggccuggugacguuucuucugcucugugggagauccugcaccacaucucuguauaaaggagucuacgaacugcagacccucgagcugaacauggaaacacuuaauauguguaugccucugagcugcaccaagaacaauucccaucacuauaucauggugggcaacgagacagggcucgagcugacccuuacgaauaccucuauuaucaaccauaaauucuguaaucugagcgacgcgcacaagaaaaaccucuacgaucaugcucugauguccaucauuucuacauuucaccugagcaucccgaauuucaaccaguaugaagccauguccugcgacuuuaauggaggcaagauuagcguucaguacaaccucucucacuccuaugccggcgaugcugccaaucauugugggaccguggcuaacggaguccugcaaacauucaugcggauggccuggggcgggagcuacaucgcgcuugacucuggacgcggcaacugggauugcauuaugaccuccuaccaguaucugaucauucagaauacgacaugggaggaccacugucaguuuagcagacccucuccuaucggguaccucggacugcuuucccaacggacccgcgauaucuauauuagcagacggcugcucggcacauucaccuggacccuguccgacucugaaggcaaggauacacccgggggauacugccugacgcgcuggaugcucaucgaggccgagcugaaauguuuuggcaacaccgcuguggccaagugcaaugaaaaacaugacgaggaguucugcgauaugcuuagacuguuugacuucuguaagcaggcuauucagcggcucaaagccgaagcgcagaugagcauccaacugauuaacaaggccgugaaugcucuuaucaacgaucagcugaucaugaagaaucaccuccgcgacauuauggggaucccuuauugcaacuacuccaaauauuguuaccugaaucacacaaccacaggaagaaccagccugcccaagugcugucucgucucuaacggcuccuaccugaaugaaacgcauuucagcgacgauauugagcagcaagccgacaacaugaucacagagaugcuucagaaagaauauauggagcggcaggggaagaccccucugggacucguugaucuguuuguguucucuaccagcuuuuaccugauuuccaucuuccuucaccucgugaaaaucccgacacaucgccacauugucggcaagucuugccccaaaccucauagacugaaucacaugggcaucuguagcugcgggcuguauaagcagcccggagugccuguuaaguggaaacggugaggacuagucccuguucccagagcccacuuuuuuuucuuuuuuugaaauaaaauagccugucuuucagaucucaaaggcucuuuucagagccaccaaaaaaaaaaaaaaaaaaaaaaaaaaaaaaaaaaaaaaaaaaaaaaaaaaaaaaaaaaaaaaaaaaaaaaaaaaaaaaaaaaaaaaaaaaaaaaaaaaaaa

SEQ ID NO: 40678 - RNA, 1764 nt, Artificial Sequence
  mRNA product Design a-2 (hSL-A100) comprising derived and/or modified sequence from LASV(LP;Clade I)__AAF86701__GPCmut12 (opt5)
aggagaguccgcucagccagguugcagaagcggcuuagcguguguccuaaucuucucucugcguguagguaggccugugccgcaaacaagcuuaccaugggccagaucauuaccuucuuucaagaggugccccacgucaucgaagagguuaugaacauugugcugaucgcccucagccugcuugcuauucugaaggggcucuacaauaucgccacaugcggaaucauuggccugguggcguuccuuuuucugugugggaaauccugcucucucacgcugaagggaggcuaugaacugcagacccucgagcugaacauggaaacacuuaauauguguaugccucugagcugcaccaaaaacuccucucaucacuacaucagagucgggaaugagacaggacucgagcugacccuuacaaacaccagcauuaucaaucauaaguucuguaaccuguccgacgcucacaaaaagaaucucuaugaucaugcccugaugucuauuaucagcacguuucaccuguccauuccgaacuucaaucaguacgaagccaugagcugcgacuuuaacggcggcaagaucucugugcaguauaaucucucccacagcuacgcuggggaugccgcugagcauuguggaaccguugccaacggcgugcugcaaacauucaugcggauggcguggggagggcgcuauaucgcccuugacucuggcaaagggaauugggauugcauuaugaccuccuaccaguaccugaucauucagaacacaaccugggaagaccacugucaguuuagcagacccucuccuaucggauaucucggccugcuuucccaacggacgcgcgauauuuacaucagcagacggcugcucggcacauucaccuggacacuguccgacucugaggggaacgagacccccggaggcuauugccugacccgcuggaugcucaucgaagcugagcugaaguguuuugggaauacagccgucgcuaaaugcaacgaaaagcaugaugaggaguucugcgacaugcuuagacuguuugauuucuguaaacaggccauucggcgccucaaggcggaagcccagaugagcauccagcugauuaauaaggcugugaacgcccuuaucaaugaccaacugauuaugaaaaaccaccucagagauaucaugggaaucccuuacugcaauuauuccaaguacuguuaucugaaccacacgagcucuggccggaccucccugcccaaaugcugucucauuagcaaugggucuuaccugaacgagacacaguucagcgacgacaucgaacagcaagcugauaauaugauuaccgagaugcuucagaaggaauacaucgagcgccagggaaaaacaccucugggccucguugacauuuuuaucuucuccaccucuuuuuaucugauuagcaucuuccugcaucuuaucaagauuccgacgcacagacauaucgugggcaaacccugcccuaagccccaccggcucaaccauaugggggucuguuccugcggacuguacaagcacccuggcgugcccacaaaauggaagcgcugaggacuagucccuguucccagagcccacuuuuuuuucuuuuuuugaaauaaaauagccugucuuucagaucucaaaggcucuuuucagagccaccaaaaaaaaaaaaaaaaaaaaaaaaaaaaaaaaaaaaaaaaaaaaaaaaaaaaaaaaaaaaaaaaaaaaaaaaaaaaaaaaaaaaaaaaaaaaaaaaaaaaa

SEQ ID NO: 40679 - RNA, 1764 nt, Artificial Sequence
  mRNA product Design a-2 (hSL-A100) comprising derived and/or modified sequence from LASV(803213;Clade II)__AAF86703__GPCmut12 (opt5)
aggagaguccgcucagccagguugcagaagcggcuuagcguguguccuaaucuucucucugcguguagguaggccugugccgcaaacaagcuuaccaugggccagaucauuaccuucuuucaagaggugccccacgucaucgaagagguuaugaacauugugcugaucgcccucagccugcuugcuauucugaaggggaucuacaauguggccacaugcggacucuucggccugaucuccuuucuucugcucugugggagaucuugcagcgucacguauaaaggaguguacgaacugcagacccuggagcucaacauggcgaaucugaacauguguaugccucuuuccugcacaaagaauaacucucaucacuauauuaugguuggcaaugaaaccgggcuggagcucacacugaccaacacaagcaucauuaaucauaaauucuguaaccuuuccgacgcucacaagaaaaaucuguacgaucaugcccucaugucuaucauuagcaccuuucaccuguccaucccgaacuucaaucaguaugaggccaugagcugcgacuuuaacggaggcaagauuucugugcaguacaaucugucccacagcuucgcugucgaugccgcuaaccauuguggcacgaucgccaacggggugcuccaaaccuuuaugcggauggcguggggaggcucuuauaucgcccuggacuccgggaagggaaauugggauugcauuaugacaagcuaccaguaccuuaucauucagaacaccacaugggaagaccacugucaguucucucgccccuccccuaucggcuaucuggggcuccugagccaaagaacccgggauauuuacaucucccgcagacuucugggaacguuuacauggacccucucugacagcgagggcaaugaagcucccggcggguauugccugacacgguggaugcugaucgaggccgagcucaaauguuucggaaacaccgcuguugccaagugcaaugaaaaacaugaugaggaauuuugcgacaugcugcgccuuuucgauuucuguaagcaggcgauuaaaagacugaagaccgaggcccagauguccauccagcucauuaacaaggcugugaaugcccugaucaacgaccaacuuauuaugaaaaaucaucugcgggauaucaugggcaucccuuacugcaacuauagccgcuacuguuaucucaaucacacagucacggggaagaccucucugcccagaugcugucugguguccaacggaagcuaccucaaugaaacacacuuuucugacgacauugagcagcaggcugauaacaugaucaccgagaugcugcaaaaagaauacauggaccggcagggcaagacaccucuugggcugguggaucucuucgucuuuagcaccuccuucuaucugauuucuaucuuucugcaccuuguuaaaauuccgacgcaucgccacaucgugggaaagcccugcccuaaaccccauagacucaaucacaugggcauuuguagcugcggccuguacaagcacccuggggugcccgucaaguggaaacggugaggacuagucccuguucccagagcccacuuuuuuuucuuuuuuugaaauaaaauagccugucuuucagaucucaaaggcucuuuucagagccaccaaaaaaaaaaaaaaaaaaaaaaaaaaaaaaaaaaaaaaaaaaaaaaaaaaaaaaaaaaaaaaaaaaaaaaaaaaaaaaaaaaaaaaaaaaaaaaaaaaaaa

SEQ ID NO: 40680 - RNA, 1764 nt, Artificial Sequence
  mRNA product Design a-2 (hSL-A100) comprising derived and/or modified sequence from LASV(GA391;Clade III)__CAA36645__GPCmut12 (opt5)
aggagaguccgcucagccagguugcagaagcggcuuagcguguguccuaaucuucucucugcguguagguaggccugugccgcaaacaagcuuaccaugggccagaucgugaccuucuuucaagaggucccccacguuauugaagaggugaugaacaucgugcugauugcccucagcauccuggcuauucuuaaggggcuguacaaugucgccacaugcggacucaucggccuggugacguuccuucugcucuccgggagaucuuguagccugaucuauaaaggaaccuacgaacugcagacacucgagcugaacauggaaacccuuaauaugugcaugccucuguccuguacaaagaacaauucucaucacuauauucggguuggcaacgagaccgggcucgagcugacacuuaccaauacgagcauccugaaccauaaauuuugcaaucucuccgacgcgcacaagcgcaaccuguacgaucauucucugaugagcauuaucuccaccuuccaccucagcauuccgaauuuuaaccaguaugaagcuaugucuugugacuucaauggaggcaaaaucacagugcaguacaaccugucccacagcuuugccgucgaugccgcuggccauugcgggacccuugccaauggagugcugcaaacauucaugagaauggcuuggggcgggucuuauauugcccucgacuccggacggggcaacugggauuguaucaugaccagcuaccaguaccugaucauucagaacacgacaugggacgaucacugccaguuuucucgccccuccccuaucggguaucuuggacugcucagccaaagaacccgggacauuuacaucucccgcagacugcugggcacauucaccuggacccucucugauagcgagggcaaugaaacacccgggggauauugucugacgcgguggaugcuuauugaggcggagcugaagugcuuuggcaacaccgccguugcuaaguguaaugaaaaacaugacgaggaguucugcgauaugcuccgccuguuugacuucugcaagcaggccaucagacggcuuaaaacagaagcucagauguccauccagcugauuaacaaggccgugaaugcgcucaucaacgaucaacugauuaugaaaaaucaucugcgcgacaucauggggauuccuuacuguaacuauagcagauacugcuaucucaaucacaccucuacaggaaagaccucccugccccgguguugccuuaucagcaacggcucuuaccugaaugaaacgaaguucagcgacgauaucgagcagcaggccgacaacaugauuacagagaugcuccaaaaagaauacaucgaucgccaggggaagaccccucugggacuggucgaccuuuuuguguucuccaccucuuuuuaucucauuagcaucuuccugcaccuggugaaaauuccgacacacagacauaucgucggcaagcccuguccuaaaccccaccggcucaaucauaugggcauuugcuccugugggcuguacaagcagccuggaguucccgugagauggaaacgcugaggacuagucccuguucccagagcccacuuuuuuuucuuuuuuugaaauaaaauagccugucuuucagaucucaaaggcucuuuucagagccaccaaaaaaaaaaaaaaaaaaaaaaaaaaaaaaaaaaaaaaaaaaaaaaaaaaaaaaaaaaaaaaaaaaaaaaaaaaaaaaaaaaaaaaaaaaaaaaaaaaaaa

SEQ ID NO: 40681 - RNA, 1767 nt, Artificial Sequence
  mRNA product Design a-2 (hSL-A100) comprising derived and/or modified sequence from LASV(AV;Clade V)__CCA30314__GPCmut12 (opt5)
aggagaguccgcucagccagguugcagaagcggcuuagcguguguccuaaucuucucucugcguguagguaggccugugccgcaaacaagcuuaccaugggccagaucgugaccuucuuucaagaggucccccacguuauugaagaggugaugaacaucgugcugauugcccucagcauccuggcuguccuuaaggggcuguacaauauugccacaugcggacucaucggccugaucacguuccuucugcucugugggagauccugcucuagcaaccuguauaaaggaguguacgaacugcagucccucgaccugaauauggagacccuuaacauguguaugccucugucuugcacaaagaauaacagccaucacuauauucggguuggcaaugauaccgggcucgaacugacacuuaccaacacauccauccugaaucauaaauuuuguaaccucucugacgcgcacaagaaagaucuguacgaccaugcucugaugagcauuaucuccaccuuccaccucagcauuccgaauuuuaaccaguaugaggccaugucuugcgauuucaauggaggcaagaucuccgugcaguacaaccugagccacucuuaugccauugacgcugccaaucauuguggcacggucgcuaacgggauccuucaaaccuuuaugcgcauggccuggggaggcuccuacaucgcgcuggauagcgggagaggaaacugggacugcauuaugacaucuuaccaguaucucaucauucagaauaccacaugggagaaccacugucaguucucccggcccagcccuaucggcuaccuggggcuucugucccaacgcaccagagauauuuauaucucucggcgccuccugggaacguuuacauggacccugagcgacuccgaaggcaaugccacacccggcggguacugccucaccagauggaugcugaucgaggcugaacuuaaguguuucggaaacaccgccguggcuaaaugcaaugagaagcaugaugaggaauuuugcgacaugcugcgccucuucgauuuuuguaaacaggccauuagccggcugaagucugaggcgcagauguccauccagcuuauuaacaaagccguuaaugcucugaucaacgaccaacucauuaugaagaaucaccugagagacaucaugggcaucccuuauugcaacuacagcaaguauuguuaccugaaucacacaauuacggggaaaaccucucuccccaagugcugucuggugagcaacggauccuaccuuaaugaaacacauuucucugaugacaucgagcagcaggccgauaacaugauuaccgaaaugcugcaaaaagaguauauggagcggcagggcaagacaccucucgggcuggucgaccuguucguguuuagcaccuccuucuaccuuaucagcauuuuucuccgccuggugaaaaucccgacgcacagacauauugucggaaagcccugcccuaaaccccaccggcugaaucauaugggcaucuguucuugcggccucuauaagcagccugggguucccgugcgcuggaagagaugaggacuagucccuguucccagagcccacuuuuuuuucuuuuuuugaaauaaaauagccugucuuucagaucucaaaggcucuuuucagagccaccaaaaaaaaaaaaaaaaaaaaaaaaaaaaaaaaaaaaaaaaaaaaaaaaaaaaaaaaaaaaaaaaaaaaaaaaaaaaaaaaaaaaaaaaaaaaaaaaaaaaa

SEQ ID NO: 40682 - RNA, 1764 nt, Artificial Sequence
  mRNA product Design a-2 (hSL-A100) comprising derived and/or modified sequence from LASV(Togo/2016/7082;Clade VI)__AMR44577__GPCmut12 (opt5)
aggagaguccgcucagccagguugcagaagcggcuuagcguguguccuaaucuucucucugcguguagguaggccugugccgcaaacaagcuuaccaugggccagaucauuaccuucuuucaagaggugccccacgucaucgaagagguuaugaacauugugcugaucgcccucagccugcuugcuauucugaaggggguguacaaugucgccacaugcggaaucaucggccucgugacguuccuguuucuuugugggagauccugcucucugauuuauaaaggaagcuacgaacuccagacccuggagcugaacauggaaacacucaauauguguaugccucuguccugcaccaagaacucuagccaucacuauauccggguuggcaaugagacagggcuugagcugacccucacaaacaccuccauuaucaaucauaaauucuguaaccugucugacgcgcacaagcgcaaucuuuacgaucaugcucugaugagcauucucuccacguuucaccugagcaucccgaacuucaaucaguaugaagccaugucuugcgacuuuaacggaggcaaaauuuccgugcaguacaaucugagccacgccuaugcugucgaugccgcugagcauuguggcaccguggccaacgggguucuccaaacauucaugagaauggcguggggaggcucuuacaucgcccuggacuccgggcggggaaauugggauugcaucaugaccagcuaccaguaucuuauuauccagaacacaaccugggaagaccacugucaguuuucucgccccuccccuauuggcuaccuggggcuccugagccaaagaacgcgggauaucuauauuucccgcagacuucugggaacauucaccuggacacucucugacagcgagggcaacgagacccccggcggguacugccugacccgguggaugcugaucgaagcugagcucaaguguuuuggaaauacagccguggcuaagugcaacgaaaaacaugaugaggaguucugcgacaugcugcgccuuuuugauuucuguaagcaggccauccagagacugaaauccgaagcgcagaugagcauucaacucaucaauaaggccgucaacgcucugauuaaugaccagcuuaucaugaaaaaccaucugcgggauaugaugggcauuccuuauugcaauuacucuaaguauuguuaccucaaccacacguccagcgggcgcaccucucugcccaagugcugucuggugagcaauggauccuaccucaacgagacacacuucucugacgacaucgaacagcaagccgauaauaugaucaccgagaugcugcagaaagaauauauugacagacagggcaagacaccucuugggcugguggaucucuuugucuucagcaccuccuuuuaccugaucagcauuuuccugcaccuuaucaaaauuccgacgcaucggcacaucguuggaaagcccugcccuaaaccccaucgccucaaccacaugggcauuuguucuugcggccuguauaagcagccuggggugcccacaagauggaaacggugaggacuagucccuguucccagagcccacuuuuuuuucuuuuuuugaaauaaaauagccugucuuucagaucucaaaggcucuuuucagagccaccaaaaaaaaaaaaaaaaaaaaaaaaaaaaaaaaaaaaaaaaaaaaaaaaaaaaaaaaaaaaaaaaaaaaaaaaaaaaaaaaaaaaaaaaaaaaaaaaaaaaa

SEQ ID NO: 40683 - RNA, 1764 nt, Artificial Sequence
  mRNA product Design a-2 (hSL-A100) comprising derived and/or modified sequence from LASV(KAK-428;Clade n.d. (VII))__ANH09740__GPCmut12 (opt5)
aggagaguccgcucagccagguugcagaagcggcuuagcguguguccuaaucuucucucugcguguagguaggccugugccgcaaacaagcuuaccaugggccagaucgugaccuucuuucaagaggucccccacguuauugaagaggugaugaacaucgugcugauugcccucagccugcuugcuauccugaaggggcucuacaauuucgccacaugcggagucauuggccugaucacguuucuucugcucugugggagauccugcucugcgaccuauaaaggacaguacgaacugcagacacuggagcucaacauggaaagccugaauauguguaugccucuuuccugcaccaagaacaauucucaucacuauauccgggcuggcaacaauacagggcuggagcucacccugacaaacaccagcauuaucucccauaaauucuguaaucuuucugacgcccacaagaaaaaccuguacgaucauacgcucaugagcauuaucaccacauuucaccuguccauuccgaauuucaaccaguaugaggccaugagcugcgacuuuaauggaggcaagaucucuauucaauacaaccugucccacagcuaugcuggcgaugccgcucagcauugugggaccguggccaauggaguucuccagacauucaugcgcauggcguggggcgggucuuaccuggcccuugacuccggaagacggggcugggauugcaucaucagcucuuaccaguaucugauuauccaaaacaccacgugggacgaucacugucaguuuucccgccccagcccuauuggguaccucggauucgugucccagaagacaagagacaucuauauuucucggcgccugcuuggcaccuuuacauggacccugagcgauuccgaaggccaugacaugcccgggggauacugccucaccagauggaugcugaucgaggcugaucugaaauguuucggcaacacagccgucgcuaagugcaaugaaaaacacgacgaggaguuuugcgauauguggcgccucuucgacuucuguaagcaggccauccaacggcugaaagcggaagcccagaugaacauucagcuuaucaauaaggcugugaacgcccugauuaaugaccaacucaugaugaagaaccaccugagagauaucauggggauuccuuauugcaauuacagcaaauuuuguuaucuuaacaauacgaccacaggacggaccucucugccccgcugcugucucaucuccaacggcagcuaccugaaugagacacauuucucugacgauaucgaacagcaggcugacaacaugauuaccgagaugcugcagaaggaauacauggauagacaagggaaaacgccucucggacugguugaccuuuuuguguucagcacauccuuuuaucugaucaccauuuuccuccaccuggucaagaucccgacccaucggcacauugugggcaaacccugcccuaagccccaucgccugaaucacaugggcaucuguucuugcgggcuuuacaaacagccuggagugcccgucagauggaagcggugaggacuagucccuguucccagagcccacuuuuuuuucuuuuuuugaaauaaaauagccugucuuucagaucucaaaggcucuuuucagagccaccaaaaaaaaaaaaaaaaaaaaaaaaaaaaaaaaaaaaaaaaaaaaaaaaaaaaaaaaaaaaaaaaaaaaaaaaaaaaaaaaaaaaaaaaaaaaaaaaaaaaa

SEQ ID NO: 40684 - RNA, 1764 nt, Artificial Sequence; identical to SEQ ID NO: 40678
  mRNA product Design a-2 (hSL-A100) comprising derived and/or modified sequence from LASV(Pinneo-NIG-1969;Clade I)__AIT17836__GPCmut12 (opt5)

SEQ ID NO: 40685 - RNA, 1764 nt, Artificial Sequence
  mRNA product Design a-2 (hSL-A100) comprising derived and/or modified sequence from LASV(ISTH0009-NIG-2011;Clade II)__AIT17404__GPCmut12 (opt5)
aggagaguccgcucagccagguugcagaagcggcuuagcguguguccuaaucuucucucugcguguagguaggccugugccgcaaacaagcuuaccaugggccagaucauuaccuucuuucaagaggugccccacgucaucgaagagguuaugaacauugugcugaucgcccucagccugcuugcuauucugaaggggaucuacaauguggccacaugcggacucuucggccuggucuccuuucuucugcucugugggagaucuugcagcacgaccuauaaaggaguguacgaacugcagacacuggagcucgacauggcgucccugaacauguguaugccucuuucuugcaccaagaauaacagccaucacuauaucaugguuggcaaugaaacagggcuggagcucacccugacaaacaccuccauuaucaaucauaaauucuguaaccuuucugaugcucacaagaaaaaucuguacgaccaugcccucaugagcauuaucuccacguuucaccugagcauuccgaacuucaaucaguaugaggccaugucuugcgauuuuaacggaggcaagaucuccgugcaguacaaucugagccacgcuuaugccgucgacgcugccaaccauuguggcaccauugcgaauggggugcuccaaacauucaugcggauggccuggggaggcucuuacaucgcucuggauuccgggaagggaagcugggacugcaucaugaccucuuaccaguaucuuauuauccagaacacaaccugggaagaucacugucaguuuucccgccccagcccuauuggcuaccuggggcuccugucccaaagaacgcgggacaucuauauuucucgcagacuucugggaacauucaccuggacacucagcgauuccgagggcaacgaaacccccggcggguacugccugacccgguggaugcugaucgaggccgagcucaaauguuuuggaaauacagcuguugccaagugcaacgaaaaacaugacgaggaguucugcgauaugcugcgccuuuuugacuucuguaagcaggcgaucagacggcugaaaacggaagcccagaugagcauucagcucaucaauaaggcugugaacgcccugauuaaugaucaacuuaucaugaagaaccaucugcgcgacauuaugggcaucccuuauugcaauuacucuaaauauuguuaccucaaccacaccgucacagggaagaccucccugcccagaugcugucuggugagcaauggaucuuaccucaacgaaacacacuucagcgacgauaucgagcagcaggcugacaauaugauuaccgagcugcuucaaaaagaauauauggaucggcagggcaagacgccucuggggcucguggaccuguuugucuucuccacaucuuuuuaccugaucagcauuuuccuucaccucaucaaaauuccgacccaucgccacaucaccggaaagcccugcccuaaaccccauagacugaaccacaugggcauuuguuccugcggccuguauaagcacccugggguucccgugaaguggaaacggugaggacuagucccuguucccagagcccacuuuuuuuucuuuuuuugaaauaaaauagccugucuuucagaucucaaaggcucuuuucagagccaccaaaaaaaaaaaaaaaaaaaaaaaaaaaaaaaaaaaaaaaaaaaaaaaaaaaaaaaaaaaaaaaaaaaaaaaaaaaaaaaaaaaaaaaaaaaaaaaaaaaaa

SEQ ID NO: 40686 - RNA, 1764 nt, Artificial Sequence
  mRNA product Design a-2 (hSL-A100) comprising derived and/or modified sequence from LASV(ISTH2010-NIG-2012;Clade II)__AIT17482__GPCmut12 (opt5)
aggagaguccgcucagccagguugcagaagcggcuuagcguguguccuaaucuucucucugcguguagguaggccugugccgcaaacaagcuuaccaugggccagaucauuaccuucuuucaagaggugccccacgucaucgaagagguuaugaacauugugcugaucgcccucagccugcuugcuauucugaaggggaucuacaauguggccacaugcggacucuucggccuggucuccuuucuucugcucugugggagaucuugcagcacgaccuauaaaggaguguacgaacugcagacacuggagcucgacauggcgucccugaacauguguaugccucuuucuugcaccaagaauaacagccaucacuauaucaugguuggcaaugaaacagggcuggagcucacccugacaaacaccuccauuaucaaucauaaauucuguaaccuuucugaugcucacaagaaaaaucuguacgaccaugcccucaugagcauuaucuccacguuucaccugagcauuccgaacuucaaucaguaugaggccaugucuugcgauuuuaacggaggcaagaucuccgugcaguacaaucugagccacgcuuaugccgucgacgcugccaaccauuguggcaccauugcgaauggggugcuccaaacauucaugcggauggccuggggaggcucuuacaucgcucuggauuccgggaagggaagcugggacugcaucaugaccucuuaccaguaucuuauuauccagaacauuacaugggaagaucacugucaguuuucccgccccagcccuaucggcuaccuggggcuccugucccaaagaacccgggacauuuauaucucucgcagacuucugggaacguucacauggacccucagcgauuccgagggcaacgaaacacccggcggguacugccugacccgguggaugcugaucgaggccgagcucaaauguuuuggaaauaccgcuguugccaagugcaacgaaaaacaugacgaggaguucugcgauaugcugcgccuuuuugacuucuguaagcaggcgauuagacggcugaaaacagaagcccagaugagcauccagcucauuaauaaggcugugaacgcccugaucaaugaucaacuuauuaugaagaaccaucugcgcgacaucaugggcaucccuuauugcaauuacucuaaauauuguuaccucaaccacacggucaccgggaagacaucccugcccagaugcugucuggugagcaauggaucuuaccucaacgaaacccacuucagcgacgauauugagcagcaggcugacaauaugaucacagagcugcuucaaaaagaauauauugaucggcagggcaagaccccucuggggcucguggaccuguuugucuucuccacgucuuuuuaccugaucagcauuuuccuucaccucguuaaaaucccgacacaucgccacguggugggaaagcccugcccuaaaccccauagacugaaccacaugggcauuuguuccugcggccuguauaagcacccugggguccccgugaaguggaaacggugaggacuagucccuguucccagagcccacuuuuuuuucuuuuuuugaaauaaaauagccugucuuucagaucucaaaggcucuuuucagagccaccaaaaaaaaaaaaaaaaaaaaaaaaaaaaaaaaaaaaaaaaaaaaaaaaaaaaaaaaaaaaaaaaaaaaaaaaaaaaaaaaaaaaaaaaaaaaaaaaaaaaa

SEQ ID NO: 40687 - RNA, 1764 nt, Artificial Sequence
  mRNA product Design a-2 (hSL-A100) comprising derived and/or modified sequence from LASV(Lassa virus/H.sapiens-wt/NGA/2015/ISTH_0543;Clade II)__AVO03639__GPCmut12 (opt5)
aggagaguccgcucagccagguugcagaagcggcuuagcguguguccuaaucuucucucugcguguagguaggccugugccgcaaacaagcuuaccaugggccagaucauuaccuucuuucaagaggugccccacgucaucgaagagguuaugaacauugugcugaucgcccucagccugcuugcuauucugaaggggaucuacaauguggccacaugcggacucuucggccuggucuccuuucuucugcucugugggagaucuugcagcacgaccuauaaaggaguguacgaacugcagacacuggagcucgacauggcgaaccugaauauguguaugccucuuuccugcaccaagaacaauucucaucacuauaucaugguuggcaacgaaacagggcuggagcucacccugacaaauaccagcauuaucaaccauaaauucuguaaucuuuccgaugcucacaagaaaaaccuguacgaccaugcccucaugucuauuaucagcacguuucaccuguccauuccgaauuucaaccaguaugaggccaugagcugcgauuuuaauggaggcaagaucucugugcaguacaaccugucccacaccuaugcugucgacgccgcuaaucauuguggcacaauugccaacggggugcuccaaaccuucaugcggauggcguggggaggcagcuacaucgcccuggauucugggaagggauccugggacugcaucaugacaagcuaccaguaucuuguuauucagaacaccacgugggaagaucacugucaguuuucucgccccuccccuaucggcuaccuggggcuccugagccaaagaacacgggacauuuauaucucccgcagacuucugggaaccuucacauggacccucucugauagcgagggcaaugaaacccccggcggguacugccugacacgguggaugcugauugaggcugagcucaaauguuuuggaaacacggccguggcuaagugcaaugaaaaacaugacgaggaguucugcgauaugcugcgccuuuuugacuucuguaagcaggccaucagacggcugaaaaccgaagcgcagauguccauccagcucauuaacaaggccgucaaugcucugaucaacgaucaacuuauuaugaagaaucaucugcgcgacaucaugggcauuccuuauugcaacuacagcaaauauuguuaccucaaucacacagugaccgggaagacaucucugcccagaugcugucugguguccaacggaagcuaccucaaugaaacccacuucucugacgauaucgagcagcaggccgacaacaugaucacggagcugcuucaaaaagaauauauugaucggcagggcaagacaccucuggggcucgucgaccuguuuguuuucagcaccuccuuuuaccugaucucuauuuuccuucaccucgugaaaaucccgacccaucgccacauuacaggaaagcccugcccuaaaccccauagacugaaucacaugggcaucuguagcugcggccuguauaagcacccuggggugcccgucaaguggaaacggugaggacuagucccuguucccagagcccacuuuuuuuucuuuuuuugaaauaaaauagccugucuuucagaucucaaaggcucuuuucagagccaccaaaaaaaaaaaaaaaaaaaaaaaaaaaaaaaaaaaaaaaaaaaaaaaaaaaaaaaaaaaaaaaaaaaaaaaaaaaaaaaaaaaaaaaaaaaaaaaaaaaaa

SEQ ID NO: 40688 - RNA, 1764 nt, Artificial Sequence
  mRNA product Design a-2 (hSL-A100) comprising derived and/or modified sequence from LASV(Lassa virus/H.sapiens-wt/NGA/2016/ISTH_0009;Clade II)__AVO03571__GPCmut12 (opt5)
aggagaguccgcucagccagguugcagaagcggcuuagcguguguccuaaucuucucucugcguguagguaggccugugccgcaaacaagcuuaccaugggccagaucauuaccuucuuucaagaggugccccacgucaucgaagagguuaugaacauugugcugaucgcccucagccugcuugcuauucugaaggggaucuacaauguggccacaugcggacuccugggccuugucuccuuccugcuccugugugggagaucuugcagcacgaccuauaaaggaguguacgaacugcagacacucgagcuggacauggcgucccuuaacauguguaugccucugucuugcaccaagaauaacagccaucacuauaucaugguuggcaaugaaacagggcucgagcugacccuuacaaacaccuccauuaucaaucauaaauuuuguaaccugucugaugcucacaagaaaaaucucuacgaccaugcccugaugagcauuaucuccacguuccaccugagcauuccgaacuuuaaucaguaugaggccaugucuugcgauuucaacggaggccggaucuccgugcaguacaaucucagccacucuuaugcugucgacgccgcuaaccauuguggcaccauugccaauggggugcugcaaacauuuaugcgcauggcguggggaggcuccuacaucgcccuugauagcgggaagggaucuugggacugcaucaugaccuccuaccaguaucugauuauccagaacacaaccugggaagaucacugucaguucagcagacccuccccuauuggcuaccucgggcugcuuucucaacggacgcgcgacaucuauauuagcagacggcugcucggaacauuuaccuggacacuguccgauagcgagggcaacgaaacccccggcggguacugccugacccgcuggaugcucaucgaggcugagcugaaguguuucggaaauacagccguugcuaaaugcaacgaaaagcaugacgaggaauuuugcgauaugcuuagacuguucgacuuuuguaaacaggccauccggcgccucaagacggaggcgcagaugucuauucagcugaucaauaaagccgugaacgcucuuauuaaugaucaacugaucaugaagaaccaccucagagacauuaugggcaucccuuauugcaauuacuccaaguauuguuaccugaaccacaccgucacagggaaaaccagccugccccggugcugucucgugucuaauggaagcuaccugaacgaaacacauuucuccgacgauaucgagcagcaggccgacaauaugauuaccgagcuucugcaaaaggaauauaucgaucgccagggcaaaacgccucucgggcugguggaccuguucgucuuuucuaccagcuucuaccuuauuuccaucuuucuccaccugguuaagauuccgacacauagacacaucaccggaaaacccugcccuaagccccaucggcugaaccacaugggcauuuguagcugcggccucuauaaucacccuggggugcccgugaaauggaagcgcugaggacuagucccuguucccagagcccacuuuuuuuucuuuuuuugaaauaaaauagccugucuuucagaucucaaaggcucuuuucagagccaccaaaaaaaaaaaaaaaaaaaaaaaaaaaaaaaaaaaaaaaaaaaaaaaaaaaaaaaaaaaaaaaaaaaaaaaaaaaaaaaaaaaaaaaaaaaaaaaaaaaaa

SEQ ID NO: 40689 - RNA, 1764 nt, Artificial Sequence
  mRNA product Design a-2 (hSL-A100) comprising derived and/or modified sequence from LASV(Lassa virus/H.sapiens-wt/NGA/2016/ISTH_0017;Clade II)__AVO03567__GPCmut12 (opt5)
aggagaguccgcucagccagguugcagaagcggcuuagcguguguccuaaucuucucucugcguguagguaggccugugccgcaaacaagcuuaccaugggccagaucauuaccuucuuucaagaggugccccacgucaucgaagagguuaugaacauugugcugaucgcccucagccugcuugcuauucugaaggggaucuacaauguggccacaugcggacucuucggccuggucuccuuucuucugcucugugggagaucuugcagcacgaccuauaaaggaguguacgaacugcagacacuggagcucgacauggcgucccugaacauguguaugccucuuucuugcaccaagaauaacagccaucacuauaucaugguuggcaaugaaacagggcuggagcucacccugacaaacaccuccauuaucaaucauaaauucuguaaccuuucugaugcucacaagaaaaaucuguacgaccaugcccucaugagcauuaucuccacguuucaccugagcauuccgaacuucaaucaguaugaggccaugucuugcgauuuuaacggaggcaagaucuccgugcaguacaaucugagccacaccuaugcuauugacgccgcuaaccauuguggcacaaucgccaaugggguccuccaaaccuucaugcggauggcguggggaggcucuuacaucgcccuggauuccgggaagggaagcugggacugcauuaugacaucuuaccaguaucuuaucauucagaacaccacgugggaagaucacugucaguuuucccgccccagcccuaucggcuaccuggggcuccugucccaaagaacacgggacauuuauaucucucgcagacuucugggaaccuucacauggacccucagcgauuccgagggcaacgaaacccccggcggguacugccugacacgguggaugcugaucgaggcugagcucaaauguuuuggaaauacggccguggcuaagugcaacgaaaaacaugacgaggaguucugcgauaugcugcgccuuuuugacuucuguaagcaggccauuagacggcugaaaaccgaagcgcagaugagcauccagcucauuaauaaggccguuaacgcucugaucaaugaucaacuuauuaugaagaaccaucugcgcgacaucaugggcaucccuuauugcaauuacucuaaauauuguuaccucaaccacacagugaccgggaagacaucccugcccagaugcugucuggucagcaauggaucuuaccucaacgaaacccacuucagcgacgauauugagcagcaggccgacaauaugaucacggagcugcuucaaaaagaauauauggaucggcagggcaagacaccucuggggcucguggaccuguuuguguucuccaccucuuuuuaccugauuagcaucuuccuucaccucguccgcauuccgacccauagacacguuaucggaaaacccugcccuaagccccaucggcugaaccacaugggcauuuguuccugcggccuguauaaacacccuggggugcccgugaaguggaagcgcugaggacuagucccuguucccagagcccacuuuuuuuucuuuuuuugaaauaaaauagccugucuuucagaucucaaaggcucuuuucagagccaccaaaaaaaaaaaaaaaaaaaaaaaaaaaaaaaaaaaaaaaaaaaaaaaaaaaaaaaaaaaaaaaaaaaaaaaaaaaaaaaaaaaaaaaaaaaaaaaaaaaaa

SEQ ID NO: 40690 - RNA, 1764 nt, Artificial Sequence
  mRNA product Design a-2 (hSL-A100) comprising derived and/or modified sequence from LASV(Lassa virus/H.sapiens-wt/NGA/2018/ISTH_0959;Clade II)__AVV65099__GPCmut12 (opt5)
aggagaguccgcucagccagguugcagaagcggcuuagcguguguccuaaucuucucucugcguguagguaggccugugccgcaaacaagcuuaccaugggccagaucauuaccuucuuucaagaggugccccacgucaucgaagagguuaugaacauugugcugaucgcccucagccugcuugcuauucugaaggggaucuacaauguggucacaugcggacucuucggccugguguccuuucuucugcucugugggagaucuugcagcacgaccuauaaaggaguuuacgaacugcagacacuggagcucgacauggccucccugaacauguguaugccucuuucuugcaccaagaauaacagccaucacuauaucauggugggcaaugaaacagggcuggagcucacccugacaaacaccuccauuaucaaucauaaauucuguaaccuuucugaugcgcacaagaaaaaucuguacgaccaugcucucaugagcauuaucuccacguuucaccugagcauuccgaacuucaaucaguaugaggccaugucuugcgauuuuaacggaggcaagaucuccguccaguacaaucugagccacgccuaugcuauugacgccgcuaaccauuguggcaccaucgccaauggggugcuccaaacauucaugcggauggcguggggaggcucuuacaucgcccuggauuccgggaagggaagcugggacugcauuaugaccucuuaccaguaucuuaucauucagaacacaaccugggaagaucacugucaguuuucccgccccagcccuaucggcuaccuggggcuccugucccaaagaacgcgggacauuuauaucucucgcagacuucugggaacauucaccuggacacucagcgauuccgagggcaacgaaacccccggcggguacugccugacccgguggaugcugaucgaggcugagcucaaauguuuuggaaauacagccguugcuaagugcaacgaaaaacaugacgaggaguucugcgauaugcugcgccuuuuugacuucuguaagcaggccauuagacggcugaaaacggaagcgcagaugagcauccagcucauuaauaaggccgugaacgcucugaucaaugaucaacuuauuaugaagaaccaucugcgcgacaucaugggcaucccuuauugcaauuacucuaaauauuguuaccucaaccacaccgucacagggaagaccucccugcccagaugcugucuggugagcaauggaucuuaccucaacgaaacacacuucagcgacgauauugagcagcaggccgacaauaugaucaccgagcugcuucaaaaagaauauauugaucggcagggcaagacgccucuggggcucguggaccuguuugucuucuccacaucuuuuuaccugaucagcauuuuccuucaccucguuaaaaucccgacccaucgccacgugauuggaaagcccugcccuaaaccccauagacugaaccacaugggcaucuguuccugcggccuguauaagcacccuggggugcccgucaaguggaaacggugaggacuagucccuguucccagagcccacuuuuuuuucuuuuuuugaaauaaaauagccugucuuucagaucucaaaggcucuuuucagagccaccaaaaaaaaaaaaaaaaaaaaaaaaaaaaaaaaaaaaaaaaaaaaaaaaaaaaaaaaaaaaaaaaaaaaaaaaaaaaaaaaaaaaaaaaaaaaaaaaaaaaa

SEQ ID NO: 40691 - RNA, 1764 nt, Artificial Sequence
  mRNA product Design a-2 (hSL-A100) comprising derived and/or modified sequence from LASV(LASV003-NIG-2008;Clade II)__AIT17580__GPCmut12 (opt5)
aggagaguccgcucagccagguugcagaagcggcuuagcguguguccuaaucuucucucugcguguagguaggccugugccgcaaacaagcuuaccaugggccagaucauuaccuucuuucaagaggugccccacgucaucgaagagguuaugaacauugugcugaucgcccucagccugcuugcuauucugaaggggaucuacaauguggccacaugcggacucuucggccuggucuccuuucuucugcucugugggagaucuugcagcacgaccuauaaaggaguguacgaacugcagacacuggagcucgacauggcgucccugaacauguguaugccucuuucuugcaccaagaauaacagccaucacuauaucaugguuggcaaugaaacagggcuggagcucacccugacaaacaccuccauuaucaaucauaaauucuguaaccuuucugaugcucacaagaaaaaucuguacgaccaugcccucaugagcauuaucuccacguuucaccugagcauuccgaacuucaaucaguaugaggccaugucuugcgauuuuaacggaggcaagaucuccgugcaguacaaucugagccacaccuaugcugucgacgccgcuaaccauuguggcacaauugccaauggggugcuccaaaccuucaugcggauggcguggggaggcucuuacaucgcccuggauuccgggaagggaagcugggacugcaucaugacaucuuaccaguaucuuauuauccagaacaccacgugggaagaucacugucaguuuucccgccccagcccuauuggcuaccuggggcuccugucccaaagaacacgggacaucuauauuucucgcagacuucugggaaccuucacauggacccucagcgauuccgagagcaacgaaacccccggcggcuacugccugacacgguggaugcugaucgaggcugagcucaaauguuuugggaauacggccguugcuaagugcaacgaaaaacaugacgaggaguucugcgauaugcugcgccuuuuugacuucuguaagcaggccaucagacggcugaaagcggaagcccagaugucuauucagcucaucaauaaggcugugaacgcccugauuaaugaucaacuuaucaugaagaaccaucugcgcgacauuaugggaaucccuuauugcaauuacuccaaauauuguuaccucaaccacaccgucacaggcagaaccagccugccccggugcugucuggugucuaaugggagcuaccucaacgaaacacacuucuccgacgauaucgagcagcaggcugacaauaugauuaccgagcugcuucaaaaggaauauauggaucgccagggaaaaacgccucugggccucguggaccuguuugucuucucuaccagcuuuuaccugaucuccauuuuccuucaccucguuaagaucccgacacauagacacgugauugggaaacccugcccuaagccccaucggcugaaccacaugggaaucuguagcugcggccuguauaaacacccuggcgugcccgucaaguggaagcgcugaggacuagucccuguucccagagcccacuuuuuuuucuuuuuuugaaauaaaauagccugucuuucagaucucaaaggcucuuuucagagccaccaaaaaaaaaaaaaaaaaaaaaaaaaaaaaaaaaaaaaaaaaaaaaaaaaaaaaaaaaaaaaaaaaaaaaaaaaaaaaaaaaaaaaaaaaaaaaaaaaaaaa

SEQ ID NO: 40692 - RNA, 1764 nt, Artificial Sequence
  mRNA product Design a-2 (hSL-A100) comprising derived and/or modified sequence from LASV(LASV035-NIG-2009;Clade II)__AIT17588__GPCmut12 (opt5)
aggagaguccgcucagccagguugcagaagcggcuuagcguguguccuaaucuucucucugcguguagguaggccugugccgcaaacaagcuuaccaugggccagaucauuaccuucuuucaagaggugccccacgucaucgaagagguuaugaacauugugcugaucgcccucagccugcuugcuauucugaaggggaucuacaauguggccacaugcggacucuucggccuggucuccuuucuucugcucugugggagaucuugcagcacgaccuauaaaggaguguacgaacugcagacacuggagcucgacauggcgucccugaacauguguaugccucuuucuugcaccaagaauaacagccaucacuauaucaugguuggcaaugaaacagggcuggagcucacccugacaaacaccuccauuaucaaucauaaauucuguaaccuuucugaugcucacaagaaaaaucuguacgaccaugcccucaugagcauuaucuccacguuucaccugagcauuccgaacuucaaucaguaugaggccaugucuugcgauuuuaacggaggcaagaucuccgugcaguacaaucugagccacgcuuaugccgucgacgcugccaaccauuguggcaccauugcgaauggggugcuccaaacauucaugcggauggccuggggaggcucuuacaucgcucuggauuccgggaagggaagcugggacugcaucaugaccucuuaccaguaucuuauuauccagaacacaaccugggaagaucacugucaguuuucccgccccagcccuauuggcuaccuggggcuccugucccaaagaacgcgggacaucuauauuucucgcagacuucugggaacauucaccuggacacucagcgauuccgagggcaacgaaacccccggcggguacugccugacccgguggaugcugaucgaggccgagcucaaauguuuuggaaauacagcuguugccaagugcaacgaaaaacaugacgaggaguucugcgauaugcugcgccuuuuugacuucuguaagcaggcgaucagacggcugaaagccgaagcucagaugagcauucagcucaucaauaaggccgugaacgcucugauuaaugaucaacuuaucaugaagaaccaucugcgcgacauuaugggcaucccuuauugcaauuacucuaaauauuguuaccucaaccacacggucaccgggaagacaucccugcccagaugcugucuggugagcaauggaucuuaccucaacgaaacccacuucagcgacgauaucgagcagcaggccgacaauaugauuacagagcugcuucaaaaagaauauaucgaucggcagggcaagaccccucuggggcucguggaccuguuugucuucuccacgucuuuuuaccugauuagcaucuuccuucaccucguuaaaauuccgacacaucgccacgugaucggaaagcccugcccuaaaccccauagacugaaccacaugggcauuuguuccugcggccuguauaagcacccuggggugcccgucaaguggaaacggugaggacuagucccuguucccagagcccacuuuuuuuucuuuuuuugaaauaaaauagccugucuuucagaucucaaaggcucuuuucagagccaccaaaaaaaaaaaaaaaaaaaaaaaaaaaaaaaaaaaaaaaaaaaaaaaaaaaaaaaaaaaaaaaaaaaaaaaaaaaaaaaaaaaaaaaaaaaaaaaaaaaaa

SEQ ID NO: 40693 - RNA, 1764 nt, Artificial Sequence
  mRNA product Design a-2 (hSL-A100) comprising derived and/or modified sequence from LASV(LASV1000-NIG-2009;Clade II)__AIT17782__GPCmut12 (opt5)
aggagaguccgcucagccagguugcagaagcggcuuagcguguguccuaaucuucucucugcguguagguaggccugugccgcaaacaagcuuaccaugggccagaucauuaccuucuuucaagaggugccccacgucaucgaagagguuaugaacauugugcugaucgcccucagccugcuugcuauucugaaggggaucuacaauguggccacaugcggacucuucggccuggucuccuuucuucugcucugugggagaucuugcagcacgaccuauaaaggaguguacgaacugcagacacuggagcucgacauggcgucccugaacauguguaugccucuuucuugcaccaagaauaacagccaucacuauaucaugguuggcaaugaaacagggcuggagcucacccugacaaacaccuccauuaucaaucauaaauucuguaaccuuucugaugcucacaagaaaaaucuguacgaccaugcccucaugagcauuaucuccacguuucaccugagcauuccgaacuucaaucaguaugaggccaugucuugcgauuuuaacggaggcaagaucuccgugcaguacaaucugagccacaccuaugcugucgacgccgcuaaccauuguggcacaauugccaauggggugcuccaaaccuucaugcggauggcguggggaggcucuuacaucgcccuggauuccgggaagggaagcugggacugcaucaugacaucuuaccaguaucuuauuauccagaacaccacgugggaagaucacugucaguuuucccgccccagcccuauuggcuaccuggggcuccugucccaaagaacacgggacaucuauauuucucgcagacuucugggaaccuucacauggacccucagcgauuccgagggcaacgaaacccccggcggguacugccugacacgguggaugcugaucgaggcugagcucaaauguuuuggaaauacggccguugcuaagugcaacgaaaaacaugacgaggaguucugcgauaugcugcgccuuuuugacuucuguaagcaggccaucaaaagacugaagaccgaagcgcagaugagcauucagcucaucaauaaggccgugaacgcucugauuaaugaucaacuuaucaugaaaaaccaucugcgggacauuaugggcaucccuuauugcaauuacucuaaguauuguuaccucaaccacacagucaccgggaaaacaucccugccccgcugcugucuggugagcaauggaucuuaccucaacgaaacccacuucagcgacgauaucgagcagcaggccgacaauaugauuacggagcugcuucaaaaggaauauaucgauagacagggcaaaacaccucuggggcucguggaccuguuugucuucuccaccucuuuuuaccugauuagcaucuuccuucaccucguuaagauuccgacccaucggcacguggugggaaaacccugcccuaagccccaucgccugaaccacaugggcaucuguuccugcggccuguauaagcacccugggguccccgugaaauggaagagaugaggacuagucccuguucccagagcccacuuuuuuuucuuuuuuugaaauaaaauagccugucuuucagaucucaaaggcucuuuucagagccaccaaaaaaaaaaaaaaaaaaaaaaaaaaaaaaaaaaaaaaaaaaaaaaaaaaaaaaaaaaaaaaaaaaaaaaaaaaaaaaaaaaaaaaaaaaaaaaaaaaaaa

SEQ ID NO: 40694 - RNA, 1764 nt, Artificial Sequence
  mRNA product Design a-2 (hSL-A100) comprising derived and/or modified sequence from LASV(LASV221-NIG-2010;Clade II)__AIT17624__GPCmut12 (opt5)
aggagaguccgcucagccagguugcagaagcggcuuagcguguguccuaaucuucucucugcguguagguaggccugugccgcaaacaagcuuaccaugggccagaucauuaccuucuuucaagaggugccccacgucaucgaagagguuaugaacauugugcugaucgcccucagccugcuugcuauucugaaggggaucuacaauguggccacaugcggacucuucggccuggucuccuuucuucugcucugugggagaucuugcagcacgaccuauaaaggaguguacgaacugcagacacuggagcucgacauggcgucccugaacauguguaugccucuuucuugcaccaagaauaacagccaucacuauaucaugguuggcaaugaaacagggcuggagcucacccugacaaacaccuccauuaucaaucauaaauucuguaaccuuucugaugcucacaagaaaaaucuguacgaccaugcccucaugagcauuaucuccacguuucaccugagcauuccgaacuucaaucaguaugaggccaugucuugcgauuuuaacggaggcaagaucuccgugcaguacaaucugagccacaccuaugcuauugacgccgcuaaccauuguggcacaaucgccaaugggguccuccaaaccuucaugcggauggcguggggaggcucuuacaucgcccuggauuccgggaagggaagcugggacugcauuaugacaucuuaccaguaucuuaucauucagaacaccacgugggaagaucacugucaguuuucccgccccagcccuaucggcuaccuggggcuccugucccaaagaacacgggacauuuauaucucucgcagacuucugggaaccuucacauggacccucagcgauuccgagggcaacgaaacccccggcggguacugccugacacgguggaugcugaucgaggcugagcucaaauguuuuggaaauacggccguggcuaagugcaacgaaaaacaugacgaggaguucugcgauaugcugcgccuuuuugacuucuguaagcaggccauuagacggcugaaaaccgaagcgcagaugagcauccagcucauuaauaaggccguuaacgcucugaucaaugaucaacuuauuaugaagaaccaucugcgcgacaucaugggcaucccuuauugcaauuacucuaaauauuguuaccucaaccacacagugaccgggaagacaucccugcccagaugcugucuggucagcaauggaucuuaccucaacgaaacccacuucagcgacgauauugagcagcaggccgacaauaugaucacggagaugcugcaaaaagaauauauggaucggcagggcaagacaccucuugggcugguggaccucuuuguguucuccaccucuuuuuaccugauuagcaucuuccugcaccuugucaaaauuccgacccaucgccacguuaucggaaagcccugcccuaaaccccauagacucaaccacaugggcauuuguuccugcggccuguauaagcacccuggggugcccgugaaguggaaacggugaggacuagucccuguucccagagcccacuuuuuuuucuuuuuuugaaauaaaauagccugucuuucagaucucaaaggcucuuuucagagccaccaaaaaaaaaaaaaaaaaaaaaaaaaaaaaaaaaaaaaaaaaaaaaaaaaaaaaaaaaaaaaaaaaaaaaaaaaaaaaaaaaaaaaaaaaaaaaaaaaaaaa

SEQ ID NO: 40695 - RNA, 1764 nt, Artificial Sequence
  mRNA product Design a-2 (hSL-A100) comprising derived and/or modified sequence from LASV(LASV237-NIG-2010;Clade II)__AIT17638__GPCmut12 (opt5)
aggagaguccgcucagccagguugcagaagcggcuuagcguguguccuaaucuucucucugcguguagguaggccugugccgcaaacaagcuuaccaugggccagaucauuaccuucuuucaagaggugccccacgucaucgaagagguuaugaacauugugcugaucgcccucagccugcuugcuauucugaaggggaucuacaauguggccacaugcggacucuucggccuggucuccuuucuucugcucugugggagaucuugcagcacgaccuauaaaggaguguacgaacugcagacacuggagcucgacauggcgucccugaacauguguaugccucuuucuugcaccaagaauaacagccaucacuauaucaugguuggcaaugaaacagggcuggagcucacccugacaaacaccuccauuaucaaucauaaauucuguaaccuuucugaugcucacaagaaagaccuguacgaucaugcccucaugagcauuaucuccacguuucaccugagcauuccgaauuucaaccaguaugaggccaugucuugcgacuuuaauggaggcaagaucuccgugcaguacaaccugagccacaccuaugcugucgaugccgcuaaucauuguggcacaauugccaacggggugcuccaaaccuucaugcggauggcguggggaggcucuuacaucgcccuggacuccgggaagggaagcugggauugcaucaugacaucuuaccaguaucuuauuauccagaauaccacgugggaagaccacugucaguuuucccgccccagcccuauuggcuaccuggggcuccugucccaaagaacacgggauaucuauauuucucgcagacuucugggaaccuucacauggacccucagcgacuccgagggcaacgaaacccccggcggguacugccugacacgguggaugcugaucgaggcugagcucaaauguuuuggaaacacggccguugcuaagugcaaugaaaaacaugaugaggaguucugcgacaugcugcgccuuuuugauuucuguaagcaggccaucagacggcugaaaaccgaagcgcagaugagcauucagcucaucaacaaggccgugaaugcucugauuaacgaccaacuuaucaugaagaaucaucugcgcgacauuaugggcaucccuuauugcaacuacucuaaauauuguuaccucaaucacacagucaccgggaagacaucccugcccagaugcugucuggugagcaacggaucuuaccucaaugaaacccacuucagcgaugacaucgagcagcaggccgauaacaugauuacggagcugcuucaaaaagaauauauggaccggcagggcaagacaccucuggggcucguggaucuguuugucuucuccaccucuuuuuaccugaucagcauuuuccuucaccucaucaaaauuccgacccaucgccacaucacaggaaagcccugcccuaaaccccauagacugaaucacaugggcauuuguuccugcggccuguauaagcacccugggguucccgugaaguggaaacggugaggacuagucccuguucccagagcccacuuuuuuuucuuuuuuugaaauaaaauagccugucuuucagaucucaaaggcucuuuucagagccaccaaaaaaaaaaaaaaaaaaaaaaaaaaaaaaaaaaaaaaaaaaaaaaaaaaaaaaaaaaaaaaaaaaaaaaaaaaaaaaaaaaaaaaaaaaaaaaaaaaaaa

SEQ ID NO: 40696 - RNA, 1764 nt, Artificial Sequence
  mRNA product Design a-2 (hSL-A100) comprising derived and/or modified sequence from LASV(LASV253-NIG-2011;Clade II)__AIT17670__GPCmut12 (opt5)
aggagaguccgcucagccagguugcagaagcggcuuagcguguguccuaaucuucucucugcguguagguaggccugugccgcaaacaagcuuaccaugggccagaucauuaccuucuuucaagaggugccccacgucaucgaagagguuaugaacauugugcugaucgcccucagccugcuugcuauucugaaggggaucuacaauguggccacaugcggacucuucggccuggucuccuuucuucugcucugugggagaucuugcagcacgaccuauaaaggaguguacgaacugcagacacuggagcucgacauggcgucccugaacauguguaugccucuuucuugcaccaagaauaacagccaucacuauaucaugguuggcaaugaaacagggcuggagcucacccugacaaacaccuccauuaucaaucauaaauucuguaaccuuucugaugcucacaagaaaaaucuguacgaccaugcccucaugagcauuaucuccacguuucaccugagcauuccgaacuucaaucaguaugaggccaugucuugcgauuuuaacggaggcaagaucuccgugcaguacaaucugagccacaccuaugcugucgacgccgcuaaccauuguggcacaauugccaauggggugcuccaaaccuucaugcggauggcguggggaggcucuuacaucgcccuggauuccgggaagggaagcugggacugcaucaugacaucuuaccaguaucuuauuauccagaacaccacgugggaagaucacugucaguuuucccgccccagcccuauuggcuaccuggggcuccugucccaaagaacacgggacaucuauauuucucgcagacuucugggaaccuucacauggacccucagcgauuccgagggcaacgaaacccccggcggguacugccugacacgguggaugcugaucgaggcugagcucaaauguuuuggaaauacggccguugcuaagugcaacgaaaaacaugacgaggaguucugcgauaugcugcgccuuuuugacuucuguaagcaggccaucagacggcugaaagcggaagcccagaugagcauucagcucaucaauaaggcugugaacgcccugauuaaugaucaacuuaucaugaagaaccaucugcgcgacauuaugggcaucccuuauugcaauuacucuaaauauuguuaccucaaccacaccgucacagggagaaccucccugccccggugcugucuggugagcaauggaucuuaccucaacgaaacacacuucagcgacgauaucgagcagcaggcugacaauaugauuaccgagcugcuucaaaaggaauauaucgaucgccagggcaaaacgccucuggggcucguggaccuguuugucuucuccacaucuuuuuaccugauuagcaucuuccuucaccucguuaagauuccgacccauagacacaucauuggaaaacccugcccuaagccccaucggcugaaccacaugggcaucuguuccugcggccuguauaaacacccuggggugcccgugaaguggaagcgcugaggacuagucccuguucccagagcccacuuuuuuuucuuuuuuugaaauaaaauagccugucuuucagaucucaaaggcucuuuucagagccaccaaaaaaaaaaaaaaaaaaaaaaaaaaaaaaaaaaaaaaaaaaaaaaaaaaaaaaaaaaaaaaaaaaaaaaaaaaaaaaaaaaaaaaaaaaaaaaaaaaaaa

SEQ ID NO: 40697 - RNA, 1764 nt, Artificial Sequence
  mRNA product Design a-2 (hSL-A100) comprising derived and/or modified sequence from LASV(LASV254-NIG-2011;Clade II)__AIT17674__GPCmut12 (opt5)
aggagaguccgcucagccagguugcagaagcggcuuagcguguguccuaaucuucucucugcguguagguaggccugugccgcaaacaagcuuaccaugggccagaucauuaccuucuuucaagaggugccccacgucaucgaagagguuaugaacauugugcugaucgcccucagccugcuugcuauucugaaggggaucuacaauguggccacaugcggacucuucggccuggucuccuuucuucugcucugugggagaucuugcagcacgaccuauaaaggaguguacgaacugcagacacuggagcucgacaugaccaaccugaauauguguaugccucuuuccugcacaaagaacaauucucaucacuauaucaugguuggcaacgaaaccgggcuggagcucacacugaccaauacgagcauuaucaaccauaaauucuguaaucuuuccgaugcgcacaagaaaaaccuguacaaucaugcucucaugucuauuaucagcaccuuucaccuguccauuccgaacuucaaucaguaugaggccaugagcugcgacuuuaacggaggcaagaucucugugcaguacaaucugucccacagcuaugccgucgaugcugccaaccauuguggcacaauugcuaacggggugcuccaaaccuucaugcggauggccuggggaggcucuuacaucgcgcuggacuccgggaagggaaauugggauugcaucaugacaagcuaccaguaucuuauuauccagaacaccacgugggaagaccacugucaguuuucucgccccuccccuauuggcuaccuggggcuccugagccaaagaacacgggauaucuauauuucccgcagacuucugggaaccuucacauggacccucucugacagcgagggcaaugaaacccccggcggguacugccugacacgguggaugcugaucgaggccgagcucaaauguuuuggaaacacggcuguugccaagugcaaugaaaaacaugaugaggaguucugcgacaugcugcgccuuuuugauuucuguaagcaggcuaucagacggcugaaaaccgaagcccaggcgaacauucagcucaucaauaaggccgugaacgcucugauuaaugaccaacuuaucaugaagaaccaucugcgcgauauuaugggcaucccuuauugcaauuacuccaaauauuguuaccucaaccacacagucaccgggaagacaagccugcccagaugcugucuggugucuaauggauccuaccucaacgaaacccacuucagcgacgacaucgagcagcaggccgauaauaugauuacggagcugcuucaaaaagaauauauggaccggcagggcaagacaccucuggggcucguggaucuguuugucuucucuaccagcuuuuaccugaucuccauuuuccuucaccucguuaaaaucccgacccaucgccacgugauuggaaagcccugcccuaaaccccauagacugaaccacaugggcaucuguucuugcggccuguauaagcacccuggggugcccgucaaguggaaacggugaggacuagucccuguucccagagcccacuuuuuuuucuuuuuuugaaauaaaauagccugucuuucagaucucaaaggcucuuuucagagccaccaaaaaaaaaaaaaaaaaaaaaaaaaaaaaaaaaaaaaaaaaaaaaaaaaaaaaaaaaaaaaaaaaaaaaaaaaaaaaaaaaaaaaaaaaaaaaaaaaaaaa

SEQ ID NO: 40698 - RNA, 1764 nt, Artificial Sequence
  mRNA product Design a-2 (hSL-A100) comprising derived and/or modified sequence from LASV(Nig08-A19;Clade III)__ADU56618__GPCmut12 (opt5)
aggagaguccgcucagccagguugcagaagcggcuuagcguguguccuaaucuucucucugcguguagguaggccugugccgcaaacaagcuuaccaugggccagaucgugaccuucuuucaagaggucccccacguuauugaagaggugaugaacaucgugcugauugcccucagcauccuggcuauucuuaaggggcuguacaauaucgccacaugcggacucaucggccuggucacguuccuucugcucuccgggagaucuuguagcaugaccuauaaaggaguguacgaacugcagacacuggagcucaacaugaauacccugaacaugugcaugccucuuuccuguacaaagaauaacucucaucacuauauuaugguuggcaaugaaaccgggcuggagcucacacugaccaacacgagccuucugcaucacaaauuuugcaaucucuccgacgcgcauaagaaaaaccuguacgaucacacccugaugucuaucauuagcacauuccaccucuccaucccgaauuuuaaccaguaugaggcuaugagcugugacuucaauggaggcaagauuaccgugcaguacaaccugucucauuccuaugccaucgaugccgcuaaucacugcggcacagucgccaacggggugcuucaaaccuuuaugcggauggcuuggggaggcagcuacauugcccuggacucugggcgcggaaagugggauuguaucaugacguccuaccaguaucucaucauucagaacacaaccugggaagaccauugccaguucagcagacccucuccuaucggcuaccuggggcuucugucccaacggacacgcgauauuuauaucagcagacggcuccugggaaccuuuaccuggacacuguccgacucugagggcaaugaaacgcccggcggguacugucucacccgcuggaugcugauugaggcggagcuuaaaugcuucggaaacacagccguugcuaaguguaaugaaaaacacgaugaggaauuuugcgacaugcugagacucuucgauuuuugcaagcaggccauccggcgccugaaagcugaggcccagaugagcauccagcuuauuaacaaggcggugaaugcccugaucaacgaccaacucauuaugaagaaucaccugagagauaucaugggcauuccuuauuguaacuacuccaaauauugcuaccugaaucauaccagcacagggcggaccucucucccccgcuguugccuggucuccaacggaagcuaccuuaaugaaacgcacuucucugacgacaucgagcagcaggcugauaacaugaucacagagaugcugcaaaaggaauaucucgacagacagggcaaaaccccucuggggcugguggaucuuuucguguuuagcaccuccuucuaccucauuucuaucuuucugcaucuggucaagauuccgacacaccggcauaucguuggaaaacccuguccuaagccccaccgccucaaucacaugggcauuugcagcuguggccuguauaaacagccuggggugcccgugagauggaagcggugaggacuagucccuguucccagagcccacuuuuuuuucuuuuuuugaaauaaaauagccugucuuucagaucucaaaggcucuuuucagagccaccaaaaaaaaaaaaaaaaaaaaaaaaaaaaaaaaaaaaaaaaaaaaaaaaaaaaaaaaaaaaaaaaaaaaaaaaaaaaaaaaaaaaaaaaaaaaaaaaaaaaa

SEQ ID NO: 40699 - RNA, 1767 nt, Artificial Sequence
  mRNA product Design a-2 (hSL-A100) comprising derived and/or modified sequence from LASV(G1180-SLE-2010;Clade IV)__AIT17168__GPCmut12 (opt5)
aggagaguccgcucagccagguugcagaagcggcuuagcguguguccuaaucuucucucugcguguagguaggccugugccgcaaacaagcuuaccaugggccagaucgugaccuucuuucaagaggucccccacguuauugaagaggugaugaacaucgugcugauugcccucagcauccuggcuguccuuaaggggcuguacaauuucgccacaugcggacucgugggccugcuuacguuucugcuccugugugggagauccugcaccgcgucucgguauaaaggaguuuacgaacugcagacacucgagcugaacauggaaacccuuaauauguguaugccucugagcugcacaaagaacaauucccaucacuauauuauggugggcaacgagaccgggcucgagcugacacuuaccaauacgucuaucaucaaccauaaauucuguaaucugagcgacgcucacaagaaaaaccucuacgaucaugcccugauguccauuaucucuaccuuucaccugagcauuccgaauuucaaccaguaugaagccauguccugcgacuuuaauggaggcaagaucagcguccaguacaaccucucucacuccuaugcuggcgaugccgcuaaucauugugggacaguggccaacggaguucugcaaaccuucaugcgcauggcguggggcgggagcuacauugcccuugacucuggacacggcuccugggauugcaucaugacaagcuaccaguaucugauuauccagaacaccacgugggaggaccauugucaguuuucuagacccuccccuaucggguaccucggacugcuuagccaacggacacgcgauauuuauaucuccagacggcugcucggcaccuucacauggacccugucugacagcgaaggcaaggauacccccgggggauacugccugacacgcuggaugcucauugaggcugagcugaaauguuuuggcaauacggccguggcuaagugcaacgaaaaacacgacgaggaguucugcgauaugcuuagacuguuugacuucuguaagcaggccauccagcggcucaaagcggaagcccagauguccauucaacugaucaauaaggcugucaacgcccuuaucaaugaucagcugauuaugaagaaccaccuccgcgacaucauggggauuccuuauugcaauuacagcaaauauuguuaccugaaccauaccacaaccggaaagacaucucugcccaaaugcugucucguguccaauggcagcuaccugaacgaaacccacuucucugacgauaucgagcagcaagcugacaauaugauuacggagaugcuucagaaggaauauauggagagacaggggaaaacaccucugggacucguggaucuguuugucuucagcaccuccuuuuaccugaucucuaucuuccuucaucucguuaagauuccgacccaccggcauaucgugggcaaaagcugccccaagccucaccgccugaaccacaugggcauuuguuccugcgggcuguauaagcagcccggagugccugucaaauggaagagaugaggacuagucccuguucccagagcccacuuuuuuuucuuuuuuugaaauaaaauagccugucuuucagaucucaaaggcucuuuucagagccaccaaaaaaaaaaaaaaaaaaaaaaaaaaaaaaaaaaaaaaaaaaaaaaaaaaaaaaaaaaaaaaaaaaaaaaaaaaaaaaaaaaaaaaaaaaaaaaaaaaaaa

SEQ ID NO: 40700 - RNA, 1767 nt, Artificial Sequence
  mRNA product Design a-2 (hSL-A100) comprising derived and/or modified sequence from LASV(G1442-SLE-2011;Clade IV)__AIT17180__GPCmut12 (opt5)
aggagaguccgcucagccagguugcagaagcggcuuagcguguguccuaaucuucucucugcguguagguaggccugugccgcaaacaagcuuaccaugggccagaucgugaccuucuuucaagaggucccccacguuauugaagaggugaugaacaucgugcugauugcccucagcauccuggcuguccuuaaggggcuguacaauguggccacaugcggacucauuggccugguuacguuccuucugcucugugggagauccugcaccacaacccuguauaaaggaguguacgaacugcagacacucgagcugaacauggaaacccuuaauauguguaugccucugucuugcacaaagaacaauagccaucacuauauccgggucggcaacgagaccgggcucgagcugacgcuuaccaauacauccaucauuaaccauaaauuuuguaaucugucugacgcgcacaagaaaaaccucuacgaucaugcucugaugagcaucauuuccaccuuccaccugucuaucccgaauuuuaaccaguaugaagccaugagcugcgacuucaauggaggcaagauuuccgugcaguacaaccucagccacucuuaugccggcgaugcugccaaucauugugggacaguugcuaacggagugcugcaaaccuuuaugcgcauggccuggggcggguccuacaucgcgcuugacagcggaagaggcaacugggauugcauuaugacgucuuaccaguaucugaucauccagaauacaaccugggacgaucacugucaguucucccggcccagcccuauuggguaccucggacugcuuucucaacgcacaagagacgucuauaucucccggcgccugcucggcaccuuuaccuggacacugagcgauuccgagggcaaggacacgcccgggggauacugccugaccagauggaugcucauugaagccgagcugaaauguuucggcaacacagcuguggccaagugcaaugagaaacaugaugaagaguuuugcgacaugcuucggcuguucgauuuuuguaagcaggcuauccagcgccucaaagccgaagcgcagaugucuauucaacugaucaacaaggccgugaaugcucuuaucaacgaccagcugauuaugaagaaucaccucagagacaucauggggauuccuuauugcaacuacagcaaauauuguuaccugaauaacaccgccacaggaaagaccucccugcccaaaugcugucucaucagcaauggcucuuaccugaacgagacgcacuucuccgaugacauugaacaggaggcugauaauaugaucacagagaugcuucaaaaggaauauauggagcggcaggggaaaaccccucugggacucgucgaccuguucguuuuuagcaccucuuucuaccugaucagcauuuuucuucaucucgugaagaucccgacacaccgccauauugugggcaaauccugccccaagccucacagacugaaccauaugggcaucuguucuugcgggcuguauaagcagcccggagucccugugcgguggaaacgcugaggacuagucccuguucccagagcccacuuuuuuuucuuuuuuugaaauaaaauagccugucuuucagaucucaaaggcucuuuucagagccaccaaaaaaaaaaaaaaaaaaaaaaaaaaaaaaaaaaaaaaaaaaaaaaaaaaaaaaaaaaaaaaaaaaaaaaaaaaaaaaaaaaaaaaaaaaaaaaaaaaaaa

SEQ ID NO: 40701 - RNA, 1767 nt, Artificial Sequence
  mRNA product Design a-2 (hSL-A100) comprising derived and/or modified sequence from LASV(G3010-SLE-2013;Clade IV)__AIT17344__GPCmut12 (opt5)
aggagaguccgcucagccagguugcagaagcggcuuagcguguguccuaaucuucucucugcguguagguaggccugugccgcaaacaagcuuaccaugggccagaucgugaccuucuuucaagaggucccccacguuauugaagaggugaugaacaucgugcugauugcccucagcauccuggcuguccuuaaggggcuguacaauuucgccacaugcggacucgugggccugguuacguuucuucugcucugugggagauccugcaccacaucucuguauaaaggaguguacgaacugcagacccucgagcugaacauggaaacacuuaauauguguaugccucugagcugcaccaagaacaauucccaucacuauauuauggucggcaacgagacagggcucgagcugacccuuacgaauaccucuaucaucaaccauaaauucuguaaucugagcgacgcgcacaagaaaaaccucuacaaucaugcucugauguccauuaucucuacauuucaccugagcauuccgaacuucaaucaguaugaagccauguccugcgauuuuaacggaggcaagaucagcgugcaguacaaucucucucacuccuaugccggcgacgcugccagccauugugggaccguugcuaacggagugcugcaaacauucaugcggauggccuggggcgggucuuacauugcgcuugauuccggauacggcaagugggacugcaucaugaccagcuaucaguaccugauuauccagaacacgacaugggaggaucacugucaguuuucucgccccuccccuaucggguaucucggacugcuuagccaaagaacccgggacauuuacaucucccgcagacugcucggcacauucaccuggacccugucugauagcgaaggcaaagacacacccgggggauauugccugacgcgguggaugcucauugaggccgagcugaaguguuuuggcaauaccgcugucgccaaaugcaacgaaaagcaugaugaggaguucugcgacaugcuucgccuguuugauuucuguaaacaggcuauccagagacucaagacagaagcccagauguccauucaacugaucaauaaggcggugaacgcccuuaucaaugaccagcugauuaugaaaaaccaccuccgggauaucauggggauuccuuacugcaauuauagcaaguacuguuaccugaaccacaccacaaccggaaaaacgucucugcccaagugcugucucguguccaauggcagcuaucugaacgaaacacauuucucugacgacaucgagcagcaagcugauaauaugauuaccgagaugcuucagaaagaauacauggagcgccaggggaagaccccucugggacucgucgaccuguuuguuuucagcacauccuuuuaucugaucucuaucuuccuucaccucgugaaaauuccgacccauagacacaucgugggcaagagcugccccaagccucaucggcugaaccacaugggcauuuguuccugcgggcuguacaaacagcccggagucccugugcgcuggaagagaugaggacuagucccuguucccagagcccacuuuuuuuucuuuuuuugaaauaaaauagccugucuuucagaucucaaaggcucuuuucagagccaccaaaaaaaaaaaaaaaaaaaaaaaaaaaaaaaaaaaaaaaaaaaaaaaaaaaaaaaaaaaaaaaaaaaaaaaaaaaaaaaaaaaaaaaaaaaaaaaaaaaaa

SEQ ID NO: 40702 - RNA, 1767 nt, Artificial Sequence
  mRNA product Design a-2 (hSL-A100) comprising derived and/or modified sequence from LASV(G502-SLE-2009;Clade IV)__AIT17126__GPCmut12 (opt5)
aggagaguccgcucagccagguugcagaagcggcuuagcguguguccuaaucuucucucugcguguagguaggccugugccgcaaacaagcuuaccaugggccagaucgugaccuucuuucaagaggucccccacguuauugaagaggugaugaacaucgugcugauugcccucagcauccuggcuguccuuaaggggcuguacaauuucgccacaugcggacucgugggccugcuuacguuucugcuccugugugggagauccugcaccacaggacuguauaaaggcguuuacgaacuccagacccuggagcuuaacauggaaacacugaauauguguaugccucucucuugcaccaagaacaauagccaucacuauauuaugguggggaacgagacaggacuggagcuuacccugacgaauaccuccaucaucaaccauaaauucuguaaucucucugacgcgcacaagaaaaaccuguacgaucaugcucugaugagcauuaucuccacauuucaccucucuauuccgaauuucaaccaguaugaagccaugagcugcgacuuuaauggcggcaagaucuccguccaguacaaccugagccacucuuaugccggggaugcugccgaccauuguggaaccguggcuaauggcguucuucaaacauucaugcggauggccuggggaggguccuacauugcgcuggauagcggccgcgggagaugggacugcaucaugaccucuuaccaguaucucauuauccagaacacgacaugggaggaucacugucaguuuucccggcccagcccuaucggauaccugggccuucugucucaacgcaccagagacauuuauaucucccggcgccuccugggcacauucaccuggacccugagcgauuccgaagggaaggacacacccggaggcuacugccucacgagauggaugcugauugaggccgagcuuaaauguuuugggaacaccgcuguggccaagugcaaugaaaaacaugaugaggaguucugcgacaugcugcggcucuuugauuucuguaagcaggcuauccagcgccugaaagccgaagcgcagaugucuauucaacuuaucaacaaggccgucaaugcucugaucaacgaccagcucgugaugaagaaucaccugagagacauuaugggaaucccuuauugcaacuacagccgguauuguuaccugaaucacacaaccacaggccgcaccucccuccccaaaugcugucuggugagcaacgggucuuaccuuaaugaaacgcauuucuccgaugacauugagcagcaagccgauaacaugaucacagagaugcugcagaaggaauauauggagagacagggaaaaaccccucucggccuggucgaccuguuuguuuucagcaccucuuuuuaccuuauuagcaucuuccuccaccuggugaagaucccgacacaucggcacauugugggcaaauccugccccaagccucaucgccugaaucacauggggaucuguucuugcggacucuauaaacagcccggcgucccugugaaguggaagagaugaggacuagucccuguucccagagcccacuuuuuuuucuuuuuuugaaauaaaauagccugucuuucagaucucaaaggcucuuuucagagccaccaaaaaaaaaaaaaaaaaaaaaaaaaaaaaaaaaaaaaaaaaaaaaaaaaaaaaaaaaaaaaaaaaaaaaaaaaaaaaaaaaaaaaaaaaaaaaaaaaaaaa

SEQ ID NO: 40703 - RNA, 1767 nt, Artificial Sequence
  mRNA product Design a-2 (hSL-A100) comprising derived and/or modified sequence from LASV(G733-SLE-2010;Clade IV)__AIT17154__GPCmut12 (opt5)
aggagaguccgcucagccagguugcagaagcggcuuagcguguguccuaaucuucucucugcguguagguaggccugugccgcaaacaagcuuaccaugggccagaucgugaccuucuuucaagaggucccccacguuauugaagaggugaugaacaucgugcugauugcccucagcauccuggcuguccuuaaggggcuguacaauuucgccacaugcggaauugugggccucguuuccuuucugcuucugugugggagaucuugcacgaccagccucuauaaaggaguguacgaacugcagacacuggagcucaacauggaaacccugaauauguguaugccucuuuccugcacaaagaacaauucucaucacuauaucauggucggcaacgagaccgggcuggagcucacacugaccaauacgagcaucauuaaccauaaauucuguaaucuuuccgacgcgcacaagaaaaaccuguacgaucaugcucucaugucuaucauuagcaccuuucaccuguccaucccgaauuucaaccaguaugaagccaugagcugcgacuuuaauggaggcaagauuucugugcaguacaaccugucccacagcuaugccggcgaugcugccaaucauugugggacaaucgcuaacggaguucuccaaaccuucaugcggauggccuggggcgggucuuacauugcgcuggacuccggacgcgauagaugggacugcaucaugacaagcuaccaguaucuuaucauucagaacaccacgugggaggaucacugucaguuuucucggcccuccccuaucggcuaccuggggcuccugagccaacgcacaagagacauuuauaucucccggcgccuucugggaaccuucacauggacccucucugauagcgaaggcaaggacacccccggcggguacugccugacaagauggaugcugauugaggccgagcucaaauguuuuggaaauacggcuguggccaagugcaacgaaaaacaugaugaggaguucugcgacaugcugcggcuuuuugauuucuguaagcaggcuauccagcgccugaaagccgaagcgcagauguccauccaacucauuaauaaggccgucaacgcucugaucaaugaccagcuuauuaugaagaaccaccugagagacaucaugggcauuccuuauugcaauuacagcaaauauuguuaccucaaccacaccacaaccgggaagacaucucugcccaaaugcugucugguguccaauggaagcuaccucaacgaaacccauuucucugaugacaucgagcagcaagccgauaauaugaucacggagaugcugcagaaggaauauauggagcggcagggcaaaacaccucuugggcugguggaccucuuugucuucagcaccuccuuuuaccugauuucuaucuuccugcaccuuguuaagauuccgacccaucgccacguggugggaaaaagcugccccaagccucauagacucaaccacaugggcaucuguuccugcggccuguaugggcagcccggagucccugugaaguggaaacggugaggacuagucccuguucccagagcccacuuuuuuuucuuuuuuugaaauaaaauagccugucuuucagaucucaaaggcucuuuucagagccaccaaaaaaaaaaaaaaaaaaaaaaaaaaaaaaaaaaaaaaaaaaaaaaaaaaaaaaaaaaaaaaaaaaaaaaaaaaaaaaaaaaaaaaaaaaaaaaaaaaaaa

SEQ ID NO: 40704 - RNA, 1767 nt, Artificial Sequence
  mRNA product Design a-2 (hSL-A100) comprising derived and/or modified sequence from MOPV/LASV reassortant(IGS-1;Clade IV)__AFY05576__GPCmut12 (opt5)
aggagaguccgcucagccagguugcagaagcggcuuagcguguguccuaaucuucucucugcguguagguaggccugugccgcaaacaagcuuaccaugggccagaucgugaccuucuuucaagaggucccccacguuauugaagaggugaugaacaucgugcugauugcccucagcguccuggcugugcuuaaggggcuguacaauuucgccacaugcggacucguuggccuggugacguuucuucugcucugugggagauccugcaccacaucucuguauaaaggagucuacgaacugcagacccucgagcugaacauggaaacacuuaauauguguaugccucugagcugcaccaagaacaauucccaucacuauaucauggugggcaacgagacagggcucgagcugacccuuacgaauaccucuauuaucaaccauaaauucuguaaucugagcgacgcgcacaagaaaaaccucuacgaucaugcucugauguccaucauuucuacauuucaccugagcaucccgaauuucaaccaguaugaagccauguccugcgacuuuaauggaggcaagauuagcguucaguacaaccucucucacuccuaugccggcgaugcugccaaucauugugggaccguggcuaacggaguccugcaaacauucaugcggauggccuggggcgggagcuacaucgcgcuugacucuggacgcggcaacugggauugcauuaugaccuccuaccaguaucugaucauucagaauacgacaugggaggaccacugucaguuuagcagacccucuccuaucggguaccucggacugcuuucccaacggacccgcgauaucuauauuagcagacggcugcucggcacauucaccuggacccuguccgacucugaaggcgaggauacacccgggggauacugccugacgcgcuggaugcucaucgaggccgaacugaaguguuuuggcaacaccgcuguggccaaaugcaaugagaagcaugacgaagaguucugcgauaugcuuagacuguuugacuucuguaaacaggcuauucagcggcucaaggccgaagcgcagaugagcauccaacugauuaacaaagccgugaaugcucuuaucaacgaucagcugaucaugaagaaucaccuccgcgacauuauggggaucccuuauugcaacuacuccaaguauuguuaccugaaucacacaaccacaggaagaaccagccugcccaaaugcugucucgucucuaacggcuccuaccugaaugagacgcauuucagcgacgauauugagcagcaagccgacaacaugaucacagaaaugcuucagaaggaguauauggaacggcaggggaaaaccccucugggacucguugaucuguuuguguucucuaccagcuuuuaccugauuuccaucuuccuucaccucgugaagaucccgacacaucgccacauugucggcaaaucuugccccaagccucauagacugaaucacaugggcaucuguagcugcgggcuguauaaacagcccggagugccuguuaaguggaagcggugaggacuagucccuguucccagagcccacuuuuuuuucuuuuuuugaaauaaaauagccugucuuucagaucucaaaggcucuuuucagagccaccaaaaaaaaaaaaaaaaaaaaaaaaaaaaaaaaaaaaaaaaaaaaaaaaaaaaaaaaaaaaaaaaaaaaaaaaaaaaaaaaaaaaaaaaaaaaaaaaaaaaa

SEQ ID NO: 40705 - RNA, 1767 nt, Artificial Sequence
  mRNA product Design a-2 (hSL-A100) comprising derived and/or modified sequence from LASV(LM765-SLE-2012;Clade IV)__AIT17814__GPCmut12 (opt5)
aggagaguccgcucagccagguugcagaagcggcuuagcguguguccuaaucuucucucugcguguagguaggccugugccgcaaacaagcuuaccaugggccagaucgugaccuucuuucaagaggucccccacguuauugaagaggugaugaacaucgugcugauugcccucagcauccuggcuguccuuaaggggcuguacaauuucgccacaugcggacucgugggccugguuacguuucuucugcucugugggagauccugcaccacaucucuguauaaaggaguguacgaacugcagacccucgagcugaacauggaaacacuuaauauguguaugccucugagcugcaccaagaacaauucccaucacuauauuauggucggcaacgagacagggcucgagcugacccuuacgaauaccucuaucaucgaccauaaauucuguaaccugagcgaugcgcaccggaagaaucucuacgaccaugcucugauguccauuaucucuacauuucaccugagcauuccgaacuucaaucaguaugaagccauguccugcgauuuuaacggaggcaaaaucagcgugcaguacaaucucucucacuccuaugccaaggacgcugccgaucauuguggcaccguugcuaacggggugcugcaaacauucaugcgcauggccuggggaggcagcuacauugcgcuugacucugggagaggacggugggauugcaucaugaccuccuaccaguaucugauuauccagaauacgacaugggaggaccacugucaguuuagccgccccucuccuaucggcuaccucgggcugcuuucccaaagaacccgggauauuuauaucagccgcagacugcucggaacauucaccuggacccuguccgacucugaaggcaaggauacacccggcggguacugccugacgcgguggaugcucauugaggccgagcugaaauguuuuggaaacaccgcugucgccaagugcaacgaaaaacaugacgaggaguucugcgauaugcuucgccuguuugacuucuguaagcaggcuauccagagacucaaagccgaagcgcagaugagcauucaacugaucaauaaggccgugaacgcucuuaucaaugaccagcugauuaugaagaaccaccuccgggauaucaugggcauuccuuauugcaauuacuccaaauauuguuaccugaaccacacaaccacagggaagaccagccugcccaaaugcugucucgugucuaauggauccuaccugaacgaaacgcauuucagcgacgauaucgagcagcaagccgacaauaugauuacagagaugcuucagaaggaauauauggagcgccagggcaaaaccccucuggggcucgucgaucuguuuguuuucucuaccagcuuuuaccugaucuccaucuuccuucaccucgugaagauuccgacacauagacacaucgugggaaaacccugcccuaagccccaucggcugaaccacaugggcauuuguucuugcggccuguauaagcagccugggguccccgugaaauggaagcgcugaggacuagucccuguucccagagcccacuuuuuuuucuuuuuuugaaauaaaauagccugucuuucagaucucaaaggcucuuuucagagccaccaaaaaaaaaaaaaaaaaaaaaaaaaaaaaaaaaaaaaaaaaaaaaaaaaaaaaaaaaaaaaaaaaaaaaaaaaaaaaaaaaaaaaaaaaaaaaaaaaaaaa

SEQ ID NO: 40706 - RNA, 1767 nt, Artificial Sequence
  mRNA product Design a-2 (hSL-A100) comprising derived and/or modified sequence from LASV(LM776-SLE-2012;Clade IV)__AIT17824__GPCmut12 (opt5)
aggagaguccgcucagccagguugcagaagcggcuuagcguguguccuaaucuucucucugcguguagguaggccugugccgcaaacaagcuuaccaugggccagaucgugaccuucuuucaagaggucccccacguuauugaagaggugaugaacaucgugcugauugcccucagcauccuggcuguccuuaaggggcuguacaauuucgccacaugcggacucgugggccugguuacguuucuucugcucugugggagauccugcaccacaucuguguauaaaggagucuacgaacugcagacccuggagcucaacauggaaacacugaauauguguaugccucuuagcugcaccaagaacaauucccaucacuauauuauggugggcaacgagacagggcuggagcucacccugacgaauaccucuaucaucaaccauaaauucuguaaucuuagcgacgcgcacaagaaaaaccuguacgaucaugcucucauguccauuaucucuacauuucaccugagcauuccgaauuucaaccaguaugaagccauguccugcgacuuuaauggaggcaagaucagcguucaguacaaccugucucacuccuaugccggcgaugcugccaaucauugugggaccguggcuaacggaguccuccaaacauucaugcggauggccuggggcgggagcuacauugcgcuggacucuggacacggcaagugggauugcaucaugaccuccuaccaguaucuuauuauccagaacacgacaugggaggaccauugucaguuuagccgccccucuccuaucggguaccugggacuccugucccaaagaacccgggauauuuauaucagccgcagacuucugggcacauucaccuggacccucuccgacucugaaggcaaagauacacccgggggauacugccugacgcgguggaugcugauugaggccgagcucaaguguuuuggcaauaccgcuguggccaaaugcaacgaaaagcacgacgaggaguucugcgauaugcugcgccuuuuugacuucuguaaacaggcuauccagagacugaaggccgaagcgcagaugagcauucaacucaucaauaaggccgugaacgcucugaucaaugaucagcuuauuaugaaaaaccaucugcgggacaucauggggauuccuuauugcaauuacuccaaguauuguuaccucaaccacacaaccacaggaaaaaccagccugcccaagugcugucuggucucuaauggcuccuaccucaacgaaacgcacuucagcgacgauaucgagcagcaagccgacaauaugauuacagagaugcugcagaaagaauauauggagcgccaggggaagaccccucuuggacugguugaucucuuuguguucucuaccagcuuuuaccugaucuccaucuuccugcaucuugugaaaauuccgacacacagacauaucgucggcaagucuugccccaagccucaccggcucaaccacaugggcauuuguagcugcgggcuguauaaacagcccggagugccuguucgcuggaagagaugaggacuagucccuguucccagagcccacuuuuuuuucuuuuuuugaaauaaaauagccugucuuucagaucucaaaggcucuuuucagagccaccaaaaaaaaaaaaaaaaaaaaaaaaaaaaaaaaaaaaaaaaaaaaaaaaaaaaaaaaaaaaaaaaaaaaaaaaaaaaaaaaaaaaaaaaaaaaaaaaaaaaa

SEQ ID NO: 40707 - RNA, 1767 nt, Artificial Sequence
  mRNA product Design a-2 (hSL-A100) comprising derived and/or modified sequence from LASV(Mad39;Clade IV)__ANH09722__GPCmut12 (opt5)
aggagaguccgcucagccagguugcagaagcggcuuagcguguguccuaaucuucucucugcguguagguaggccugugccgcaaacaagcuuaccaugggccagaucgugaccuucuuucaagaggucccccacguuauugaagaggugaugaacaucgugcugauugcccucagcauccuggcuguccuuaaggggcuguacaauguggccacaugcggacucauuggccugguuacguuccuucugcucugugggagauccugcaccacaacccuguauaaaggaguguacgaacugcaggcgcucgagcugaacauggaaacacuuaauauguguaugccucugucuugcaccaagaacaauagccaucacuauauccgggucggcaacgagacagggcucgagcugacccuuacgaauaccucccugaucaaccauaaauuuuguaaucucucugacgcucacaagaaaaaccuguacgaucaugcccugaugagcauuaucuccacauuccaccucucuauuccgaauuuuaaccaguaugaagccaugagcugcgacuucaaugauggaaagaucuccgugcaguacaaccugagccacaccuaugcuggcgacacagccaaucauuguggcaccguugcuaacggggugcuucaaacguuuaugcgcauggccuggggaggcucuuacauugcgcuggauuccgggagaggaggcugggacugcaucaugacaagcuaccaguaucucauuauccagaacaccacaugggaggaucacugucaguucucucggcccuccccuaucggguaccugggacuucugagccaacgcaccagagacauuuauaucucucggcgccuccugggcaccuuuacauggacgcuguccgauagcgaaggcaaggacacccccgggggauacugccucacaagauggaugcugauugaggccgagcuuaaauguuucggcaauaccgcugucgccaagugcaacgaaaaacaugaugaggaauuuugcgacaugcugcgccucuucgauuuuuguaagcaggcuauccagcggcugaaagccgaggcgcagauguccauucaacuuaucaauaaggccgugaacgcucugaucaaugaccagcucauuaugaagaaccaccugagagacaucauggggauuccuuauugcaauuacucuaaauauuguuaccugaaccacacagugaccggaaagacgagccuccccaaaugcugucuggucuccaauggcagcuaccuuaacgaaacacauuucucugaugacaucgagcagcaagccgauaauaugauuaccgagaugcugcagaaggaauauauggagcggcaggggaaaaccccucucggacugguugaccuguucguguuuuccaccagcuucuaccuuaucucuaucuuucuccaccuggugaagauuccgacacaucgccacgucgugggcaaacccugcccuaagccccauagacugaaccacaugggcaucuguagcugcggguucuauaagcagccuggaguucccgugcgguggaaacgcugaggacuagucccuguucccagagcccacuuuuuuuucuuuuuuugaaauaaaauagccugucuuucagaucucaaaggcucuuuucagagccaccaaaaaaaaaaaaaaaaaaaaaaaaaaaaaaaaaaaaaaaaaaaaaaaaaaaaaaaaaaaaaaaaaaaaaaaaaaaaaaaaaaaaaaaaaaaaaaaaaaaaa

SEQ ID NO: 40708 - RNA, 1767 nt, Artificial Sequence
  mRNA product Design a-2 (hSL-A100) comprising derived and/or modified sequence from LASV(Z0947-SLE-2011;Clade IV)__AIT17840__GPCmut12 (opt5)
aggagaguccgcucagccagguugcagaagcggcuuagcguguguccuaaucuucucucugcguguagguaggccugugccgcaaacaagcuuaccaugggccagaucgugaccuucuuucaagaggucccccacguuauugaagaggugaugaacaucgugcugauugcccucagcauccuggcuguccuuaaggggcuguacaauuucgccacaugcggacucgugggccugguuacguuucuucugcucugugggagauccugcaccauuucucuguauaaaggaguguacgaacugcagacacucgagcugaacauggaaacccuuaauauguguaugccucugagcugcacaaagaacaauucccaucacuauaucauggucggcaacgagaccgggcucgagcugacacuuaccaauacgucuaucauuaaccauaaauucuguaaucugagcgacgcgcacaagaaaaaccucuacgaucaugcucugauguccaucauuucuaccuuucaccugagcaucccgaauuucaaccaguaugaagccauguccugcgacuuuaauggaggcaagauuagcgugcaguacaaccucucucacuccuaugccggcgaugcugccaaucauugugggacaguugcuaacggagugcugcaaaccuucaugcggauggccuggggcgggagcuacaucgcgcuugacucuggacgcgauagaugggacugcauuaugacauccuaccaguaucugaucauccagaacaccacgugggaggaucacugucaguuuagccggcccucuccuauuggcuaccucgggcugcuuucccaacgcacaagagacaucuauauuagccggcgccugcucggaaccuucacauggacccuguccgauucugaaggcaaggacacccccggcggguacugccugacaagauggaugcucaucgaggccgagcugaaauguuuuggaaauacggcugucgccaagugcaacgaaaaacaugaugaggaguucugcgacaugcuucggcuguuugauuucuguaagcaggcuauucagcgccucaaagccgaagcgcagaugagcauccaacugaucaauaaggccgugaacgcucuuauuaaugaccagcugaucaugaagaaccaccucagagacauuaugggcaucccuuauugcaauuacuccaaauauuguuaccugaaccacaccacaaccgggaagacaagccugcccaaaugcugucucgugucuaauggauccuaccugaacgaaacccauuucagcgaugacauugagcagcaagccgauaauaugaucacggagaugcuucagaaggaauauauggagcggcagggcaaaacaccucuggggcucgucgaccuguuuguuuucucuaccagcuuuuaccugaucuccauuuuccuucaccucgugaagaucccgacccaucgccacauugugggaaaacccugcccuaagccccauagacugaaccacaugggcaucuguucuugcggccuguauaagcagccugggguccccgugaaauggaagcggugaggacuagucccuguucccagagcccacuuuuuuuucuuuuuuugaaauaaaauagccugucuuucagaucucaaaggcucuuuucagagccaccaaaaaaaaaaaaaaaaaaaaaaaaaaaaaaaaaaaaaaaaaaaaaaaaaaaaaaaaaaaaaaaaaaaaaaaaaaaaaaaaaaaaaaaaaaaaaaaaaaaaa

SEQ ID NO: 40709 - RNA, 1743 nt, Artificial Sequence
  mRNA product Design a-2 (A100) comprising derived and/or modified sequence from LASV(Josiah;Clade IV)__NP_694870__GPCmut12 (opt1)
aggagaguccgcucagccagguugcagaagcggcuuagcguguguccuaaucuucucucugcguguagguaggccugugccgcaaacaagcuuaccaugggccagaucgugaccuucuuccaggaggucccccacgugaucgaggaggugaugaacaucguccugaucgcccucagcgugcuggccgugcugaaggggcucuacaacuucgcgaccugcggccuggucgggcuggugacguuccuccugcugugcggccgcuccugcaccaccagccucuacaaggggguguacgagcugcagacccuggagcucaacauggagacgcugaacaugugcaugccgcuguccugcaccaagaacaacagccaccacuacaucauggucggcaacgagaccggccucgagcugacgcugaccaacaccuccaucaucaaccacaaguucugcaaccucagcgacgcccacaagaagaaccuguacgaccacgcccugauguccaucaucagcaccuuccaccucuccauccccaacuucaaccaguacgaggccaugagcugcgacuucaacgggggcaagaucuccgugcaguacaaccugagccacuccuacgccggggacgcggccaaccacugcggcacgguggccaacgggguccugcagaccuucaugcggauggccuggggcggcagcuacaucgcgcucgacuccgggcgcggcaacugggacugcaucaugaccagcuaccaguaccugaucauccagaacaccacgugggaggaccacugccaguucucccggcccagccccaucggguaccugggccuccugucccagcgcacccgggacaucuacaucagccgccggcugcucggcaccuucaccuggacgcugagcgacuccgaggggaaggacaccccgggcggguacugccugacccgcuggaugcucaucgaggccgagcugaagugcuucggcaacaccgccguggccaagugcaacgagaagcacgacgaggaguucugcgacaugcugcggcuguucgacuucugcaagcaggccauccagcgccugaaggcggaggcccagaugagcauccagcugaucaacaaggccgugaacgcccucaucaacgaccagcugaucaugaagaaccaccuccgggacaucauggggauccccuacugcaacuacuccaaguacugcuaccucaaccacacgaccaccggccgcaccagccugcccaagugcugccuggucuccaacggcagcuaccucaacgagacgcacuucuccgacgacaucgagcagcaggccgacaacaugaucaccgagaugcugcagaaggaguacauggagcggcaggggaagacgccccugggccucguggaccuguucguguucagcaccuccuucuaccugaucagcaucuuccugcaccucgucaagaucccgacccaccgccacaucguggggaaguccugccccaagccccaccggcugaaccacaugggcaucugcagcugcgggcuguacaagcagcccggcgugccggucaaguggaagcgcugaggacuagucccuguucccagagcccacuuuuuuuucuuuuuuugaaauaaaauagccugucuuucagaucuaaaaaaaaaaaaaaaaaaaaaaaaaaaaaaaaaaaaaaaaaaaaaaaaaaaaaaaaaaaaaaaaaaaaaaaaaaaaaaaaaaaaaaaaaaaaaaaaaaaa

SEQ ID NO: 40710 - RNA, 1740 nt, Artificial Sequence
  mRNA product Design a-2 (A100) comprising derived and/or modified sequence from LASV(LP;Clade I)__AAF86701__GPCmut12 (opt1)
aggagaguccgcucagccagguugcagaagcggcuuagcguguguccuaaucuucucucugcguguagguaggccugugccgcaaacaagcuuaccaugggccagaucaucaccuucuuccaggaggugccccacgucaucgaggaggugaugaacaucgugcugaucgcccucagccugcuggccauccucaaggggcuguacaacaucgcgaccugcggcaucaucgggcuggucgccuuccucuuccugugcggcaaguccugcagccugacgcucaagggcggguacgagcugcagacccuggagcucaacauggagacccugaacaugugcaugccgcuguccugcacgaagaacagcucccaccacuacauccgcgugggcaacgagaccgggcucgagcugacccugaccaacacgagcaucaucaaccacaaguucugcaaccucuccgacgcccacaagaagaaccuguacgaccacgcccugaugagcaucaucuccaccuuccaccucagcauccccaacuucaaccaguacgaggccauguccugcgacuucaacggcgggaagaucagcgugcaguacaaccugucccacagcuacgcgggcgacgccgccgagcacugcgggaccgucgccaacggcgugcugcagaccuucaugcggauggcguggggcgggcgcuacaucgcccucgacuccggcaaggggaacugggacugcaucaugacgagcuaccaguaccugaucauccagaacaccaccugggaggaccacugccaguucucccggcccagccccaucggcuaccugggccuccugucccagcgcacccgggacaucuacaucagccgccggcugcucgggacguucaccuggacccugagcgacuccgagggcaacgagacccccgggggcuacugccugacgcgcuggaugcucaucgaggccgagcugaagugcuucgggaacaccgccguggccaagugcaacgagaagcacgacgaggaguucugcgacaugcugcggcuguucgacuucugcaagcaggcgauccgccggcugaaggccgaggcccagaugagcauccagcugaucaacaaggccgucaacgcccucaucaacgaccagcugaucaugaagaaccaccuccgcgacaucaugggcauccccuacugcaacuacuccaaguacugcuaccucaaccacaccagcuccggccggaccagccugcccaagugcugccugaucuccaacgggagcuaccucaacgagacgcaguucuccgacgacaucgagcagcaggcggacaacaugaucaccgagaugcugcagaaggaguacaucgagcgccagggcaagaccccgcuggggcucguggacaucuucaucuucagcaccuccuucuaccugaucagcaucuuccugcaccugaucaagaucccgacgcaccggcacaucgugggcaagcccugccccaagccccaccgccucaaccacaugggggucugcuccugcggccuguacaagcacccgggcgugcccaccaaguggaagcggugaggacuagucccuguucccagagcccacuuuuuuuucuuuuuuugaaauaaaauagccugucuuucagaucuaaaaaaaaaaaaaaaaaaaaaaaaaaaaaaaaaaaaaaaaaaaaaaaaaaaaaaaaaaaaaaaaaaaaaaaaaaaaaaaaaaaaaaaaaaaaaaaaaaaa

SEQ ID NO: 40711 - RNA, 1740 nt, Artificial Sequence
  mRNA product Design a-2 (A100) comprising derived and/or modified sequence from LASV(803213;Clade II)__AAF86703__GPCmut12 (opt1)
aggagaguccgcucagccagguugcagaagcggcuuagcguguguccuaaucuucucucugcguguagguaggccugugccgcaaacaagcuuaccaugggccagaucaucaccuucuuccaggaggugccccacgucaucgaggaggugaugaacaucgugcugaucgcccucagccugcuggccauccucaaggggaucuacaacgucgcgaccugcggccuguucgggcugaucuccuuccuccugcugugcggccgcagcugcuccgugacguacaaggggguguacgagcuccagacccuggagcugaacauggccaaccucaacaugugcaugccgcugagcugcaccaagaacaacucccaccacuacaucauggucggcaacgagacgggccuggagcucacccugaccaacaccagcaucaucaaccacaaguucugcaaccuguccgacgcccacaagaagaaccucuacgaccacgcccugaugagcaucaucuccacguuccaccugagcauccccaacuucaaccaguacgaggccauguccugcgacuucaacgggggcaagaucagcgugcaguacaaccucucccacagcuucgcgguggacgccgccaaccacugcgggaccaucgccaacggcguccugcagaccuucaugcggauggcguggggcggguccuacaucgcccuggacagcggcaaggggaacugggacugcaucaugaccuccuaccaguaccucaucauccagaacacgaccugggaggaccacugccaguucagccgccccucccccaucggcuaccuggggcugcucagccagcggacccgcgacaucuacaucagccggcgccugcugggcaccuucacguggacccucuccgacagcgagggcaacgaggcccccgggggcuacugccugacccgguggaugcugaucgaggccgagcucaagugcuucgggaacaccgccguggcgaagugcaacgagaagcacgacgaggaguucugcgacaugcugcgccuguucgacuucugcaagcaggccaucaagcggcucaagacggaggcccagauguccauccagcugaucaacaaggccgugaacgcccugaucaacgaccagcucaucaugaagaaccaccuccgcgacaucaugggcauccccuacugcaacuacagccgguacugcuaccugaaccacaccgucaccgggaagaccucccugccccgcugcugccuggugagcaacggcuccuaccugaacgagacgcacuucagcgacgacaucgagcagcaggcggacaacaugaucaccgagaugcuccagaaggaguacauggaccggcagggcaagaccccgcuggggcugguggaccucuucgucuucuccaccagcuucuaccugaucuccaucuuccugcaccuggugaagaucccgacgcaccgccacaucgugggcaagcccugccccaagccccaccggcucaaccacauggggaucugcagcugcggccuguacaagcacccggggguccccgugaaguggaagcgcugaggacuagucccuguucccagagcccacuuuuuuuucuuuuuuugaaauaaaauagccugucuuucagaucuaaaaaaaaaaaaaaaaaaaaaaaaaaaaaaaaaaaaaaaaaaaaaaaaaaaaaaaaaaaaaaaaaaaaaaaaaaaaaaaaaaaaaaaaaaaaaaaaaaaa

SEQ ID NO: 40712 - RNA, 1740 nt, Artificial Sequence
  mRNA product Design a-2 (A100) comprising derived and/or modified sequence from LASV(GA391;Clade III)__CAA36645__GPCmut12 (opt1)
aggagaguccgcucagccagguugcagaagcggcuuagcguguguccuaaucuucucucugcguguagguaggccugugccgcaaacaagcuuaccaugggccagaucgugaccuucuuccaggaggucccccacgugaucgaggaggugaugaacaucguccugaucgcccucagcauccuggccauccugaaggggcucuacaacguggcgaccugcggccugaucgggcuggugacguuccuccugcuguccggccgcagcugcucccucaucuacaaggggaccuacgagcugcagacccuggagcucaacauggagacccugaacaugugcaugccgcugagcugcaccaagaacaacucccaccacuacauccgggucggcaacgagaccggccucgagcugacccugacgaacaccagcauccucaaccacaaguucugcaaccuguccgacgcccacaagcgcaaccuguacgaccacagccucauguccaucaucagcaccuuccaccuguccauccccaacuucaaccaguacgaggccaugagcugcgacuucaacgggggcaagaucaccgugcaguacaaccugucccacagcuucgccguggacgccgcggggcacugcggcacgcucgccaacgggguccugcagaccuucaugcggauggccuggggcggcuccuacaucgcccuggacagcgggcgcggcaacugggacugcaucaugaccuccuaccaguaccucaucauccagaacaccacgugggacgaccacugccaguucagccggcccucccccaucggguaccugggccugcucagccagcgcacccgggacaucuacaucagccgccggcugcugggcaccuucaccuggacgcucuccgacagcgaggggaacgagaccccgggcggguacugccugacccgcuggaugcugaucgaggcggagcucaagugcuucggcaacaccgccguggccaagugcaacgagaagcacgacgaggaguucugcgacaugcugcggcuguucgacuucugcaagcaggccauccgccggcucaagacggaggcccagauguccauccagcugaucaacaaggcggugaacgcccugaucaacgaccagcucaucaugaagaaccaccuccgcgacaucauggggauccccuacugcaacuacagccgguacugcuaccugaaccacaccuccaccggcaagaccagccugccccgcugcugccugaucuccaacggcagcuaccugaacgagacgaaguucuccgacgacaucgagcagcaggccgacaacaugaucaccgagaugcuccagaaggaguacaucgaccggcaggggaagacgccccugggccuggucgaccuguucguguucagcaccuccuucuaccucaucagcaucuuccugcaccuggugaagaucccgacccaccgccacaucgucgggaagcccugccccaagccccaccggcucaaccacaugggcaucugcuccugcgggcuguacaagcagccgggcgugcccgugcgcuggaagcggugaggacuagucccuguucccagagcccacuuuuuuuucuuuuuuugaaauaaaauagccugucuuucagaucuaaaaaaaaaaaaaaaaaaaaaaaaaaaaaaaaaaaaaaaaaaaaaaaaaaaaaaaaaaaaaaaaaaaaaaaaaaaaaaaaaaaaaaaaaaaaaaaaaaaa

SEQ ID NO: 40713 - RNA, 1743 nt, Artificial Sequence
  mRNA product Design a-2 (A100) comprising derived and/or modified sequence from LASV(AV;Clade V)__CCA30314__GPCmut12 (opt1)
aggagaguccgcucagccagguugcagaagcggcuuagcguguguccuaaucuucucucugcguguagguaggccugugccgcaaacaagcuuaccaugggccagaucgugaccuucuuccaggaggucccccacgugaucgaggaggugaugaacaucguccugaucgcccucagcauccuggccgugcugaaggggcucuacaacaucgcgaccugcggccugaucgggcugaucacguuccuccugcugugcggccgcuccugcagcuccaaccucuacaaggggguguacgagcugcagagccuggaccucaacauggagacccugaacaugugcaugccgcuguccugcaccaagaacaacagccaccacuacauccgggucggcaacgacacgggccucgagcugacccugaccaacaccuccauccucaaccacaaguucugcaaccugagcgacgcccacaagaaggaccuguacgaccacgcccucauguccaucaucagcacguuccaccuguccauccccaacuucaaccaguacgaggccaugagcugcgacuucaacgggggcaagaucuccgugcaguacaaccugagccacuccuacgccaucgacgcggccaaccacugcgggaccguggccaacggcauccuccagaccuucaugcgcauggccuggggcgggagcuacaucgcgcuggacuccggccgggggaacugggacugcaucaugaccagcuaccaguaccugaucauccagaacacgaccugggagaaccacugccaguucucccgccccagccccaucggcuaccucgggcugcugagccagcggacccgcgacaucuacaucucccggcgccuccugggcaccuucacguggacccugagcgacuccgagggcaacgccacccccgggggcuacugccucacccgguggaugcugaucgaggccgagcugaagugcuucgggaacacggccgucgccaagugcaacgagaagcacgacgaggaguucugcgacaugcuccgccuguucgacuucugcaagcaggcgaucagccggcugaaguccgaggcccagaugagcauccagcucaucaacaaggccgugaacgcccugaucaacgaccagcugaucaugaagaaccaccuccgcgacaucaugggcauccccuacugcaacuacuccaaguacugcuaccugaaccacaccaucaccgggaagaccagccugcccaagugcugccucguguccaacggcagcuaccugaacgagacgcacuucuccgacgacaucgagcagcaggccgacaacaugaucaccgagaugcugcagaaggaguacauggagcggcagggcaagaccccgcucgggcuggucgaccuguucguguucagcaccuccuucuaccugaucagcaucuuccuccgccuggugaagaucccgacgcaccggcacaucgucggcaagcccugccccaagccccaccgccugaaccacauggggaucugcuccugcggccucuacaagcagccgggggugcccgugcgguggaagcgcugaggacuagucccuguucccagagcccacuuuuuuuucuuuuuuugaaauaaaauagccugucuuucagaucuaaaaaaaaaaaaaaaaaaaaaaaaaaaaaaaaaaaaaaaaaaaaaaaaaaaaaaaaaaaaaaaaaaaaaaaaaaaaaaaaaaaaaaaaaaaaaaaaaaaa

SEQ ID NO: 40714 - RNA, 1740 nt, Artificial Sequence
  mRNA product Design a-2 (A100) comprising derived and/or modified sequence from LASV(Togo/2016/7082;Clade VI)__AMR44577__GPCmut12 (opt1)
aggagaguccgcucagccagguugcagaagcggcuuagcguguguccuaaucuucucucugcguguagguaggccugugccgcaaacaagcuuaccaugggccagaucaucaccuucuuccaggaggugccccacgucaucgaggaggugaugaacaucgugcugaucgcccucagccugcuggccauccucaagggggucuacaacguggcgaccugcggcaucaucgggcuggugacguuccuguuccucugcggccgcuccugcagccugaucuacaagggguccuacgagcugcagacccucgagcugaacauggagacccugaacaugugcaugccgcucagcugcacgaagaacuccagccaccacuacauccgggucggcaacgagaccggccuggagcugacccucaccaacacguccaucaucaaccacaaguucugcaaccugagcgacgcccacaagcgcaaccuguacgaccacgcccucauguccauccugagcaccuuccaccuguccauccccaacuucaaccaguacgaggccaugagcugcgacuucaacgggggcaagaucuccgugcaguacaaccucagccacgccuacgcgguggacgccgccgagcacugcgggaccgucgccaacggcgugcugcagaccuucaugcggauggcguggggcggguccuacaucgcccuggacagcggccgcgggaacugggacugcaucaugacguccuaccaguaccucaucauccagaacaccaccugggaggaccacugccaguucagccggcccucccccaucggcuaccuggggcugcucagccagcgcacccgggacaucuacaucagccgccggcugcugggcacguucaccuggacccucuccgacagcgagggcaacgagacccccgggggcuacugccugacgcgcuggaugcugaucgaggccgagcucaagugcuucgggaacaccgccguggccaagugcaacgagaagcacgacgaggaguucugcgacaugcugcggcuguucgacuucugcaagcaggcgauccagcgccucaaguccgaggcccagaugagcauccagcugaucaacaaggccgucaacgcccugaucaacgaccagcucaucaugaagaaccaccuccgggacaugaugggcauccccuacugcaacuacuccaaguacugcuaccugaaccacaccagcuccgggcgcaccagccugcccaagugcugccugguguccaacggcagcuaccugaacgagacgcacuucuccgacgacaucgagcagcaggccgacaacaugaucaccgagaugcuccagaaggaguacaucgaccggcagggcaagaccccgcuggggcugguggaccucuucgucuucagcaccuccuucuaccugaucagcaucuuccugcaccugaucaagaucccgacgcaccgccacaucgugggcaagcccugccccaagccccaccggcucaaccacauggggaucugcuccugcggccuguacaagcagccgggggugcccacccgcuggaagcggugaggacuagucccuguucccagagcccacuuuuuuuucuuuuuuugaaauaaaauagccugucuuucagaucuaaaaaaaaaaaaaaaaaaaaaaaaaaaaaaaaaaaaaaaaaaaaaaaaaaaaaaaaaaaaaaaaaaaaaaaaaaaaaaaaaaaaaaaaaaaaaaaaaaaa

SEQ ID NO: 40715 - RNA, 1740 nt, Artificial Sequence
  mRNA product Design a-2 (A100) comprising derived and/or modified sequence from LASV(KAK-428;Clade n.d. (VII))__ANH09740__GPCmut12 (opt1)
aggagaguccgcucagccagguugcagaagcggcuuagcguguguccuaaucuucucucugcguguagguaggccugugccgcaaacaagcuuaccaugggccagaucgugaccuucuuccaggaggucccccacgugaucgaggaggugaugaacaucguccugaucgcccucagccugcuggccauccucaaggggcuguacaacuucgcgaccugcggcgugaucgggcugaucacguuccuccugcugugcggccgcuccugcagcgccaccuacaaggggcaguacgagcuccagacccuggagcugaacauggagucccucaacaugugcaugccgcugagcugcacgaagaacaacucccaccacuacauccgggccggcaacaacaccggccuggagcucacccugaccaacacgagcaucaucucccacaaguucugcaaccugagcgacgcccacaagaagaaccucuacgaccacacccugauguccaucaucaccaccuuccaccugagcauccccaacuucaaccaguacgaggccauguccugcgacuucaacgggggcaagaucagcauccaguacaaccucucccacagcuacgcgggggacgccgcccagcacugcggcacgguggccaacgggguccugcagaccuucaugcgcauggcguggggcggcuccuaccuggcccucgacagcgggcggcgcggcugggacugcaucaucuccagcuaccaguaccugaucauccagaacaccaccugggacgaccacugccaguucucccggcccagccccaucggguaccugggcuucgugagccagaagacgcgcgacaucuacaucucccggcgccuccugggcaccuucaccuggacccugagcgacuccgaggggcacgacaugccgggcggguacugccucacgcgguggaugcugaucgaggccgaccugaagugcuucggcaacaccgccguggccaagugcaacgagaagcacgacgaggaguucugcgacauguggcgccucuucgacuucugcaagcaggcgauccagcggcugaaggccgaggcccagaugaacauccagcugaucaacaaggccgucaacgcccucaucaacgaccagcugaugaugaagaaccaccuccgcgacaucauggggauccccuacugcaacuacagcaaguucugcuaccugaacaacaccaccacgggccggaccucccugccccgcugcugccugaucagcaacggcuccuaccucaacgagacccacuucagcgacgacaucgagcagcaggcggacaacaugaucaccgagaugcugcagaaggaguacauggaccggcaggggaagacgccccugggccucguggaccuguucguguucuccaccagcuucuaccugaucaccaucuuccuccaccuggucaagaucccgacccaccgccacaucguggggaagcccugccccaagccccaccggcugaaccacaugggcaucugcuccugcgggcuguacaagcagccgggcgugcccguccgcuggaagcggugaggacuagucccuguucccagagcccacuuuuuuuucuuuuuuugaaauaaaauagccugucuuucagaucuaaaaaaaaaaaaaaaaaaaaaaaaaaaaaaaaaaaaaaaaaaaaaaaaaaaaaaaaaaaaaaaaaaaaaaaaaaaaaaaaaaaaaaaaaaaaaaaaaaaa

SEQ ID NO: 40716 - RNA, 1740 nt, Artificial Sequence; identical to SEQ ID NO: 40710
  mRNA product Design a-2 (A100) comprising derived and/or modified sequence from LASV(Pinneo-NIG-1969;Clade I)__AIT17836__GPCmut12 (opt1)

SEQ ID NO: 40717 - RNA, 1740 nt, Artificial Sequence
  mRNA product Design a-2 (A100) comprising derived and/or modified sequence from LASV(ISTH0009-NIG-2011;Clade II)__AIT17404__GPCmut12 (opt1)
aggagaguccgcucagccagguugcagaagcggcuuagcguguguccuaaucuucucucugcguguagguaggccugugccgcaaacaagcuuaccaugggccagaucaucaccuucuuccaggaggugccccacgucaucgaggaggugaugaacaucgugcugaucgcccucagccugcuggccauccucaaggggaucuacaacgucgcgaccugcggccuguucgggcugguguccuuccuccugcugugcggccgcagcugcuccacgaccuacaaggggguguacgagcuccagacccuggagcuggacauggccagccucaacaugugcaugccgcuguccugcacgaagaacaacagccaccacuacaucauggucggcaacgagaccggccuggagcucacccugaccaacacguccaucaucaaccacaaguucugcaaccugagcgacgcccacaagaagaaccucuacgaccacgcccugauguccaucaucagcaccuuccaccuguccauccccaacuucaaccaguacgaggccaugagcugcgacuucaacgggggcaagaucuccgugcaguacaaccucagccacgcguacgccguggacgccgccaaccacugcgggaccaucgcgaacggcguccugcagaccuucaugcggauggccuggggcggguccuacaucgcccuggacagcggcaagggguccugggacugcaucaugacgagcuaccaguaccucaucauccagaacaccaccugggaggaccacugccaguucucccgccccagccccaucggcuaccuggggcugcucagccagcggacccgcgacaucuacaucucccggcgccugcugggcacguucaccuggacccucagcgacuccgagggcaacgagacccccgggggcuacugccugacgcgguggaugcugaucgaggccgagcucaagugcuucgggaacaccgccguggcgaagugcaacgagaagcacgacgaggaguucugcgacaugcugcgccuguucgacuucugcaagcaggccauccggcgccucaagaccgaggcccagaugagcauccagcugaucaacaaggccgugaacgcccugaucaacgaccagcucaucaugaagaaccaccuccgggacaucaugggcaucccguacugcaacuacuccaaguacugcuaccugaaccacaccgucacggggaagaccagccugccccgcugcugccugguguccaacggcagcuaccugaacgagacccacuucuccgacgacaucgagcagcaggcggacaacaugaucaccgagcuccugcagaaggaguacauggaccggcagggcaagacgccccuggggcucguggaccuguucgucuucagcaccuccuucuaccugaucagcaucuuccugcaccucaucaagaucccgacccaccgccacaucaccggcaagcccugccccaagccccaccggcugaaccacauggggaucugcuccugcggccuguacaagcacccgggggugcccgugaaguggaagcgcugaggacuagucccuguucccagagcccacuuuuuuuucuuuuuuugaaauaaaauagccugucuuucagaucuaaaaaaaaaaaaaaaaaaaaaaaaaaaaaaaaaaaaaaaaaaaaaaaaaaaaaaaaaaaaaaaaaaaaaaaaaaaaaaaaaaaaaaaaaaaaaaaaaaaa

SEQ ID NO: 40718 - RNA, 1740 nt, Artificial Sequence
  mRNA product Design a-2 (A100) comprising derived and/or modified sequence from LASV(ISTH2010-NIG-2012;Clade II)__AIT17482__GPCmut12 (opt1)
aggagaguccgcucagccagguugcagaagcggcuuagcguguguccuaaucuucucucugcguguagguaggccugugccgcaaacaagcuuaccaugggccagaucaucaccuucuuccaggaggugccccacgucaucgaggaggugaugaacaucgugcugaucgcccucagccugcuggccauccucaaggggaucuacaacgucgcgaccugcggccuguucgggcugguguccuuccuccugcugugcggccgcagcugcuccacgaccuacaaggggguguacgagcuccagacccuggagcuggacauggccagccucaacaugugcaugccgcuguccugcacgaagaacaacagccaccacuacaucauggucggcaacgagaccggccuggagcucacccugaccaacacguccaucaucaaccacaaguucugcaaccugagcgacgcccacaagaagaaccucuacgaccacgcccugauguccaucaucagcaccuuccaccuguccauccccaacuucaaccaguacgaggccaugagcugcgacuucaacgggggcaagaucuccgugcaguacaaccucagccacgcguacgccguggacgccgccaaccacugcgggaccaucgcgaacggcguccugcagaccuucaugcggauggccuggggcggguccuacaucgcccuggacagcggcaagggguccugggacugcaucaugacgagcuaccaguaccucaucauccagaacaucaccugggaggaccacugccaguucucccgccccagccccaucggcuaccuggggcugcucagccagcggacccgcgacaucuacaucucccggcgccugcugggcaccuucacguggacccucagcgacuccgagggcaacgagacccccgggggcuacugccugacccgguggaugcugaucgaggccgagcucaagugcuucgggaacacggccguggcgaagugcaacgagaagcacgacgaggaguucugcgacaugcugcgccuguucgacuucugcaagcaggccauccggcgccucaagaccgaggcccagaugagcauccagcugaucaacaaggccgugaacgcccugaucaacgaccagcucaucaugaagaaccaccuccgggacaucaugggcauccccuacugcaacuacuccaaguacugcuaccugaaccacaccgucaccgggaagacgagccugccccgcugcugccugguguccaacggcagcuaccugaacgagacccacuucuccgacgacaucgagcagcaggcggacaacaugaucaccgagcuccugcagaaggaguacaucgaccggcagggcaagaccccgcuggggcucguggaccuguucgucuucagcacguccuucuaccugaucagcaucuuccugcaccucgugaagaucccgacccaccgccacguggucggcaagcccugccccaagccccaccggcugaaccacauggggaucugcuccugcggccuguacaagcacccgggggugcccgugaaguggaagcgcugaggacuagucccuguucccagagcccacuuuuuuuucuuuuuuugaaauaaaauagccugucuuucagaucuaaaaaaaaaaaaaaaaaaaaaaaaaaaaaaaaaaaaaaaaaaaaaaaaaaaaaaaaaaaaaaaaaaaaaaaaaaaaaaaaaaaaaaaaaaaaaaaaaaaa

SEQ ID NO: 40719 - RNA, 1740 nt, Artificial Sequence
  mRNA product Design a-2 (A100) comprising derived and/or modified sequence from LASV(Lassa virus/H.sapiens-wt/NGA/2015/ISTH_0543;Clade II)__AVO03639__GPCmut12 (opt1)
aggagaguccgcucagccagguugcagaagcggcuuagcguguguccuaaucuucucucugcguguagguaggccugugccgcaaacaagcuuaccaugggccagaucaucaccuucuuccaggaggugccccacgucaucgaggaggugaugaacaucgugcugaucgcccucagccugcuggccauccucaaggggaucuacaacgucgcgaccugcggccuguucgggcugguguccuuccuccugcugugcggccgcagcugcuccacgaccuacaaggggguguacgagcuccagacccuggagcuggacauggccaaccucaacaugugcaugccgcugagcugcacgaagaacaacucccaccacuacaucauggucggcaacgagaccggccuggagcucacccugaccaacacgagcaucaucaaccacaaguucugcaaccuguccgacgcccacaagaagaaccucuacgaccacgcccugaugagcaucaucuccaccuuccaccugagcauccccaacuucaaccaguacgaggccauguccugcgacuucaacgggggcaagaucagcgugcaguacaaccucucccacaccuacgcgguggacgccgccaaccacugcgggaccaucgccaacggcguccugcagacguucaugcggauggcguggggcgggagcuacaucgcccuggacuccggcaaggggagcugggacugcaucaugaccuccuaccaguaccucgugauccagaacaccaccugggaggaccacugccaguucagccgccccucccccaucggcuaccuggggcugcucagccagcggacgcgcgacaucuacaucagccggcgccugcugggcaccuucaccuggacccucuccgacagcgagggcaacgagacgcccgggggcuacugccugacccgguggaugcugaucgaggccgagcucaagugcuucgggaacaccgccguggccaagugcaacgagaagcacgacgaggaguucugcgacaugcugcgccuguucgacuucugcaagcaggcgauccggcgccucaagaccgaggcccagauguccauccagcugaucaacaaggccgucaacgcccugaucaacgaccagcucaucaugaagaaccaccuccgggacaucaugggcauccccuacugcaacuacagcaaguacugcuaccugaaccacacggugaccgggaagaccucccugccccgcugcugccuggugagcaacggcuccuaccugaacgagacccacuucagcgacgacaucgagcagcaggccgacaacaugaucacggagcuccugcagaaggaguacaucgaccggcagggcaagaccccgcuggggcucgucgaccuguucguguucuccaccagcuucuaccugaucuccaucuuccugcaccucgugaagaucccgacccaccgccacaucacgggcaagcccugccccaagccccaccggcugaaccacauggggaucugcagcugcggccuguacaagcacccggggguccccgugaaguggaagcgcugaggacuagucccuguucccagagcccacuuuuuuuucuuuuuuugaaauaaaauagccugucuuucagaucuaaaaaaaaaaaaaaaaaaaaaaaaaaaaaaaaaaaaaaaaaaaaaaaaaaaaaaaaaaaaaaaaaaaaaaaaaaaaaaaaaaaaaaaaaaaaaaaaaaaa

SEQ ID NO: 40720 - RNA, 1740 nt, Artificial Sequence
  mRNA product Design a-2 (A100) comprising derived and/or modified sequence from LASV(Lassa virus/H.sapiens-wt/NGA/2016/ISTH_0009;Clade II)__AVO03571__GPCmut12 (opt1)
aggagaguccgcucagccagguugcagaagcggcuuagcguguguccuaaucuucucucugcguguagguaggccugugccgcaaacaagcuuaccaugggccagaucaucaccuucuuccaggaggugccccacgucaucgaggaggugaugaacaucgugcugaucgcccucagccugcuggccauccucaaggggaucuacaacgucgcgaccugcggccugcuggggcucguguccuuccugcugcucugcggccgcagcugcuccacgaccuacaaggggguguacgagcugcagacccuggagcucgacauggccagccugaacaugugcaugccgcuguccugcacgaagaacaacagccaccacuacaucauggucggcaacgagaccggccucgagcugacccugaccaacacguccaucaucaaccacaaguucugcaaccucagcgacgcccacaagaagaaccuguacgaccacgcccugauguccaucaucagcaccuuccaccucuccauccccaacuucaaccaguacgaggccaugagcugcgacuucaacgggggccggaucuccgugcaguacaaccugagccacuccuacgcgguggacgccgccaaccacugcgggaccaucgccaacggcguccugcagaccuucaugcgcauggcguggggcgggagcuacaucgcccucgacuccggcaaggggagcugggacugcaucaugacguccuaccaguaccugaucauccagaacaccaccugggaggaccacugccaguucagccggcccagccccaucggcuaccuggggcuccugucccagcgcacccgggacaucuacaucagccgccggcugcucggcacguucaccuggacccuguccgacagcgagggcaacgagacccccgggggcuacugccugacgcgcuggaugcucaucgaggccgagcugaagugcuucgggaacaccgccguggccaagugcaacgagaagcacgacgaggaguucugcgacaugcugcggcuguucgacuucugcaagcaggcgauccgccggcugaagaccgaggcccagauguccauccagcugaucaacaaggccgugaacgcccucaucaacgaccagcugaucaugaagaaccaccuccgcgacaucaugggcaucccguacugcaacuacagcaaguacugcuaccucaaccacaccgucacggggaagaccucccugccccggugcugccuggugagcaacggcuccuaccucaacgagacccacuucagcgacgacaucgagcagcaggccgacaacaugaucaccgagcugcugcagaaggaguacaucgaccgccagggcaagacgccccucgggcugguggaccuguucgucuucuccaccagcuucuaccugaucuccaucuuccuccaccuggugaagaucccgacccaccggcacaucaccggcaagcccugccccaagccccaccgccugaaccacauggggaucugcagcugcggccucuacaaccacccgggggugcccgucaaguggaagcggugaggacuagucccuguucccagagcccacuuuuuuuucuuuuuuugaaauaaaauagccugucuuucagaucuaaaaaaaaaaaaaaaaaaaaaaaaaaaaaaaaaaaaaaaaaaaaaaaaaaaaaaaaaaaaaaaaaaaaaaaaaaaaaaaaaaaaaaaaaaaaaaaaaaaa

SEQ ID NO: 40721 - RNA, 1740 nt, Artificial Sequence
  mRNA product Design a-2 (A100) comprising derived and/or modified sequence from LASV(Lassa virus/H.sapiens-wt/NGA/2016/ISTH_0017;Clade II)__AVO03567__GPCmut12 (opt1)
aggagaguccgcucagccagguugcagaagcggcuuagcguguguccuaaucuucucucugcguguagguaggccugugccgcaaacaagcuuaccaugggccagaucaucaccuucuuccaggaggugccccacgucaucgaggaggugaugaacaucgugcugaucgcccucagccugcuggccauccucaaggggaucuacaacgucgcgaccugcggccuguucgggcugguguccuuccuccugcugugcggccgcagcugcuccacgaccuacaaggggguguacgagcuccagacccuggagcuggacauggccagccucaacaugugcaugccgcuguccugcacgaagaacaacagccaccacuacaucauggucggcaacgagaccggccuggagcucacccugaccaacacguccaucaucaaccacaaguucugcaaccugagcgacgcccacaagaagaaccucuacgaccacgcccugauguccaucaucagcaccuuccaccuguccauccccaacuucaaccaguacgaggccaugagcugcgacuucaacgggggcaagaucuccgugcaguacaaccucagccacaccuacgcgaucgacgccgccaaccacugcgggaccaucgccaacggcgugcugcagacguucaugcggauggcguggggcggguccuacaucgcccuggacagcggcaagggguccugggacugcaucaugaccagcuaccaguaccucaucauccagaacaccaccugggaggaccacugccaguucucccgccccagccccaucggcuaccuggggcugcucagccagcggacgcgcgacaucuacaucucccggcgccugcugggcaccuucaccuggacccucagcgacuccgagggcaacgagacgcccgggggcuacugccugacccgguggaugcugaucgaggccgagcucaagugcuucgggaacaccgccgucgccaagugcaacgagaagcacgacgaggaguucugcgacaugcugcgccuguucgacuucugcaagcaggcgauccggcgccucaagaccgaggcccagaugagcauccagcugaucaacaaggccgugaacgcccugaucaacgaccagcucaucaugaagaaccaccuccgggacaucaugggcauccccuacugcaacuacuccaaguacugcuaccugaaccacacggugaccgggaagaccagccugccccgcugcugccuggucuccaacggcagcuaccugaacgagacccacuucuccgacgacaucgagcagcaggccgacaacaugaucacggagcuccugcagaaggaguacauggaccggcagggcaagaccccgcuggggcucguggaccuguucguguucagcaccuccuucuaccugaucagcaucuuccugcaccucguccgcaucccgacccaccggcacgugaucggcaagcccugccccaagccccaccgccugaaccacauggggaucugcuccugcggccuguacaagcacccgggggugcccgucaaguggaagcggugaggacuagucccuguucccagagcccacuuuuuuuucuuuuuuugaaauaaaauagccugucuuucagaucuaaaaaaaaaaaaaaaaaaaaaaaaaaaaaaaaaaaaaaaaaaaaaaaaaaaaaaaaaaaaaaaaaaaaaaaaaaaaaaaaaaaaaaaaaaaaaaaaaaaa

SEQ ID NO: 40722 - RNA, 1740 nt, Artificial Sequence
  mRNA product Design a-2 (A100) comprising derived and/or modified sequence from LASV(Lassa virus/H.sapiens-wt/NGA/2018/ISTH_0959;Clade II)__AVV65099__GPCmut12 (opt1)
aggagaguccgcucagccagguugcagaagcggcuuagcguguguccuaaucuucucucugcguguagguaggccugugccgcaaacaagcuuaccaugggccagaucaucaccuucuuccaggaggugccccacgucaucgaggaggugaugaacaucgugcugaucgcccucagccugcuggccauccucaaggggaucuacaacgucgugaccugcggccuguucgggcugguguccuuccuccugcugugcggccgcagcugcuccacgaccuacaagggggucuacgagcuccagacccuggagcuggacauggcgagccucaacaugugcaugccgcuguccugcacgaagaacaacagccaccacuacaucauggugggcaacgagaccggccuggagcucacccugaccaacacguccaucaucaaccacaaguucugcaaccugagcgacgcccacaagaagaaccucuacgaccacgcccugauguccaucaucagcaccuuccaccuguccauccccaacuucaaccaguacgaggccaugagcugcgacuucaacgggggcaagaucuccgugcaguacaaccucagccacgccuacgcgaucgacgccgccaaccacugcgggaccaucgccaacggcguccugcagaccuucaugcggauggcguggggcggguccuacaucgcccuggacagcggcaagggguccugggacugcaucaugacgagcuaccaguaccucaucauccagaacaccaccugggaggaccacugccaguucucccgccccagccccaucggcuaccuggggcugcucagccagcggacccgcgacaucuacaucucccggcgccugcugggcacguucaccuggacccucagcgacuccgagggcaacgagacccccgggggcuacugccugacgcgguggaugcugaucgaggccgagcucaagugcuucgggaacaccgccguggccaagugcaacgagaagcacgacgaggaguucugcgacaugcugcgccuguucgacuucugcaagcaggcgauccggcgccucaagaccgaggcccagaugagcauccagcugaucaacaaggccgugaacgcccugaucaacgaccagcucaucaugaagaaccaccuccgggacaucaugggcaucccguacugcaacuacuccaaguacugcuaccugaaccacaccgucacggggaagaccagccugccccgcugcugccugguguccaacggcagcuaccugaacgagacccacuucuccgacgacaucgagcagcaggccgacaacaugaucaccgagcuccugcagaaggaguacaucgaccggcagggcaagacgccccuggggcucguggaccuguucgucuucagcaccuccuucuaccugaucagcaucuuccugcaccucgugaagaucccgacccaccgccacgugaucggcaagcccugccccaagccccaccggcugaaccacauggggaucugcuccugcggccuguacaagcacccggggguccccgugaaguggaagcgcugaggacuagucccuguucccagagcccacuuuuuuuucuuuuuuugaaauaaaauagccugucuuucagaucuaaaaaaaaaaaaaaaaaaaaaaaaaaaaaaaaaaaaaaaaaaaaaaaaaaaaaaaaaaaaaaaaaaaaaaaaaaaaaaaaaaaaaaaaaaaaaaaaaaaa

SEQ ID NO: 40723 - RNA, 1740 nt, Artificial Sequence
  mRNA product Design a-2 (A100) comprising derived and/or modified sequence from LASV(LASV003-NIG-2008;Clade II)__AIT17580__GPCmut12 (opt1)
aggagaguccgcucagccagguugcagaagcggcuuagcguguguccuaaucuucucucugcguguagguaggccugugccgcaaacaagcuuaccaugggccagaucaucaccuucuuccaggaggugccccacgucaucgaggaggugaugaacaucgugcugaucgcccucagccugcuggccauccucaaggggaucuacaacgucgcgaccugcggccuguucgggcugguguccuuccuccugcugugcggccgcagcugcuccacgaccuacaaggggguguacgagcuccagacccuggagcuggacauggccagccucaacaugugcaugccgcuguccugcacgaagaacaacagccaccacuacaucauggucggcaacgagaccggccuggagcucacccugaccaacacguccaucaucaaccacaaguucugcaaccugagcgacgcccacaagaagaaccucuacgaccacgcccugauguccaucaucagcaccuuccaccuguccauccccaacuucaaccaguacgaggccaugagcugcgacuucaacgggggcaagaucuccgugcaguacaaccucagccacaccuacgcgguggacgccgccaaccacugcgggaccaucgccaacggcguccugcagacguucaugcggauggcguggggcggguccuacaucgcccuggacagcggcaagggguccugggacugcaucaugaccagcuaccaguaccucaucauccagaacaccaccugggaggaccacugccaguucucccgccccagccccaucggcuaccuggggcugcucagccagcggacgcgcgacaucuacaucucccggcgccugcugggcaccuucaccuggacccucagcgacuccgagagcaacgagacgccgggcggguacugccugacccgguggaugcugaucgaggccgagcucaagugcuucggcaacaccgccguggccaagugcaacgagaagcacgacgaggaguucugcgacaugcugcgccuguucgacuucugcaagcaggcgauccggcgccucaaggccgaggcccagauguccauccagcugaucaacaaggccgugaacgcccugaucaacgaccagcucaucaugaagaaccaccuccgggacaucauggggauccccuacugcaacuacagcaaguacugcuaccugaaccacaccgucacgggccgcaccucccugccccggugcugccuggugagcaacggguccuaccugaacgagacccacuucagcgacgacaucgagcagcaggcggacaacaugaucaccgagcuccugcagaaggaguacauggaccgccagggcaagacgccccugggccucguggaccuguucgucuucuccaccagcuucuaccugaucuccaucuuccugcaccucgugaagaucccgacccaccggcacgugaucgggaagcccugccccaagccccaccgccugaaccacaugggcaucugcagcugcgggcuguacaagcacccgggcguccccgugaaguggaagcggugaggacuagucccuguucccagagcccacuuuuuuuucuuuuuuugaaauaaaauagccugucuuucagaucuaaaaaaaaaaaaaaaaaaaaaaaaaaaaaaaaaaaaaaaaaaaaaaaaaaaaaaaaaaaaaaaaaaaaaaaaaaaaaaaaaaaaaaaaaaaaaaaaaaaa

SEQ ID NO: 40724 - RNA, 1740 nt, Artificial Sequence
  mRNA product Design a-2 (A100) comprising derived and/or modified sequence from LASV(LASV035-NIG-2009;Clade II)__AIT17588__GPCmut12 (opt1)
aggagaguccgcucagccagguugcagaagcggcuuagcguguguccuaaucuucucucugcguguagguaggccugugccgcaaacaagcuuaccaugggccagaucaucaccuucuuccaggaggugccccacgucaucgaggaggugaugaacaucgugcugaucgcccucagccugcuggccauccucaaggggaucuacaacgucgcgaccugcggccuguucgggcugguguccuuccuccugcugugcggccgcagcugcuccacgaccuacaaggggguguacgagcuccagacccuggagcuggacauggccagccucaacaugugcaugccgcuguccugcacgaagaacaacagccaccacuacaucauggucggcaacgagaccggccuggagcucacccugaccaacacguccaucaucaaccacaaguucugcaaccugagcgacgcccacaagaagaaccucuacgaccacgcccugauguccaucaucagcaccuuccaccuguccauccccaacuucaaccaguacgaggccaugagcugcgacuucaacgggggcaagaucuccgugcaguacaaccucagccacgcguacgccguggacgccgccaaccacugcgggaccaucgcgaacggcguccugcagaccuucaugcggauggccuggggcggguccuacaucgcccuggacagcggcaagggguccugggacugcaucaugacgagcuaccaguaccucaucauccagaacaccaccugggaggaccacugccaguucucccgccccagccccaucggcuaccuggggcugcucagccagcggacccgcgacaucuacaucucccggcgccugcugggcacguucaccuggacccucagcgacuccgagggcaacgagacccccgggggcuacugccugacgcgguggaugcugaucgaggccgagcucaagugcuucgggaacaccgccguggcgaagugcaacgagaagcacgacgaggaguucugcgacaugcugcgccuguucgacuucugcaagcaggccauccggcgccucaaggccgaggcccagaugagcauccagcugaucaacaaggccgugaacgcgcugaucaacgaccagcucaucaugaagaaccaccuccgggacaucaugggcauccccuacugcaacuacuccaaguacugcuaccugaaccacaccgucaccgggaagacgagccugccccgcugcugccugguguccaacggcagcuaccugaacgagacccacuucuccgacgacaucgagcagcaggccgacaacaugaucaccgagcuccugcagaaggaguacaucgaccggcagggcaagaccccgcuggggcucguggaccuguucgucuucagcacguccuucuaccugaucagcaucuuccugcaccucgugaagaucccgacccaccgccacgugaucggcaagcccugccccaagccccaccggcugaaccacauggggaucugcuccugcggccuguacaagcacccggggguccccgugaaguggaagcgcugaggacuagucccuguucccagagcccacuuuuuuuucuuuuuuugaaauaaaauagccugucuuucagaucuaaaaaaaaaaaaaaaaaaaaaaaaaaaaaaaaaaaaaaaaaaaaaaaaaaaaaaaaaaaaaaaaaaaaaaaaaaaaaaaaaaaaaaaaaaaaaaaaaaaa

SEQ ID NO: 40725 - RNA, 1740 nt, Artificial Sequence
  mRNA product Design a-2 (A100) comprising derived and/or modified sequence from LASV(LASV1000-NIG-2009;Clade II)__AIT17782__GPCmut12 (opt1)
aggagaguccgcucagccagguugcagaagcggcuuagcguguguccuaaucuucucucugcguguagguaggccugugccgcaaacaagcuuaccaugggccagaucaucaccuucuuccaggaggugccccacgucaucgaggaggugaugaacaucgugcugaucgcccucagccugcuggccauccucaaggggaucuacaacgucgcgaccugcggccuguucgggcugguguccuuccuccugcugugcggccgcagcugcuccacgaccuacaaggggguguacgagcuccagacccuggagcuggacauggccagccucaacaugugcaugccgcuguccugcacgaagaacaacagccaccacuacaucauggucggcaacgagaccggccuggagcucacccugaccaacacguccaucaucaaccacaaguucugcaaccugagcgacgcccacaagaagaaccucuacgaccacgcccugauguccaucaucagcaccuuccaccuguccauccccaacuucaaccaguacgaggccaugagcugcgacuucaacgggggcaagaucuccgugcaguacaaccucagccacaccuacgcgguggacgccgccaaccacugcgggaccaucgccaacggcguccugcagacguucaugcggauggcguggggcggguccuacaucgcccuggacagcggcaagggguccugggacugcaucaugaccagcuaccaguaccucaucauccagaacaccaccugggaggaccacugccaguucucccgccccagccccaucggcuaccuggggcugcucagccagcggacgcgcgacaucuacaucucccggcgccugcugggcaccuucaccuggacccucagcgacuccgagggcaacgagacgcccgggggcuacugccugacccgguggaugcugaucgaggccgagcucaagugcuucgggaacaccgccguggccaagugcaacgagaagcacgacgaggaguucugcgacaugcugcgccuguucgacuucugcaagcaggcgaucaagcggcucaagaccgaggcccagaugagcauccagcugaucaacaaggccgugaacgcccugaucaacgaccagcucaucaugaagaaccaccuccgcgacaucaugggcauccccuacugcaacuacuccaaguacugcuaccugaaccacacggucaccgggaagaccagccugccccggugcugccugguguccaacggcagcuaccugaacgagacccacuucuccgacgacaucgagcagcaggccgacaacaugaucacggagcuccugcagaaggaguacaucgaccgccagggcaagaccccgcuggggcucguggaccuguucgucuucagcaccuccuucuaccugaucagcaucuuccugcaccucgugaagaucccgacccaccggcacguggucggcaagcccugccccaagccccaccgccugaaccacauggggaucugcuccugcggccuguacaagcacccgggggugcccgugaaguggaagcggugaggacuagucccuguucccagagcccacuuuuuuuucuuuuuuugaaauaaaauagccugucuuucagaucuaaaaaaaaaaaaaaaaaaaaaaaaaaaaaaaaaaaaaaaaaaaaaaaaaaaaaaaaaaaaaaaaaaaaaaaaaaaaaaaaaaaaaaaaaaaaaaaaaaaa

SEQ ID NO: 40726 - RNA, 1740 nt, Artificial Sequence
  mRNA product Design a-2 (A100) comprising derived and/or modified sequence from LASV(LASV221-NIG-2010;Clade II)__AIT17624__GPCmut12 (opt1)
aggagaguccgcucagccagguugcagaagcggcuuagcguguguccuaaucuucucucugcguguagguaggccugugccgcaaacaagcuuaccaugggccagaucaucaccuucuuccaggaggugccccacgucaucgaggaggugaugaacaucgugcugaucgcccucagccugcuggccauccucaaggggaucuacaacgucgcgaccugcggccuguucgggcugguguccuuccuccugcugugcggccgcagcugcuccacgaccuacaaggggguguacgagcuccagacccuggagcuggacauggccagccucaacaugugcaugccgcuguccugcacgaagaacaacagccaccacuacaucauggucggcaacgagaccggccuggagcucacccugaccaacacguccaucaucaaccacaaguucugcaaccugagcgacgcccacaagaagaaccucuacgaccacgcccugauguccaucaucagcaccuuccaccuguccauccccaacuucaaccaguacgaggccaugagcugcgacuucaacgggggcaagaucuccgugcaguacaaccucagccacaccuacgcgaucgacgccgccaaccacugcgggaccaucgccaacggcgugcugcagacguucaugcggauggcguggggcggguccuacaucgcccuggacagcggcaagggguccugggacugcaucaugaccagcuaccaguaccucaucauccagaacaccaccugggaggaccacugccaguucucccgccccagccccaucggcuaccuggggcugcucagccagcggacgcgcgacaucuacaucucccggcgccugcugggcaccuucaccuggacccucagcgacuccgagggcaacgagacgcccgggggcuacugccugacccgguggaugcugaucgaggccgagcucaagugcuucgggaacaccgccgucgccaagugcaacgagaagcacgacgaggaguucugcgacaugcugcgccuguucgacuucugcaagcaggcgauccggcgccucaagaccgaggcccagaugagcauccagcugaucaacaaggccgugaacgcccugaucaacgaccagcucaucaugaagaaccaccuccgggacaucaugggcauccccuacugcaacuacuccaaguacugcuaccugaaccacacggugaccgggaagaccagccugccccgcugcugccuggucuccaacggcagcuaccugaacgagacccacuucuccgacgacaucgagcagcaggccgacaacaugaucacggagaugcuccagaaggaguacauggaccggcagggcaagaccccgcuggggcugguggaccucuucguguucagcaccuccuucuaccugaucagcaucuuccugcaccuggucaagaucccgacccaccgccacgugaucggcaagcccugccccaagccccaccggcucaaccacauggggaucugcuccugcggccuguacaagcacccgggggugcccgucaaguggaagcgcugaggacuagucccuguucccagagcccacuuuuuuuucuuuuuuugaaauaaaauagccugucuuucagaucuaaaaaaaaaaaaaaaaaaaaaaaaaaaaaaaaaaaaaaaaaaaaaaaaaaaaaaaaaaaaaaaaaaaaaaaaaaaaaaaaaaaaaaaaaaaaaaaaaaaa

SEQ ID NO: 40727 - RNA, 1740 nt, Artificial Sequence
  mRNA product Design a-2 (A100) comprising derived and/or modified sequence from LASV(LASV237-NIG-2010;Clade II)__AIT17638__GPCmut12 (opt1)
aggagaguccgcucagccagguugcagaagcggcuuagcguguguccuaaucuucucucugcguguagguaggccugugccgcaaacaagcuuaccaugggccagaucaucaccuucuuccaggaggugccccacgucaucgaggaggugaugaacaucgugcugaucgcccucagccugcuggccauccucaaggggaucuacaacgucgcgaccugcggccuguucgggcugguguccuuccuccugcugugcggccgcagcugcuccacgaccuacaaggggguguacgagcuccagacccuggagcuggacauggccagccucaacaugugcaugccgcuguccugcacgaagaacaacagccaccacuacaucauggucggcaacgagaccggccuggagcucacccugaccaacacguccaucaucaaccacaaguucugcaaccugagcgacgcccacaagaaggaccucuacgaccacgcccugauguccaucaucagcaccuuccaccuguccauccccaacuucaaccaguacgaggccaugagcugcgacuucaacgggggcaagaucuccgugcaguacaaccucagccacaccuacgcgguggacgccgccaaccacugcgggaccaucgccaacggcguccugcagacguucaugcggauggcguggggcggguccuacaucgcccuggacagcggcaagggguccugggacugcaucaugaccagcuaccaguaccucaucauccagaacaccaccugggaggaccacugccaguucucccgccccagccccaucggcuaccuggggcugcucagccagcggacgcgcgacaucuacaucucccggcgccugcugggcaccuucaccuggacccucagcgacuccgagggcaacgagacgcccgggggcuacugccugacccgguggaugcugaucgaggccgagcucaagugcuucgggaacaccgccguggccaagugcaacgagaagcacgacgaggaguucugcgacaugcugcgccuguucgacuucugcaagcaggcgauccggcgccucaagaccgaggcccagaugagcauccagcugaucaacaaggccgugaacgcccugaucaacgaccagcucaucaugaagaaccaccuccgggacaucaugggcauccccuacugcaacuacuccaaguacugcuaccugaaccacacggucaccgggaagaccagccugccccgcugcugccugguguccaacggcagcuaccugaacgagacccacuucuccgacgacaucgagcagcaggccgacaacaugaucacggagcuccugcagaaggaguacauggaccggcagggcaagaccccgcuggggcucguggaccuguucgucuucagcaccuccuucuaccugaucagcaucuuccugcaccucaucaagaucccgacccaccgccacaucacgggcaagcccugccccaagccccaccggcugaaccacauggggaucugcuccugcggccuguacaagcacccgggggugcccgugaaguggaagcgcugaggacuagucccuguucccagagcccacuuuuuuuucuuuuuuugaaauaaaauagccugucuuucagaucuaaaaaaaaaaaaaaaaaaaaaaaaaaaaaaaaaaaaaaaaaaaaaaaaaaaaaaaaaaaaaaaaaaaaaaaaaaaaaaaaaaaaaaaaaaaaaaaaaaaa

SEQ ID NO: 40728 - RNA, 1740 nt, Artificial Sequence
  mRNA product Design a-2 (A100) comprising derived and/or modified sequence from LASV(LASV253-NIG-2011;Clade II)__AIT17670__GPCmut12 (opt1)
aggagaguccgcucagccagguugcagaagcggcuuagcguguguccuaaucuucucucugcguguagguaggccugugccgcaaacaagcuuaccaugggccagaucaucaccuucuuccaggaggugccccacgucaucgaggaggugaugaacaucgugcugaucgcccucagccugcuggccauccucaaggggaucuacaacgucgcgaccugcggccuguucgggcugguguccuuccuccugcugugcggccgcagcugcuccacgaccuacaaggggguguacgagcuccagacccuggagcuggacauggccagccucaacaugugcaugccgcuguccugcacgaagaacaacagccaccacuacaucauggucggcaacgagaccggccuggagcucacccugaccaacacguccaucaucaaccacaaguucugcaaccugagcgacgcccacaagaagaaccucuacgaccacgcccugauguccaucaucagcaccuuccaccuguccauccccaacuucaaccaguacgaggccaugagcugcgacuucaacgggggcaagaucuccgugcaguacaaccucagccacaccuacgcgguggacgccgccaaccacugcgggaccaucgccaacggcguccugcagacguucaugcggauggcguggggcggguccuacaucgcccuggacagcggcaagggguccugggacugcaucaugaccagcuaccaguaccucaucauccagaacaccaccugggaggaccacugccaguucucccgccccagccccaucggcuaccuggggcugcucagccagcggacgcgcgacaucuacaucucccggcgccugcugggcaccuucaccuggacccucagcgacuccgagggcaacgagacgcccgggggcuacugccugacccgguggaugcugaucgaggccgagcucaagugcuucgggaacaccgccguggccaagugcaacgagaagcacgacgaggaguucugcgacaugcugcgccuguucgacuucugcaagcaggcgauccggcgccucaaggccgaggcccagaugagcauccagcugaucaacaaggccgugaacgcccugaucaacgaccagcucaucaugaagaaccaccuccgggacaucaugggcaucccguacugcaacuacuccaaguacugcuaccugaaccacaccgucacggggcgcaccagccugccccggugcugccugguguccaacggcagcuaccugaacgagacccacuucuccgacgacaucgagcagcaggcggacaacaugaucaccgagcuccugcagaaggaguacaucgaccgccagggcaagacgccccuggggcucguggaccuguucgucuucagcaccuccuucuaccugaucagcaucuuccugcaccucgugaagaucccgacccaccggcacaucaucggcaagcccugccccaagccccaccgccugaaccacauggggaucugcuccugcggccuguacaagcacccgggggugcccgucaaguggaagcggugaggacuagucccuguucccagagcccacuuuuuuuucuuuuuuugaaauaaaauagccugucuuucagaucuaaaaaaaaaaaaaaaaaaaaaaaaaaaaaaaaaaaaaaaaaaaaaaaaaaaaaaaaaaaaaaaaaaaaaaaaaaaaaaaaaaaaaaaaaaaaaaaaaaaa

SEQ ID NO: 40729 - RNA, 1740 nt, Artificial Sequence
  mRNA product Design a-2 (A100) comprising derived and/or modified sequence from LASV(LASV254-NIG-2011;Clade II)__AIT17674__GPCmut12 (opt1)
aggagaguccgcucagccagguugcagaagcggcuuagcguguguccuaaucuucucucugcguguagguaggccugugccgcaaacaagcuuaccaugggccagaucaucaccuucuuccaggaggugccccacgucaucgaggaggugaugaacaucgugcugaucgcccucagccugcuggccauccucaaggggaucuacaacgucgcgaccugcggccuguucgggcugguguccuuccuccugcugugcggccgcagcugcuccacgaccuacaaggggguguacgagcuccagacccuggagcuggacaugaccaaccucaacaugugcaugccgcugagcugcaccaagaacaacucccaccacuacaucauggucggcaacgagaccggccuggagcucacccugacgaacaccagcaucaucaaccacaaguucugcaaccuguccgacgcccacaagaagaaccucuacaaccacgcccugaugagcaucaucuccaccuuccaccugagcauccccaacuucaaccaguacgaggccauguccugcgacuucaacgggggcaagaucagcgugcaguacaaccucucccacagcuacgccguggacgcggccaaccacugcgggaccaucgccaacggcguccugcagacguucaugcggauggccuggggcggguccuacaucgcgcuggacagcggcaaggggaacugggacugcaucaugaccuccuaccaguaccucaucauccagaacaccaccugggaggaccacugccaguucagccgccccucccccaucggcuaccuggggcugcucagccagcggacgcgcgacaucuacaucagccggcgccugcugggcaccuucaccuggacccucuccgacagcgagggcaacgagacgcccgggggcuacugccugacccgguggaugcugaucgaggccgagcucaagugcuucgggaacaccgccguggccaagugcaacgagaagcacgacgaggaguucugcgacaugcugcgccuguucgacuucugcaagcaggccauccggcgccucaagaccgaggcgcaggccaacauccagcugaucaacaaggccgugaacgcccugaucaacgaccagcucaucaugaagaaccaccuccgggacaucaugggcauccccuacugcaacuacuccaaguacugcuaccugaaccacacggucaccgggaagaccagccugccccgcugcugccugguguccaacggcagcuaccugaacgagacccacuucuccgacgacaucgagcagcaggccgacaacaugaucacggagcuccugcagaaggaguacauggaccggcagggcaagaccccgcuggggcucguggaccuguucgucuucagcaccuccuucuaccugaucagcaucuuccugcaccucgugaagaucccgacccaccgccacgugaucggcaagcccugccccaagccccaccggcugaaccacauggggaucugcuccugcggccuguacaagcacccggggguccccgugaaguggaagcgcugaggacuagucccuguucccagagcccacuuuuuuuucuuuuuuugaaauaaaauagccugucuuucagaucuaaaaaaaaaaaaaaaaaaaaaaaaaaaaaaaaaaaaaaaaaaaaaaaaaaaaaaaaaaaaaaaaaaaaaaaaaaaaaaaaaaaaaaaaaaaaaaaaaaaa

SEQ ID NO: 40730 - RNA, 1740 nt, Artificial Sequence
  mRNA product Design a-2 (A100) comprising derived and/or modified sequence from LASV(Nig08-A19;Clade III)__ADU56618__GPCmut12 (opt1)
aggagaguccgcucagccagguugcagaagcggcuuagcguguguccuaaucuucucucugcguguagguaggccugugccgcaaacaagcuuaccaugggccagaucgugaccuucuuccaggaggucccccacgugaucgaggaggugaugaacaucguccugaucgcccucagcauccuggccauccugaaggggcucuacaacaucgcgaccugcggccugaucgggcuggugacguuccuccugcuguccggccgcagcugcuccaugaccuacaaggggguguacgagcuccagacccuggagcugaacaugaacacccucaacaugugcaugccgcugagcugcaccaagaacaacucccaccacuacaucauggucggcaacgagaccggccuggagcucacccugacgaacaccagccugcuccaccacaaguucugcaaccuguccgacgcccacaagaagaaccuguacgaccacacccucaugagcaucaucuccaccuuccaccugagcauccccaacuucaaccaguacgaggccauguccugcgacuucaacgggggcaagaucacggugcaguacaaccugagccacuccuacgccaucgacgccgcgaaccacugcgggaccguggccaacggcguccuccagaccuucaugcggauggccuggggcgggagcuacaucgcccuggacuccggccgcgggaagugggacugcaucaugaccagcuaccaguaccugaucauccagaacacgaccugggaggaccacugccaguucucccggcccagccccaucggcuaccucgggcugcugucccagcgcacccgggacaucuacaucagccgccggcuccugggcaccuucacguggacccugagcgacuccgagggcaacgagacccccgggggcuacugccucacccgcuggaugcugaucgaggcggagcugaagugcuucgggaacacggccguggccaagugcaacgagaagcacgacgaggaguucugcgacaugcuccggcuguucgacuucugcaagcaggccauccgccggcugaaggccgaggcgcagaugagcauccagcucaucaacaaggccgugaacgcccugaucaacgaccagcugaucaugaagaaccaccuccgcgacaucaugggcauccccuacugcaacuacuccaaguacugcuaccugaaccacaccagcaccgggcggaccucccugccccgcugcugccucgucagcaacggcuccuaccugaacgagacgcacuucagcgacgacaucgagcagcaggccgacaacaugaucaccgagaugcugcagaaggaguaccucgaccggcagggcaagaccccgcuggggcugguggaccuguucguguucuccaccagcuucuaccucaucuccaucuuccugcaccuggucaagaucccgacgcaccgccacaucgugggcaagcccugccccaagccccaccggcucaaccacauggggaucugcagcugcggccuguacaagcagccgggggugcccguccgcuggaagcggugaggacuagucccuguucccagagcccacuuuuuuuucuuuuuuugaaauaaaauagccugucuuucagaucuaaaaaaaaaaaaaaaaaaaaaaaaaaaaaaaaaaaaaaaaaaaaaaaaaaaaaaaaaaaaaaaaaaaaaaaaaaaaaaaaaaaaaaaaaaaaaaaaaaaa

SEQ ID NO: 40731 - RNA, 1743 nt, Artificial Sequence
  mRNA product Design a-2 (A100) comprising derived and/or modified sequence from LASV(G1180-SLE-2010;Clade IV)__AIT17168__GPCmut12 (opt1)
aggagaguccgcucagccagguugcagaagcggcuuagcguguguccuaaucuucucucugcguguagguaggccugugccgcaaacaagcuuaccaugggccagaucgugaccuucuuccaggaggucccccacgugaucgaggaggugaugaacaucguccugaucgcccucagcauccuggccgugcugaaggggcucuacaacuucgcgaccugcggccugguggggcugcucaccuuccugcugcucugcggccgcuccugcaccgccagccgguacaagggggucuacgagcugcagacccuggagcucaacauggagacccugaacaugugcaugccgcuguccugcaccaagaacaacagccaccacuacaucauggugggcaacgagaccggccucgagcugacccugacgaacaccuccaucaucaaccacaaguucugcaaccucagcgacgcccacaagaagaaccuguacgaccacgcccugauguccaucaucagcaccuuccaccucuccauccccaacuucaaccaguacgaggccaugagcugcgacuucaacgggggcaagaucuccgugcaguacaaccugagccacuccuacgcgggggacgccgccaaccacugcggcaccgucgccaacggggugcugcagacguucaugcgcauggcguggggcggcagcuacaucgcccucgacuccgggcacggcagcugggacugcaucaugaccuccuaccaguaccugaucauccagaacaccaccugggaggaccacugccaguucagccggcccucccccaucggguaccugggccuccugagccagcgcacgcgggacaucuacaucagccgccggcugcucggcaccuucaccuggacccuguccgacagcgaggggaaggacacgccgggcggguacugccugacccgcuggaugcucaucgaggccgagcugaagugcuucggcaacaccgccguggccaagugcaacgagaagcacgacgaggaguucugcgacaugcugcggcuguucgacuucugcaagcaggcgauccagcgccugaaggccgaggcccagauguccauccagcugaucaacaaggccgucaacgcccucaucaacgaccagcugaucaugaagaaccaccuccgggacaucauggggauccccuacugcaacuacagcaaguacugcuaccucaaccacaccacgaccggcaagaccucccugcccaagugcugccuggugagcaacggcuccuaccucaacgagacccacuucagcgacgacaucgagcagcaggcggacaacaugaucacggagaugcugcagaaggaguacauggagcgccaggggaagacgccccugggccucguggaccuguucgucuucuccaccagcuucuaccugaucuccaucuuccugcaccucgugaagaucccgacccaccggcacaucgugggcaagagcugccccaagccccaccgccugaaccacauggggaucugcuccugcgggcuguacaagcagcccggcgucccggugaaguggaagcggugaggacuagucccuguucccagagcccacuuuuuuuucuuuuuuugaaauaaaauagccugucuuucagaucuaaaaaaaaaaaaaaaaaaaaaaaaaaaaaaaaaaaaaaaaaaaaaaaaaaaaaaaaaaaaaaaaaaaaaaaaaaaaaaaaaaaaaaaaaaaaaaaaaaaa

SEQ ID NO: 40732 - RNA, 1743 nt, Artificial Sequence
  mRNA product Design a-2 (A100) comprising derived and/or modified sequence from LASV(G1442-SLE-2011;Clade IV)__AIT17180__GPCmut12 (opt1)
aggagaguccgcucagccagguugcagaagcggcuuagcguguguccuaaucuucucucugcguguagguaggccugugccgcaaacaagcuuaccaugggccagaucgugaccuucuuccaggaggucccccacgugaucgaggaggugaugaacaucguccugaucgcccucagcauccuggccgugcugaaggggcucuacaacguggcgaccugcggccugaucgggcuggucacguuccuccugcugugcggccgcuccugcaccaccacccucuacaaggggguguacgagcugcagacgcuggagcucaacauggagacccugaacaugugcaugccgcugagcugcaccaagaacaacucccaccacuacauccgggugggcaacgagacgggccucgagcugacccugaccaacaccagcaucaucaaccacaaguucugcaaccucuccgacgcccacaagaagaaccuguacgaccacgcccugaugagcaucaucuccacguuccaccucagcauccccaacuucaaccaguacgaggccauguccugcgacuucaacgggggcaagaucagcguccaguacaaccugucccacagcuacgccggggacgcggccaaccacugcggcaccguggccaacggggugcugcagaccuucaugcgcauggccuggggcggcuccuacaucgcgcucgacagcgggcggggcaacugggacugcaucaugaccuccuaccaguaccugaucauccagaacacgaccugggacgaccacugccaguucagccgccccucccccaucggguaccugggccuccugagccagcggacccgcgacgucuacaucucccggcgccugcucggcaccuucacguggacccugagcgacagcgaggggaaggacaccccgggcggguacugccugacccgguggaugcucaucgaggccgagcugaagugcuucggcaacacggccguggccaagugcaacgagaagcacgacgaggaguucugcgacaugcugcgccucuucgacuucugcaagcaggccauccagcggcugaaggcggaggcccagauguccauccagcugaucaacaaggccgugaacgcccucaucaacgaccagcugaucaugaagaaccaccuccgcgacaucauggggauccccuacugcaacuacagcaaguacugcuaccugaacaacaccgccaccggcaagaccucccugcccaagugcugccugaucagcaacggcuccuaccucaacgagacgcacuucagcgacgacaucgagcaggaggcggacaacaugaucaccgagaugcugcagaaggaguacauggagcggcaggggaagacgccccugggccucgucgaccuguucguguucuccaccagcuucuaccugaucuccaucuuccugcaccucgugaagaucccgacccaccgccacaucgucggcaagagcugccccaagccccaccggcugaaccacauggggaucugcuccugcgggcuguacaagcagcccggcgugccggugcgcuggaagcggugaggacuagucccuguucccagagcccacuuuuuuuucuuuuuuugaaauaaaauagccugucuuucagaucuaaaaaaaaaaaaaaaaaaaaaaaaaaaaaaaaaaaaaaaaaaaaaaaaaaaaaaaaaaaaaaaaaaaaaaaaaaaaaaaaaaaaaaaaaaaaaaaaaaaa

SEQ ID NO: 40733 - RNA, 1743 nt, Artificial Sequence
  mRNA product Design a-2 (A100) comprising derived and/or modified sequence from LASV(G3010-SLE-2013;Clade IV)__AIT17344__GPCmut12 (opt1)
aggagaguccgcucagccagguugcagaagcggcuuagcguguguccuaaucuucucucugcguguagguaggccugugccgcaaacaagcuuaccaugggccagaucgugaccuucuuccaggaggucccccacgugaucgaggaggugaugaacaucguccugaucgcccucagcauccuggccgugcugaaggggcucuacaacuucgcgaccugcggccugguggggcuggucacguuccuccugcugugcggccgcuccugcaccaccagccucuacaaggggguguacgagcugcagacccuggagcucaacauggagacgcugaacaugugcaugccgcuguccugcaccaagaacaacagccaccacuacaucauggugggcaacgagaccggccucgagcugacgcugaccaacaccuccaucaucaaccacaaguucugcaaccucagcgacgcccacaagaagaaccuguacaaccacgcccugauguccaucaucagcaccuuccaccucuccauccccaacuucaaccaguacgaggccaugagcugcgacuucaacgggggcaagaucuccguccaguacaaccugagccacuccuacgccggggacgcggccagccacugcggcacgguggccaacggggugcugcagaccuucaugcggauggccuggggcggcuccuacaucgcgcucgacagcggguacggcaagugggacugcaucaugaccuccuaccaguaccugaucauccagaacaccacgugggaggaccacugccaguucagccgccccucccccaucggguaccugggccuccugagccagcggacccgcgacaucuacaucagccggcgccugcucggcaccuucaccuggacgcuguccgacagcgaggggaaggacaccccgggcggguacugccugacccgguggaugcucaucgaggccgagcugaagugcuucggcaacaccgccgucgccaagugcaacgagaagcacgacgaggaguucugcgacaugcugcgccucuucgacuucugcaagcaggccauccagcggcugaagacggaggcgcagauguccauccagcugaucaacaaggccgugaacgcccucaucaacgaccagcugaucaugaagaaccaccuccgcgacaucauggggauccccuacugcaacuacagcaaguacugcuaccugaaccacaccaccaccggcaagacgucccugcccaagugcugccuggugagcaacggcuccuaccucaacgagacccacuucagcgacgacaucgagcagcaggccgacaacaugaucaccgagaugcugcagaaggaguacauggagcggcaggggaagacgccccugggccucgucgaccuguucguguucuccaccagcuucuaccugaucuccaucuuccugcaccucgugaagaucccgacccaccgccacaucgucggcaagagcugccccaagccccaccggcugaaccacauggggaucugcuccugcgggcuguacaagcagcccggcgugccggugcgcuggaagcggugaggacuagucccuguucccagagcccacuuuuuuuucuuuuuuugaaauaaaauagccugucuuucagaucuaaaaaaaaaaaaaaaaaaaaaaaaaaaaaaaaaaaaaaaaaaaaaaaaaaaaaaaaaaaaaaaaaaaaaaaaaaaaaaaaaaaaaaaaaaaaaaaaaaaa

SEQ ID NO: 40734 - RNA, 1743 nt, Artificial Sequence
  mRNA product Design a-2 (A100) comprising derived and/or modified sequence from LASV(G502-SLE-2009;Clade IV)__AIT17126__GPCmut12 (opt1)
aggagaguccgcucagccagguugcagaagcggcuuagcguguguccuaaucuucucucugcguguagguaggccugugccgcaaacaagcuuaccaugggccagaucgugaccuucuuccaggaggucccccacgugaucgaggaggugaugaacaucguccugaucgcccucagcauccuggccgugcugaaggggcucuacaacuucgcgaccugcggccugguggggcugcucacguuccugcugcucugcggccgcuccugcaccaccgggcuguacaagggcgucuacgagcugcagacccucgagcugaacauggagacgcugaacaugugcaugccgcucagcugcaccaagaacaacucccaccacuacaucauggugggcaacgagaccgggcuggagcugacgcucaccaacaccagcaucaucaaccacaaguucugcaaccuguccgacgcccacaagaagaaccuguacgaccacgcccucaugagcaucaucuccaccuuccaccugagcauccccaacuucaaccaguacgaggccauguccugcgacuucaacggcgggaagaucagcgugcaguacaaccugucccacagcuacgccggcgacgcggccgaccacugcgggacggucgccaacggcgugcuccagaccuucaugcggauggccuggggcggguccuacaucgcgcuggacagcggccgcgggcggugggacugcaucaugaccuccuaccaguaccugaucauccagaacaccacgugggaggaccacugccaguucagccgccccucccccaucggcuaccucggccugcugagccagcggacccgcgacaucuacaucucccggcgccuccuggggaccuucaccuggacgcugagcgacagcgagggcaaggacacccccgggggcuacugccucacccgguggaugcugaucgaggccgagcugaagugcuucgggaacaccgccguggccaagugcaacgagaagcacgacgaggaguucugcgacaugcuccgccuguucgacuucugcaagcaggccauccagcggcugaaggcggaggcccagauguccauccagcucaucaacaaggccgucaacgcccugaucaacgaccagcuggugaugaagaaccaccuccgcgacaucaugggcauccccuacugcaacuacagccgguacugcuaccugaaccacacgaccaccggccgcaccucccugcccaagugcugccucgugagcaacggguccuaccugaacgagacgcacuucagcgacgacaucgagcagcaggccgacaacaugaucaccgagaugcugcagaaggaguacauggagcggcagggcaagaccccgcucgggcuggucgaccuguucguguucuccaccagcuucuaccugaucuccaucuuccuccaccuggugaagaucccgacgcaccgccacaucgucggcaagagcugccccaagccccaccggcugaaccacauggggaucugcuccugcggccucuacaagcagcccggcgugccggugaaguggaagcgcugaggacuagucccuguucccagagcccacuuuuuuuucuuuuuuugaaauaaaauagccugucuuucagaucuaaaaaaaaaaaaaaaaaaaaaaaaaaaaaaaaaaaaaaaaaaaaaaaaaaaaaaaaaaaaaaaaaaaaaaaaaaaaaaaaaaaaaaaaaaaaaaaaaaaa

SEQ ID NO: 40735 - RNA, 1743 nt, Artificial Sequence
  mRNA product Design a-2 (A100) comprising derived and/or modified sequence from LASV(G733-SLE-2010;Clade IV)__AIT17154__GPCmut12 (opt1)
aggagaguccgcucagccagguugcagaagcggcuuagcguguguccuaaucuucucucugcguguagguaggccugugccgcaaacaagcuuaccaugggccagaucgugaccuucuuccaggaggucccccacgugaucgaggaggugaugaacaucguccugaucgcccucagcauccuggccgugcugaaggggcucuacaacuucgcgaccugcggcaucguggggcuggucuccuuccugcuccugugcggccgcagcugcacgaccucccuguacaaggggguguacgagcuccagacccuggagcugaacauggagacccucaacaugugcaugccgcugagcugcaccaagaacaacucccaccacuacaucauggugggcaacgagaccggccuggagcucacccugacgaacaccagcaucaucaaccacaaguucugcaaccuguccgacgcccacaagaagaaccucuacgaccacgcccugaugagcaucaucuccaccuuccaccugagcauccccaacuucaaccaguacgaggccauguccugcgacuucaacgggggcaagaucagcguccaguacaaccucucccacagcuacgccggggacgcggccaaccacugcggcaccaucgccaacggggugcugcagacguucaugcggauggccuggggcggcuccuacaucgcgcuggacagcgggcgcgaccggugggacugcaucaugaccuccuaccaguaccucaucauccagaacaccaccugggaggaccacugccaguucagccgccccucccccaucggcuaccuggggcugcucagccagcggacgcgcgacaucuacaucagccggcgccugcugggcaccuucaccuggacccucuccgacagcgagggcaaggacacgcccgggggcuacugccugacccgguggaugcugaucgaggccgagcucaagugcuucgggaacaccgccguggccaagugcaacgagaagcacgacgaggaguucugcgacaugcugcgccuguucgacuucugcaagcaggccauccagcggcucaaggcggaggcccagauguccauccagcugaucaacaaggccgucaacgcccugaucaacgaccagcucaucaugaagaaccaccuccgcgacaucaugggcauccccuacugcaacuacagcaaguacugcuaccugaaccacaccacgaccgggaagaccucccugcccaagugcugccuggugagcaacggcuccuaccugaacgagacccacuucagcgacgacaucgagcagcaggccgacaacaugaucacggagaugcuccagaaggaguacauggagcggcagggcaagaccccgcuggggcugguggaccucuucgucuucuccaccagcuucuaccugaucuccaucuuccugcaccuggugaagaucccgacccaccgccacguggucggcaagagcugccccaagccccaccggcucaaccacauggggaucugcuccugcggccuguacgggcagcccggcgugccggugaaguggaagcgcugaggacuagucccuguucccagagcccacuuuuuuuucuuuuuuugaaauaaaauagccugucuuucagaucuaaaaaaaaaaaaaaaaaaaaaaaaaaaaaaaaaaaaaaaaaaaaaaaaaaaaaaaaaaaaaaaaaaaaaaaaaaaaaaaaaaaaaaaaaaaaaaaaaaaa

SEQ ID NO: 40736 - RNA, 1743 nt, Artificial Sequence
  mRNA product Design a-2 (A100) comprising derived and/or modified sequence from MOPV/LASV reassortant(IGS-1;Clade IV)__AFY05576__GPCmut12 (opt1)
aggagaguccgcucagccagguugcagaagcggcuuagcguguguccuaaucuucucucugcguguagguaggccugugccgcaaacaagcuuaccaugggccagaucgugaccuucuuccaggaggucccccacgugaucgaggaggugaugaacaucguccugaucgcccucagcgugcuggccgugcugaaggggcucuacaacuucgcgaccugcggccuggucgggcuggugacguuccuccugcugugcggccgcuccugcaccaccagccucuacaaggggguguacgagcugcagacccuggagcucaacauggagacgcugaacaugugcaugccgcuguccugcaccaagaacaacagccaccacuacaucauggucggcaacgagaccggccucgagcugacgcugaccaacaccuccaucaucaaccacaaguucugcaaccucagcgacgcccacaagaagaaccuguacgaccacgcccugauguccaucaucagcaccuuccaccucuccauccccaacuucaaccaguacgaggccaugagcugcgacuucaacgggggcaagaucuccgugcaguacaaccugagccacuccuacgccggggacgcggccaaccacugcggcacgguggccaacgggguccugcagaccuucaugcggauggccuggggcggcagcuacaucgcgcucgacuccgggcgcggcaacugggacugcaucaugaccagcuaccaguaccugaucauccagaacaccacgugggaggaccacugccaguucucccggcccagccccaucggguaccugggccuccugucccagcgcacccgggacaucuacaucagccgccggcugcucggcaccuucaccuggacgcugagcgacuccgagggggaggacaccccgggcggguacugccugacccgcuggaugcucaucgaggccgagcugaagugcuucggcaacaccgccguggccaagugcaacgagaagcacgacgaggaguucugcgacaugcugcggcuguucgacuucugcaagcaggccauccagcgccugaaggcggaggcccagaugagcauccagcugaucaacaaggccgugaacgcccucaucaacgaccagcugaucaugaagaaccaccuccgggacaucauggggauccccuacugcaacuacuccaaguacugcuaccucaaccacacgaccaccggccgcaccagccugcccaagugcugccuggucuccaacggcagcuaccucaacgagacgcacuucuccgacgacaucgagcagcaggccgacaacaugaucaccgagaugcugcagaaggaguacauggagcggcaggggaagacgccccugggccucguggaccuguucguguucagcaccuccuucuaccugaucagcaucuuccugcaccucgucaagaucccgacccaccgccacaucguggggaaguccugccccaagccccaccggcugaaccacaugggcaucugcagcugcgggcuguacaagcagcccggcgugccggucaaguggaagcgcugaggacuagucccuguucccagagcccacuuuuuuuucuuuuuuugaaauaaaauagccugucuuucagaucuaaaaaaaaaaaaaaaaaaaaaaaaaaaaaaaaaaaaaaaaaaaaaaaaaaaaaaaaaaaaaaaaaaaaaaaaaaaaaaaaaaaaaaaaaaaaaaaaaaaa

SEQ ID NO: 40737 - RNA, 1743 nt, Artificial Sequence
  mRNA product Design a-2 (A100) comprising derived and/or modified sequence from LASV(LM765-SLE-2012;Clade IV)__AIT17814__GPCmut12 (opt1)
aggagaguccgcucagccagguugcagaagcggcuuagcguguguccuaaucuucucucugcguguagguaggccugugccgcaaacaagcuuaccaugggccagaucgugaccuucuuccaggaggucccccacgugaucgaggaggugaugaacaucguccugaucgcccucagcauccuggccgugcugaaggggcucuacaacuucgcgaccugcggccugguggggcuggucacguuccuccugcugugcggccgcuccugcaccaccagccucuacaaggggguguacgagcugcagacccuggagcucaacauggagacgcugaacaugugcaugccgcuguccugcaccaagaacaacagccaccacuacaucauggugggcaacgagaccggccucgagcugacgcugaccaacaccuccaucaucgaccacaaguucugcaaccucagcgacgcccaccggaagaaccuguacgaccacgcccugauguccaucaucagcaccuuccaccucuccauccccaacuucaaccaguacgaggccaugagcugcgacuucaacgggggcaagaucuccguccaguacaaccugagccacuccuacgccaaggacgcggccgaccacugcgggacgguggccaacggcgugcugcagaccuucaugcgcauggccuggggcgggagcuacaucgcgcucgacuccggccgggggcgcugggacugcaucaugaccagcuaccaguaccugaucauccagaacaccacgugggaggaccacugccaguucucccggcccagccccaucggcuaccuggggcuccugucccagcgcacccgggacaucuacaucagccgccggcugcucggcaccuucaccuggacgcugagcgacuccgagggcaaggacacccccgggggcuacugccugacccgcuggaugcucaucgaggccgagcugaagugcuucgggaacaccgccgucgccaagugcaacgagaagcacgacgaggaguucugcgacaugcugcggcuguucgacuucugcaagcaggccauccagcgccugaaggcggaggcccagaugagcauccagcugaucaacaaggccgugaacgcccucaucaacgaccagcugaucaugaagaaccaccuccgggacaucaugggcauccccuacugcaacuacuccaaguacugcuaccucaaccacacgaccaccgggaagaccagccugcccaagugcugccugguguccaacggcagcuaccucaacgagacgcacuucuccgacgacaucgagcagcaggccgacaacaugaucaccgagaugcugcagaaggaguacauggagcgccagggcaagaccccgcuggggcucgucgaccuguucguguucagcaccuccuucuaccugaucagcaucuuccugcaccucgugaagaucccgacgcaccggcacaucgucggcaagcccugccccaagccccaccgccugaaccacauggggaucugcuccugcggccuguacaagcagccgggggugcccgugaaguggaagcggugaggacuagucccuguucccagagcccacuuuuuuuucuuuuuuugaaauaaaauagccugucuuucagaucuaaaaaaaaaaaaaaaaaaaaaaaaaaaaaaaaaaaaaaaaaaaaaaaaaaaaaaaaaaaaaaaaaaaaaaaaaaaaaaaaaaaaaaaaaaaaaaaaaaaa

SEQ ID NO: 40738 - RNA, 1743 nt, Artificial Sequence
  mRNA product Design a-2 (A100) comprising derived and/or modified sequence from LASV(LM776-SLE-2012;Clade IV)__AIT17824__GPCmut12 (opt1)
aggagaguccgcucagccagguugcagaagcggcuuagcguguguccuaaucuucucucugcguguagguaggccugugccgcaaacaagcuuaccaugggccagaucgugaccuucuuccaggaggucccccacgugaucgaggaggugaugaacaucguccugaucgcccucagcauccuggccgugcugaaggggcucuacaacuucgcgaccugcggccugguggggcuggucacguuccuccugcugugcggccgcuccugcaccaccagcguguacaaggggguguacgagcuccagacccuggagcugaacauggagacgcucaacaugugcaugccgcuguccugcaccaagaacaacagccaccacuacaucauggucggcaacgagaccggccuggagcucacgcugaccaacaccuccaucaucaaccacaaguucugcaaccugagcgacgcccacaagaagaaccucuacgaccacgcccugauguccaucaucagcaccuuccaccuguccauccccaacuucaaccaguacgaggccaugagcugcgacuucaacgggggcaagaucuccgugcaguacaaccucagccacuccuacgccggggacgcggccaaccacugcggcacgguggccaacgggguccugcagaccuucaugcggauggccuggggcggcagcuacaucgcgcuggacuccgggcacggcaagugggacugcaucaugaccagcuaccaguaccucaucauccagaacaccacgugggaggaccacugccaguucucccgccccagccccaucggguaccugggccugcucucccagcggacccgcgacaucuacaucagccggcgccugcugggcaccuucaccuggacgcucagcgacuccgaggggaaggacaccccgggcggguacugccugacccgguggaugcugaucgaggccgagcucaagugcuucggcaacaccgccguggccaagugcaacgagaagcacgacgaggaguucugcgacaugcugcgccuguucgacuucugcaagcaggccauccagcggcucaaggcggaggcccagaugagcauccagcugaucaacaaggccgugaacgcccugaucaacgaccagcucaucaugaagaaccaccuccgcgacaucauggggauccccuacugcaacuacuccaaguacugcuaccugaaccacacgaccaccggcaagaccagccugcccaagugcugccuggucuccaacggcagcuaccugaacgagacgcacuucuccgacgacaucgagcagcaggccgacaacaugaucaccgagaugcuccagaaggaguacauggagcggcaggggaagacgccccugggccugguggaccucuucguguucagcaccuccuucuaccugaucagcaucuuccugcaccuggucaagaucccgacccaccgccacaucguggggaaguccugccccaagccccaccggcucaaccacaugggcaucugcagcugcgggcuguacaagcagcccggcgugccgguccgcuggaagcggugaggacuagucccuguucccagagcccacuuuuuuuucuuuuuuugaaauaaaauagccugucuuucagaucuaaaaaaaaaaaaaaaaaaaaaaaaaaaaaaaaaaaaaaaaaaaaaaaaaaaaaaaaaaaaaaaaaaaaaaaaaaaaaaaaaaaaaaaaaaaaaaaaaaaa

SEQ ID NO: 40739 - RNA, 1743 nt, Artificial Sequence
  mRNA product Design a-2 (A100) comprising derived and/or modified sequence from LASV(Mad39;Clade IV)__ANH09722__GPCmut12 (opt1)
aggagaguccgcucagccagguugcagaagcggcuuagcguguguccuaaucuucucucugcguguagguaggccugugccgcaaacaagcuuaccaugggccagaucgugaccuucuuccaggaggucccccacgugaucgaggaggugaugaacaucguccugaucgcccucagcauccuggccgugcugaaggggcucuacaacguggcgaccugcggccugaucgggcuggucacguuccuccugcugugcggccgcuccugcaccaccacccucuacaaggggguguacgagcugcaggcccuggagcucaacauggagacgcugaacaugugcaugccgcugagcugcaccaagaacaacucccaccacuacauccgggugggcaacgagaccggccucgagcugacgcugaccaacaccagccucaucaaccacaaguucugcaaccuguccgacgcccacaagaagaaccuguacgaccacgcccucaugagcaucaucuccaccuuccaccugagcauccccaacuucaaccaguacgaggccauguccugcgacuucaacgacgggaagaucagcguccaguacaaccugucccacacguacgcgggcgacaccgccaaccacugcgggaccguggccaacggcgugcuccagaccuucaugcgcauggccuggggcgggagcuacaucgcgcuggacuccggccgcgggggcugggacugcaucaugacgagcuaccaguaccugaucauccagaacaccaccugggaggaccacugccaguucucccggcccagccccaucggguaccucggccugcugucccagcggacccgcgacaucuacaucagccggcgccuccugggcacguucaccuggacccuguccgacagcgaggggaaggacaccccgggcggguacugccucacgcgguggaugcugaucgaggccgagcugaagugcuucggcaacaccgccgucgccaagugcaacgagaagcacgacgaggaguucugcgacaugcuccgccuguucgacuucugcaagcaggccauccagcggcugaaggcggaggcccagaugagcauccagcucaucaacaaggccgugaacgcccugaucaacgaccagcugaucaugaagaaccaccuccgcgacaucauggggauccccuacugcaacuacuccaaguacugcuaccugaaccacaccgugaccggcaagacgagccugcccaagugcugccucgucuccaacggcagcuaccugaacgagacccacuucuccgacgacaucgagcagcaggccgacaacaugaucaccgagaugcugcagaaggaguacauggagcggcaggggaagacgccccucggccugguggaccuguucguguucagcaccuccuucuaccugaucagcaucuuccuccaccuggucaagaucccgacccaccgccacgugguggggaagcccugccccaagccccaccggcugaaccacaugggcaucugcuccugcggguucuacaagcagccgggcguccccgugcgcuggaagcggugaggacuagucccuguucccagagcccacuuuuuuuucuuuuuuugaaauaaaauagccugucuuucagaucuaaaaaaaaaaaaaaaaaaaaaaaaaaaaaaaaaaaaaaaaaaaaaaaaaaaaaaaaaaaaaaaaaaaaaaaaaaaaaaaaaaaaaaaaaaaaaaaaaaaa

SEQ ID NO: 40740 - RNA, 1743 nt, Artificial Sequence
  mRNA product Design a-2 (A100) comprising derived and/or modified sequence from LASV(Z0947-SLE-2011;Clade IV)__AIT17840__GPCmut12 (opt1)
aggagaguccgcucagccagguugcagaagcggcuuagcguguguccuaaucuucucucugcguguagguaggccugugccgcaaacaagcuuaccaugggccagaucgugaccuucuuccaggaggucccccacgugaucgaggaggugaugaacaucguccugaucgcccucagcauccuggccgugcugaaggggcucuacaacuucgcgaccugcggccugguggggcuggucacguuccuccugcugugcggccgcuccugcaccaucagccucuacaaggggguguacgagcugcagacccuggagcucaacauggagacccugaacaugugcaugccgcuguccugcaccaagaacaacagccaccacuacaucauggugggcaacgagaccggccucgagcugacccugacgaacaccuccaucaucaaccacaaguucugcaaccucagcgacgcccacaagaagaaccuguacgaccacgcccugauguccaucaucagcaccuuccaccucuccauccccaacuucaaccaguacgaggccaugagcugcgacuucaacgggggcaagaucuccguccaguacaaccugagccacuccuacgccggggacgcggccaaccacugcggcaccguggccaacggggugcugcagacguucaugcggauggccuggggcggcagcuacaucgcgcucgacuccgggcgcgaccggugggacugcaucaugaccagcuaccaguaccugaucauccagaacaccaccugggaggaccacugccaguucucccgccccagccccaucggcuaccuggggcuccugucccagcggacgcgcgacaucuacaucagccggcgccugcucggcaccuucaccuggacccugagcgacuccgagggcaaggacacgcccgggggcuacugccugacccgguggaugcucaucgaggccgagcugaagugcuucgggaacaccgccgucgccaagugcaacgagaagcacgacgaggaguucugcgacaugcugcgccucuucgacuucugcaagcaggccauccagcggcugaaggcggaggcccagaugagcauccagcugaucaacaaggccgugaacgcccucaucaacgaccagcugaucaugaagaaccaccuccgcgacaucaugggcauccccuacugcaacuacuccaaguacugcuaccugaaccacaccacgaccgggaagaccagccugcccaagugcugccugguguccaacggcagcuaccucaacgagacccacuucuccgacgacaucgagcagcaggccgacaacaugaucacggagaugcugcagaaggaguacauggagcggcagggcaagaccccgcuggggcucgucgaccuguucguguucagcaccuccuucuaccugaucagcaucuuccugcaccucgugaagaucccgacccaccgccacaucgucggcaagcccugccccaagccccaccggcugaaccacauggggaucugcuccugcggccuguacaagcagccgggggugcccgugaaguggaagcgcugaggacuagucccuguucccagagcccacuuuuuuuucuuuuuuugaaauaaaauagccugucuuucagaucuaaaaaaaaaaaaaaaaaaaaaaaaaaaaaaaaaaaaaaaaaaaaaaaaaaaaaaaaaaaaaaaaaaaaaaaaaaaaaaaaaaaaaaaaaaaaaaaaaaaa

SEQ ID NO: 40741 - RNA, 1743 nt, Artificial Sequence
  mRNA product Design a-2 (A100) comprising derived and/or modified sequence from LASV(Josiah;Clade IV)__NP_694870__GPCmut12 (opt1)
aggagaguccgcucagccagguugcagaagcggcuuagcguguguccuaaucuucucucugcguguagguaggccugugccgcaaacaagcuuaccaugggccagaucgugaccuucuuccaggaggucccccacgugaucgaggaggugaugaacaucguccugaucgcccucagcgugcuggccgugcugaaggggcucuacaacuucgcgaccugcggccuggucgggcuggugaccuuccuccugcugugcggccgcuccugcaccaccagccucuacaaggggguguacgagcugcagacccuggagcucaacauggagacgcugaacaugugcaugccgcuguccugcaccaagaacaacagccaccacuacaucauggucggcaacgagaccggccucgagcugacccugacgaacaccuccaucaucaaccacaaguucugcaaccucagcgacgcccacaagaagaaccuguacgaccacgcccugauguccaucaucagcaccuuccaccucuccauccccaacuucaaccaguacgaggccaugagcugcgacuucaacgggggcaagaucuccgugcaguacaaccugagccacuccuacgccggggacgcggccaaccacugcggcaccguggccaacgggguccugcagacguucaugcggauggccuggggcggcagcuacaucgcgcucgacuccgggcgcggcaacugggacugcaucaugaccagcuaccaguaccugaucauccagaacaccaccugggaggaccacugccaguucucccggcccagccccaucggguaccugggccuccugucccagcgcacgcgggacaucuacaucagccgccggcugcucggcaccuucaccuggacccugagcgacuccgaggggaaggacacgccgggcggguacugccugacccgcuggaugcucaucgaggccgagcugaagugcuucggcaacaccgccguggccaagugcaacgagaagcacgacgaggaguucugcgacaugcugcggcuguucgacuucugcaagcaggccauccagcgccugaaggcggaggcccagaugagcauccagcugaucaacaaggccgugaacgcccucaucaacgaccagcugaucaugaagaaccaccuccgggacaucauggggauccccuacugcaacuacuccaaguacugcuaccucaaccacaccacgaccggccgcaccagccugcccaagugcugccuggucuccaacggcagcuaccucaacgagacccacuucuccgacgacaucgagcagcaggccgacaacaugaucacggagaugcugcagaaggaguacauggagcggcaggggaagacgccccugggccugguggaccucuucguguucagcaccuccuucuaccugaucagcaucuuccugcaccucgucaagaucccgacccaccgccacaucguggggaaguccugccccaagccccaccggcugaaccacaugggcaucugcagcugcgggcuguacaagcagcccggcgugccggucaaguggaagcgcugaggacuagucccuguucccagagcccacuuuuuuuucuuuuuuugaaauaaaauagccugucuuucagaucuaaaaaaaaaaaaaaaaaaaaaaaaaaaaaaaaaaaaaaaaaaaaaaaaaaaaaaaaaaaaaaaaaaaaaaaaaaaaaaaaaaaaaaaaaaaaaaaaaaaa

SEQ ID NO: 40742 - RNA, 1740 nt, Artificial Sequence
  mRNA product Design a-2 (A100) comprising derived and/or modified sequence from LASV(LP;Clade I)__AAF86701__GPCmut12 (opt1)
aggagaguccgcucagccagguugcagaagcggcuuagcguguguccuaaucuucucucugcguguagguaggccugugccgcaaacaagcuuaccaugggccagaucaucaccuucuuccaggaggugccccacgucaucgaggaggugaugaacaucgugcugaucgcccucagccugcuggccauccucaaggggcuguacaacaucgcgaccugcggcaucaucgggcuggucgccuuccucuuccugugcggcaaguccugcagccugacgcucaagggcggguacgagcugcagacccuggagcucaacauggagacccugaacaugugcaugccgcuguccugcaccaagaacagcucccaccacuacauccgcgugggcaacgagacggggcucgagcugacccugaccaacaccagcaucaucaaccacaaguucugcaaccucuccgacgcccacaagaagaaccuguacgaccacgcccugaugagcaucaucuccacguuccaccucagcauccccaacuucaaccaguacgaggccauguccugcgacuucaacggcgggaagaucagcgugcaguacaaccugucccacagcuacgcgggcgacgccgccgagcacugcgggaccgucgccaacggcgugcugcagaccuucaugcggauggcguggggcgggcgcuacaucgcccucgacuccggcaaggggaacugggacugcaucaugaccagcuaccaguaccugaucauccagaacacgaccugggaggaccacugccaguucucccggcccagccccaucggcuaccugggccuccugucccagcgcacccgggacaucuacaucagccgccggcugcucgggaccuucacguggacccugagcgacuccgagggcaacgagacccccgggggcuacugccugacccgcuggaugcucaucgaggccgagcugaagugcuucgggaacacggccguggccaagugcaacgagaagcacgacgaggaguucugcgacaugcugcggcuguucgacuucugcaagcaggcgauccgccggcugaaggccgaggcccagaugagcauccagcugaucaacaaggccgucaacgcccucaucaacgaccagcugaucaugaagaaccaccuccgcgacaucaugggcauccccuacugcaacuacuccaaguacugcuaccucaaccacaccagcuccggccggaccagccugcccaagugcugccugaucuccaacgggagcuaccucaacgagacccaguucuccgacgacaucgagcagcaggcggacaacaugaucacggagaugcugcagaaggaguacaucgagcgccagggcaagaccccgcuggggcugguggacaucuucaucuucagcaccuccuucuaccucaucagcaucuuccugcaccugaucaagaucccgacccaccggcacaucgugggcaagcccugccccaagccccaccgccucaaccacaugggggucugcuccugcggccuguacaagcacccgggcgugcccacgaaguggaagcggugaggacuagucccuguucccagagcccacuuuuuuuucuuuuuuugaaauaaaauagccugucuuucagaucuaaaaaaaaaaaaaaaaaaaaaaaaaaaaaaaaaaaaaaaaaaaaaaaaaaaaaaaaaaaaaaaaaaaaaaaaaaaaaaaaaaaaaaaaaaaaaaaaaaaa

SEQ ID NO: 40743 - RNA, 1740 nt, Artificial Sequence
  mRNA product Design a-2 (A100) comprising derived and/or modified sequence from LASV(803213;Clade II)__AAF86703__GPCmut12 (opt1)
aggagaguccgcucagccagguugcagaagcggcuuagcguguguccuaaucuucucucugcguguagguaggccugugccgcaaacaagcuuaccaugggccagaucaucaccuucuuccaggaggugccccacgucaucgaggaggugaugaacaucgugcugaucgcccucagccugcuggccauccucaaggggaucuacaacgucgcgaccugcggccuguucgggcugaucuccuuccuccugcugugcggccgcagcugcuccgugacguacaaggggguguacgagcuccagacccuggagcugaacauggccaaccucaacaugugcaugccgcugagcugcaccaagaacaacucccaccacuacaucauggucggcaacgagaccggccuggagcucacgcugaccaacaccagcaucaucaaccacaaguucugcaaccuguccgacgcccacaagaagaaccucuacgaccacgcccugaugagcaucaucuccaccuuccaccugagcauccccaacuucaaccaguacgaggccauguccugcgacuucaacgggggcaagaucagcgugcaguacaaccucucccacagcuucgcgguggacgccgccaaccacugcgggacgaucgccaacggcguccugcagaccuucaugcggauggcguggggcggguccuacaucgcccuggacagcggcaaggggaacugggacugcaucaugaccuccuaccaguaccucaucauccagaacaccacgugggaggaccacugccaguucagccgccccucccccaucggcuaccuggggcugcucagccagcggacccgcgacaucuacaucagccggcgccugcugggcaccuucaccuggacgcucuccgacagcgagggcaacgaggcccccgggggcuacugccugacccgguggaugcugaucgaggccgagcucaagugcuucgggaacaccgccguggcgaagugcaacgagaagcacgacgaggaguucugcgacaugcugcgccuguucgacuucugcaagcaggccaucaagcggcucaagaccgaggcccagauguccauccagcugaucaacaaggccgugaacgcccugaucaacgaccagcucaucaugaagaaccaccuccgcgacaucaugggcauccccuacugcaacuacagccgguacugcuaccugaaccacacggucaccgggaagaccucccugccccgcugcugccuggugagcaacggcuccuaccugaacgagacccacuucagcgacgacaucgagcagcaggcggacaacaugaucacggagaugcuccagaaggaguacauggaccggcagggcaagaccccgcuggggcugguggaccuguucgucuucuccaccagcuucuaccucaucuccaucuuccugcaccuggugaagaucccgacccaccgccacaucgugggcaagcccugccccaagccccaccggcucaaccacauggggaucugcagcugcggccuguacaagcacccggggguccccgugaaguggaagcgcugaggacuagucccuguucccagagcccacuuuuuuuucuuuuuuugaaauaaaauagccugucuuucagaucuaaaaaaaaaaaaaaaaaaaaaaaaaaaaaaaaaaaaaaaaaaaaaaaaaaaaaaaaaaaaaaaaaaaaaaaaaaaaaaaaaaaaaaaaaaaaaaaaaaaa

SEQ ID NO: 40744 - RNA, 1740 nt, Artificial Sequence
  mRNA product Design a-2 (A100) comprising derived and/or modified sequence from LASV(GA391;Clade III)__CAA36645__GPCmut12 (opt1)
aggagaguccgcucagccagguugcagaagcggcuuagcguguguccuaaucuucucucugcguguagguaggccugugccgcaaacaagcuuaccaugggccagaucgugaccuucuuccaggaggucccccacgugaucgaggaggugaugaacaucguccugaucgcccucagcauccuggccauccugaaggggcucuacaacguggcgaccugcggccugaucgggcuggugaccuuccuccugcuguccggccgcagcugcucccucaucuacaaggggaccuacgagcugcagacccuggagcucaacauggagacccugaacaugugcaugccgcugagcugcacgaagaacaacucccaccacuacauccgggucggcaacgagaccggccucgagcugacccugaccaacacgagcauccucaaccacaaguucugcaaccuguccgacgcccacaagcgcaaccuguacgaccacagccucauguccaucaucagcaccuuccaccuguccauccccaacuucaaccaguacgaggccaugagcugcgacuucaacgggggcaagaucaccgugcaguacaaccugucccacagcuucgccguggacgccgcggggcacugcggcacccucgccaacgggguccugcagacguucaugcggauggccuggggcggcuccuacaucgcccuggacagcgggcgcggcaacugggacugcaucaugaccuccuaccaguaccucaucauccagaacaccaccugggacgaccacugccaguucagccggcccucccccaucggguaccugggccugcucagccagcgcacgcgggacaucuacaucagccgccggcugcugggcaccuucaccuggacccucuccgacagcgaggggaacgagacgccgggcggguacugccugacccgcuggaugcugaucgaggcggagcucaagugcuucggcaacaccgccguggccaagugcaacgagaagcacgacgaggaguucugcgacaugcugcggcuguucgacuucugcaagcaggccauccgccggcucaagaccgaggcccagauguccauccagcugaucaacaaggcggugaacgcccugaucaacgaccagcucaucaugaagaaccaccuccgcgacaucauggggauccccuacugcaacuacagccgguacugcuaccugaaccacacguccaccggcaagaccagccugccccgcugcugccugaucuccaacggcagcuaccugaacgagaccaaguucuccgacgacaucgagcagcaggccgacaacaugaucacggagaugcugcagaaggaguacaucgaccggcaggggaagacgccccucggccuggucgaccuguucguguucagcaccuccuucuaccucaucagcaucuuccugcaccuggugaagaucccgacccaccgccacaucgucgggaagcccugccccaagccccaccggcucaaccacaugggcaucugcuccugcgggcuguacaagcagccgggcgugcccgugcgcuggaagcggugaggacuagucccuguucccagagcccacuuuuuuuucuuuuuuugaaauaaaauagccugucuuucagaucuaaaaaaaaaaaaaaaaaaaaaaaaaaaaaaaaaaaaaaaaaaaaaaaaaaaaaaaaaaaaaaaaaaaaaaaaaaaaaaaaaaaaaaaaaaaaaaaaaaaa

SEQ ID NO: 40745 - RNA, 1743 nt, Artificial Sequence
  mRNA product Design a-2 (A100) comprising derived and/or modified sequence from LASV(AV;Clade V)__CCA30314__GPCmut12 (opt1)
aggagaguccgcucagccagguugcagaagcggcuuagcguguguccuaaucuucucucugcguguagguaggccugugccgcaaacaagcuuaccaugggccagaucgugaccuucuuccaggaggucccccacgugaucgaggaggugaugaacaucguccugaucgcccucagcauccuggccgugcugaaggggcucuacaacaucgcgaccugcggccugaucgggcugaucacguuccuccugcugugcggccgcuccugcagcuccaaccucuacaaggggguguacgagcugcagagccuggaccucaacauggagacccugaacaugugcaugccgcuguccugcaccaagaacaacagccaccacuacauccgggucggcaacgacaccggccucgagcugacgcugaccaacaccuccauccucaaccacaaguucugcaaccugagcgacgcccacaagaaggaccuguacgaccacgcccucauguccaucaucagcaccuuccaccuguccauccccaacuucaaccaguacgaggccaugagcugcgacuucaacgggggcaagaucuccgugcaguacaaccugagccacuccuacgccaucgacgcggccaaccacugcgggacgguggccaacggcauccuccagaccuucaugcgcauggccuggggcgggagcuacaucgcgcuggacuccggccgggggaacugggacugcaucaugaccagcuaccaguaccugaucauccagaacaccacgugggagaaccacugccaguucucccgccccagccccaucggcuaccucgggcugcugagccagcggacccgcgacaucuacaucucccggcgccuccugggcaccuucaccuggacgcugagcgacuccgagggcaacgccacccccgggggcuacugccucacccgguggaugcugaucgaggccgagcugaagugcuucgggaacaccgccgucgccaagugcaacgagaagcacgacgaggaguucugcgacaugcuccgccuguucgacuucugcaagcaggcgaucagccggcugaaguccgaggcccagaugagcauccagcucaucaacaaggccgugaacgcccugaucaacgaccagcugaucaugaagaaccaccuccgcgacaucaugggcauccccuacugcaacuacuccaaguacugcuaccugaaccacacgaucaccgggaagaccagccugcccaagugcugccucguguccaacggcagcuaccugaacgagacccacuucuccgacgacaucgagcagcaggccgacaacaugaucacggagaugcugcagaaggaguacauggagcggcagggcaagaccccgcuggggcucgucgaccuguucguguucagcaccuccuucuaccugaucagcaucuuccuccgccuggugaagaucccgacccaccggcacaucgucggcaagcccugccccaagccccaccgccugaaccacauggggaucugcuccugcggccucuacaagcagccgggggugcccgugcgguggaagcgcugaggacuagucccuguucccagagcccacuuuuuuuucuuuuuuugaaauaaaauagccugucuuucagaucuaaaaaaaaaaaaaaaaaaaaaaaaaaaaaaaaaaaaaaaaaaaaaaaaaaaaaaaaaaaaaaaaaaaaaaaaaaaaaaaaaaaaaaaaaaaaaaaaaaaa

SEQ ID NO: 40746 - RNA, 1740 nt, Artificial Sequence
  mRNA product Design a-2 (A100) comprising derived and/or modified sequence from LASV(Togo/2016/7082;Clade VI)__AMR44577__GPCmut12 (opt1)
aggagaguccgcucagccagguugcagaagcggcuuagcguguguccuaaucuucucucugcguguagguaggccugugccgcaaacaagcuuaccaugggccagaucaucaccuucuuccaggaggugccccacgucaucgaggaggugaugaacaucgugcugaucgcccucagccugcuggccauccucaagggggucuacaacguggcgaccugcggcaucaucgggcuggugacguuccuguuccucugcggccgcuccugcagccugaucuacaagggguccuacgagcugcagacccucgagcugaacauggagacccugaacaugugcaugccgcucagcugcaccaagaacuccagccaccacuacauccgggucggcaacgagacgggccuggagcugacccucaccaacaccuccaucaucaaccacaaguucugcaaccugagcgacgcccacaagcgcaaccuguacgaccacgcccucauguccauccugagcacguuccaccuguccauccccaacuucaaccaguacgaggccaugagcugcgacuucaacgggggcaagaucuccgugcaguacaaccucagccacgccuacgcgguggacgccgccgagcacugcgggaccgucgccaacggcgugcugcagaccuucaugcggauggcguggggcggguccuacaucgcccuggacagcggccgcgggaacugggacugcaucaugaccuccuaccaguaccucaucauccagaacacgaccugggaggaccacugccaguucagccggcccucccccaucggcuaccuggggcugcucagccagcgcacccgggacaucuacaucagccgccggcugcugggcaccuucacguggacccucuccgacagcgagggcaacgagacccccgggggcuacugccugacccgcuggaugcugaucgaggccgagcucaagugcuucgggaacacggccguggccaagugcaacgagaagcacgacgaggaguucugcgacaugcugcggcuguucgacuucugcaagcaggcgauccagcgccucaaguccgaggcccagaugagcauccagcugaucaacaaggccgucaacgcccugaucaacgaccagcucaucaugaagaaccaccuccgggacaugaugggcauccccuacugcaacuacuccaaguacugcuaccugaaccacaccagcuccgggcgcaccagccugcccaagugcugccugguguccaacggcagcuaccugaacgagacccacuucuccgacgacaucgagcagcaggccgacaacaugaucacggagaugcuccagaaggaguacaucgaccggcagggcaagaccccgcuggggcugguggaccuguucgucuucagcaccuccuucuaccucaucagcaucuuccugcaccugaucaagaucccgacccaccgccacaucgugggcaagcccugccccaagccccaccggcucaaccacauggggaucugcuccugcggccuguacaagcagccgggggugcccacgcgcuggaagcggugaggacuagucccuguucccagagcccacuuuuuuuucuuuuuuugaaauaaaauagccugucuuucagaucuaaaaaaaaaaaaaaaaaaaaaaaaaaaaaaaaaaaaaaaaaaaaaaaaaaaaaaaaaaaaaaaaaaaaaaaaaaaaaaaaaaaaaaaaaaaaaaaaaaaa

SEQ ID NO: 40747 - RNA, 1740 nt, Artificial Sequence
  mRNA product Design a-2 (A100) comprising derived and/or modified sequence from LASV(KAK-428;Clade n.d. (VII))__ANH09740__GPCmut12 (opt1)
aggagaguccgcucagccagguugcagaagcggcuuagcguguguccuaaucuucucucugcguguagguaggccugugccgcaaacaagcuuaccaugggccagaucgugaccuucuuccaggaggucccccacgugaucgaggaggugaugaacaucguccugaucgcccucagccugcuggccauccucaaggggcuguacaacuucgcgaccugcggcgugaucgggcugaucacguuccuccugcugugcggccgcuccugcagcgccaccuacaaggggcaguacgagcuccagacccuggagcugaacauggagucccucaacaugugcaugccgcugagcugcaccaagaacaacucccaccacuacauccgggccggcaacaacacgggccuggagcucacccugaccaacaccagcaucaucucccacaaguucugcaaccugagcgacgcccacaagaagaaccucuacgaccacacgcugauguccaucaucaccaccuuccaccugagcauccccaacuucaaccaguacgaggccauguccugcgacuucaacgggggcaagaucagcauccaguacaaccucucccacagcuacgcgggggacgccgcccagcacugcggcaccguggccaacgggguccugcagacguucaugcgcauggcguggggcggcuccuaccuggcccucgacagcgggcggcgcggcugggacugcaucaucuccagcuaccaguaccugaucauccagaacaccaccugggacgaccacugccaguucucccggcccagccccaucggguaccugggcuucgugagccagaagacccgcgacaucuacaucucccggcgccuccugggcacguucaccuggacccugagcgacuccgaggggcacgacaugccgggcggguacugccucacccgguggaugcugaucgaggccgaccugaagugcuucggcaacacggccguggccaagugcaacgagaagcacgacgaggaguucugcgacauguggcgccucuucgacuucugcaagcaggcgauccagcggcugaaggccgaggcccagaugaacauccagcugaucaacaaggccgucaacgcccucaucaacgaccagcugaugaugaagaaccaccuccgcgacaucauggggauccccuacugcaacuacagcaaguucugcuaccugaacaacaccaccaccggccggacgucccugccccgcugcugccugaucagcaacggcuccuaccucaacgagacccacuucagcgacgacaucgagcagcaggcggacaacaugaucaccgagaugcugcagaaggaguacauggaccggcaggggaagacgccccugggccucguggaccuguucguguucuccaccagcuucuaccugaucaccaucuuccugcaccucgucaagaucccgacccaccgccacaucguggggaagcccugccccaagccccaccggcugaaccacaugggcaucugcuccugcgggcuguacaagcagccgggcgugcccguccgcuggaagcggugaggacuagucccuguucccagagcccacuuuuuuuucuuuuuuugaaauaaaauagccugucuuucagaucuaaaaaaaaaaaaaaaaaaaaaaaaaaaaaaaaaaaaaaaaaaaaaaaaaaaaaaaaaaaaaaaaaaaaaaaaaaaaaaaaaaaaaaaaaaaaaaaaaaaa

SEQ ID NO: 40748 - RNA, 1740 nt, Artificial Sequence; identical to SEQ ID NO: 40742
  mRNA product Design a-2 (A100) comprising derived and/or modified sequence from LASV(Pinneo-NIG-1969;Clade I)__AIT17836__GPCmut12 (opt1)

SEQ ID NO: 40749 - RNA, 1740 nt, Artificial Sequence
  mRNA product Design a-2 (A100) comprising derived and/or modified sequence from LASV(ISTH0009-NIG-2011;Clade II)__AIT17404__GPCmut12 (opt1)
aggagaguccgcucagccagguugcagaagcggcuuagcguguguccuaaucuucucucugcguguagguaggccugugccgcaaacaagcuuaccaugggccagaucaucaccuucuuccaggaggugccccacgucaucgaggaggugaugaacaucgugcugaucgcccucagccugcuggccauccucaaggggaucuacaacgucgcgaccugcggccuguucgggcugguguccuuccuccugcugugcggccgcagcugcuccacgaccuacaaggggguguacgagcuccagacccuggagcuggacauggccagccucaacaugugcaugccgcuguccugcaccaagaacaacagccaccacuacaucauggucggcaacgagacgggccuggagcucacccugaccaacaccuccaucaucaaccacaaguucugcaaccugagcgacgcccacaagaagaaccucuacgaccacgcccugauguccaucaucagcacguuccaccuguccauccccaacuucaaccaguacgaggccaugagcugcgacuucaacgggggcaagaucuccgugcaguacaaccucagccacgcguacgccguggacgccgccaaccacugcgggaccaucgcgaacggcguccugcagaccuucaugcggauggccuggggcggguccuacaucgcccuggacagcggcaagggguccugggacugcaucaugaccagcuaccaguaccucaucauccagaacacgaccugggaggaccacugccaguucucccgccccagccccaucggcuaccuggggcugcucagccagcggacccgcgacaucuacaucucccggcgccugcugggcaccuucacguggacccucagcgacuccgagggcaacgagacccccgggggcuacugccugacccgguggaugcugaucgaggccgagcucaagugcuucgggaacacggccguggcgaagugcaacgagaagcacgacgaggaguucugcgacaugcugcgccuguucgacuucugcaagcaggccauccggcgccucaagaccgaggcccagaugagcauccagcugaucaacaaggccgugaacgcccugaucaacgaccagcucaucaugaagaaccaccuccgggacaucaugggcauccccuacugcaacuacuccaaguacugcuaccugaaccacaccgucaccgggaagacgagccugccccgcugcugccugguguccaacggcagcuaccugaacgagacccacuucuccgacgacaucgagcagcaggcggacaacaugaucaccgagcuccugcagaaggaguacauggaccggcagggcaagaccccgcuggggcugguggaccucuucgucuucagcacguccuucuaccugaucagcaucuuccugcaccucaucaagaucccgacccaccgccacaucaccggcaagcccugccccaagccccaccggcugaaccacauggggaucugcuccugcggccuguacaagcacccgggggugcccgugaaguggaagcgcugaggacuagucccuguucccagagcccacuuuuuuuucuuuuuuugaaauaaaauagccugucuuucagaucuaaaaaaaaaaaaaaaaaaaaaaaaaaaaaaaaaaaaaaaaaaaaaaaaaaaaaaaaaaaaaaaaaaaaaaaaaaaaaaaaaaaaaaaaaaaaaaaaaaaa

SEQ ID NO: 40750 - RNA, 1740 nt, Artificial Sequence
  mRNA product Design a-2 (A100) comprising derived and/or modified sequence from LASV(ISTH2010-NIG-2012;Clade II)__AIT17482__GPCmut12 (opt1)
aggagaguccgcucagccagguugcagaagcggcuuagcguguguccuaaucuucucucugcguguagguaggccugugccgcaaacaagcuuaccaugggccagaucaucaccuucuuccaggaggugccccacgucaucgaggaggugaugaacaucgugcugaucgcccucagccugcuggccauccucaaggggaucuacaacgucgcgaccugcggccuguucgggcugguguccuuccuccugcugugcggccgcagcugcuccacgaccuacaaggggguguacgagcuccagacccuggagcuggacauggccagccucaacaugugcaugccgcuguccugcaccaagaacaacagccaccacuacaucauggucggcaacgagacgggccuggagcucacccugaccaacaccuccaucaucaaccacaaguucugcaaccugagcgacgcccacaagaagaaccucuacgaccacgcccugauguccaucaucagcacguuccaccuguccauccccaacuucaaccaguacgaggccaugagcugcgacuucaacgggggcaagaucuccgugcaguacaaccucagccacgcguacgccguggacgccgccaaccacugcgggaccaucgcgaacggcguccugcagaccuucaugcggauggccuggggcggguccuacaucgcccuggacagcggcaagggguccugggacugcaucaugaccagcuaccaguaccucaucauccagaacaucacgugggaggaccacugccaguucucccgccccagccccaucggcuaccuggggcugcucagccagcggacccgcgacaucuacaucucccggcgccugcugggcaccuucaccuggacgcucagcgacuccgagggcaacgagacccccgggggcuacugccugacccgguggaugcugaucgaggccgagcucaagugcuucgggaacaccgccguggcgaagugcaacgagaagcacgacgaggaguucugcgacaugcugcgccuguucgacuucugcaagcaggccauccggcgccucaagacggaggcccagaugagcauccagcugaucaacaaggccgugaacgcccugaucaacgaccagcucaucaugaagaaccaccuccgggacaucaugggcauccccuacugcaacuacuccaaguacugcuaccugaaccacaccgucaccgggaagaccagccugccccgcugcugccugguguccaacggcagcuaccugaacgagacgcacuucuccgacgacaucgagcagcaggcggacaacaugaucaccgagcuccugcagaaggaguacaucgaccggcagggcaagaccccgcuggggcugguggaccucuucgucuucagcaccuccuucuaccugaucagcaucuuccugcaccucgugaagaucccgacgcaccgccacguggucggcaagcccugccccaagccccaccggcugaaccacauggggaucugcuccugcggccuguacaagcacccgggggugcccgugaaguggaagcgcugaggacuagucccuguucccagagcccacuuuuuuuucuuuuuuugaaauaaaauagccugucuuucagaucuaaaaaaaaaaaaaaaaaaaaaaaaaaaaaaaaaaaaaaaaaaaaaaaaaaaaaaaaaaaaaaaaaaaaaaaaaaaaaaaaaaaaaaaaaaaaaaaaaaaa

SEQ ID NO: 40751 - RNA, 1740 nt, Artificial Sequence
  mRNA product Design a-2 (A100) comprising derived and/or modified sequence from LASV(Lassa virus/H.sapiens-wt/NGA/2015/ISTH_0543;Clade II)__AVO03639__GPCmut12 (opt1)
aggagaguccgcucagccagguugcagaagcggcuuagcguguguccuaaucuucucucugcguguagguaggccugugccgcaaacaagcuuaccaugggccagaucaucaccuucuuccaggaggugccccacgucaucgaggaggugaugaacaucgugcugaucgcccucagccugcuggccauccucaaggggaucuacaacgucgcgaccugcggccuguucgggcugguguccuuccuccugcugugcggccgcagcugcuccacgaccuacaaggggguguacgagcuccagacccuggagcuggacauggccaaccucaacaugugcaugccgcugagcugcaccaagaacaacucccaccacuacaucauggucggcaacgagacgggccuggagcucacccugaccaacaccagcaucaucaaccacaaguucugcaaccuguccgacgcccacaagaagaaccucuacgaccacgcccugaugagcaucaucuccacguuccaccugagcauccccaacuucaaccaguacgaggccauguccugcgacuucaacgggggcaagaucagcgugcaguacaaccucucccacaccuacgcgguggacgccgccaaccacugcgggaccaucgccaacggcguccugcagaccuucaugcggauggcguggggcgggagcuacaucgcccuggacuccggcaaggggagcugggacugcaucaugacguccuaccaguaccucgugauccagaacaccaccugggaggaccacugccaguucagccgccccucccccaucggcuaccuggggcugcucagccagcggacccgcgacaucuacaucagccggcgccugcugggcacguucaccuggacccucuccgacagcgagggcaacgagacccccgggggcuacugccugacgcgguggaugcugaucgaggccgagcucaagugcuucgggaacaccgccguggccaagugcaacgagaagcacgacgaggaguucugcgacaugcugcgccuguucgacuucugcaagcaggcgauccggcgccucaagaccgaggcccagauguccauccagcugaucaacaaggccgucaacgcccugaucaacgaccagcucaucaugaagaaccaccuccgggacaucaugggcaucccguacugcaacuacagcaaguacugcuaccugaaccacaccgugacggggaagaccucccugccccgcugcugccuggugagcaacggcuccuaccugaacgagacccacuucagcgacgacaucgagcagcaggccgacaacaugaucaccgagcuccugcagaaggaguacaucgaccggcagggcaagacgccccuggggcuggucgaccucuucguguucuccaccagcuucuaccugaucuccaucuuccugcaccucgugaagaucccgacccaccgccacaucaccggcaagcccugccccaagccccaccggcugaaccacauggggaucugcagcugcggccuguacaagcacccggggguccccgugaaguggaagcgcugaggacuagucccuguucccagagcccacuuuuuuuucuuuuuuugaaauaaaauagccugucuuucagaucuaaaaaaaaaaaaaaaaaaaaaaaaaaaaaaaaaaaaaaaaaaaaaaaaaaaaaaaaaaaaaaaaaaaaaaaaaaaaaaaaaaaaaaaaaaaaaaaaaaaa

SEQ ID NO: 40752 - RNA, 1740 nt, Artificial Sequence
  mRNA product Design a-2 (A100) comprising derived and/or modified sequence from LASV(Lassa virus/H.sapiens-wt/NGA/2016/ISTH_0009;Clade II)__AVO03571__GPCmut12 (opt1)
aggagaguccgcucagccagguugcagaagcggcuuagcguguguccuaaucuucucucugcguguagguaggccugugccgcaaacaagcuuaccaugggccagaucaucaccuucuuccaggaggugccccacgucaucgaggaggugaugaacaucgugcugaucgcccucagccugcuggccauccucaaggggaucuacaacgucgcgaccugcggccugcuggggcucguguccuuccugcugcucugcggccgcagcugcuccacgaccuacaaggggguguacgagcugcagacccuggagcucgacauggccagccugaacaugugcaugccgcuguccugcaccaagaacaacagccaccacuacaucauggucggcaacgagacgggccucgagcugacccugaccaacaccuccaucaucaaccacaaguucugcaaccucagcgacgcccacaagaagaaccuguacgaccacgcccugauguccaucaucagcacguuccaccucuccauccccaacuucaaccaguacgaggccaugagcugcgacuucaacgggggccggaucuccgugcaguacaaccugagccacuccuacgcgguggacgccgccaaccacugcgggaccaucgccaacggcguccugcagaccuucaugcgcauggcguggggcgggagcuacaucgcccucgacuccggcaaggggagcugggacugcaucaugaccuccuaccaguaccugaucauccagaacacgaccugggaggaccacugccaguucagccggcccagccccaucggcuaccuggggcuccugucccagcgcacccgggacaucuacaucagccgccggcugcucggcaccuucacguggacccuguccgacagcgagggcaacgagacccccgggggcuacugccugacccgcuggaugcucaucgaggccgagcugaagugcuucgggaacacggccguggccaagugcaacgagaagcacgacgaggaguucugcgacaugcugcggcuguucgacuucugcaagcaggcgauccgccggcugaagaccgaggcccagauguccauccagcugaucaacaaggccgugaacgcccucaucaacgaccagcugaucaugaagaaccaccuccgcgacaucaugggcauccccuacugcaacuacagcaaguacugcuaccucaaccacaccgucaccgggaagacgucccugccccggugcugccuggugagcaacggcuccuaccucaacgagacccacuucagcgacgacaucgagcagcaggccgacaacaugaucaccgagcugcugcagaaggaguacaucgaccgccagggcaagaccccgcuggggcucguggaccuguucgucuucuccacgagcuucuaccugaucuccaucuuccuccaccuggugaagaucccgacccaccggcacaucaccggcaagcccugccccaagccccaccgccugaaccacauggggaucugcagcugcggccucuacaaccacccgggggugcccgucaaguggaagcggugaggacuagucccuguucccagagcccacuuuuuuuucuuuuuuugaaauaaaauagccugucuuucagaucuaaaaaaaaaaaaaaaaaaaaaaaaaaaaaaaaaaaaaaaaaaaaaaaaaaaaaaaaaaaaaaaaaaaaaaaaaaaaaaaaaaaaaaaaaaaaaaaaaaaa

SEQ ID NO: 40753 - RNA, 1740 nt, Artificial Sequence
  mRNA product Design a-2 (A100) comprising derived and/or modified sequence from LASV(Lassa virus/H.sapiens-wt/NGA/2016/ISTH_0017;Clade II)__AVO03567__GPCmut12 (opt1)
aggagaguccgcucagccagguugcagaagcggcuuagcguguguccuaaucuucucucugcguguagguaggccugugccgcaaacaagcuuaccaugggccagaucaucaccuucuuccaggaggugccccacgucaucgaggaggugaugaacaucgugcugaucgcccucagccugcuggccauccucaaggggaucuacaacgucgcgaccugcggccuguucgggcugguguccuuccuccugcugugcggccgcagcugcuccacgaccuacaaggggguguacgagcuccagacccuggagcuggacauggccagccucaacaugugcaugccgcuguccugcaccaagaacaacagccaccacuacaucauggucggcaacgagacgggccuggagcucacccugaccaacaccuccaucaucaaccacaaguucugcaaccugagcgacgcccacaagaagaaccucuacgaccacgcccugauguccaucaucagcacguuccaccuguccauccccaacuucaaccaguacgaggccaugagcugcgacuucaacgggggcaagaucuccgugcaguacaaccucagccacaccuacgcgaucgacgccgccaaccacugcgggaccaucgccaacggcgugcugcagaccuucaugcggauggcguggggcggguccuacaucgcccuggacagcggcaagggguccugggacugcaucaugacgagcuaccaguaccucaucauccagaacaccaccugggaggaccacugccaguucucccgccccagccccaucggcuaccuggggcugcucagccagcggacccgcgacaucuacaucucccggcgccugcugggcacguucaccuggacccucagcgacuccgagggcaacgagacccccgggggcuacugccugacgcgguggaugcugaucgaggccgagcucaagugcuucgggaacaccgccgucgccaagugcaacgagaagcacgacgaggaguucugcgacaugcugcgccuguucgacuucugcaagcaggcgauccggcgccucaagaccgaggcccagaugagcauccagcugaucaacaaggccgugaacgcccugaucaacgaccagcucaucaugaagaaccaccuccgggacaucaugggcaucccguacugcaacuacuccaaguacugcuaccugaaccacaccgugacggggaagaccagccugccccgcugcugccuggucuccaacggcagcuaccugaacgagacccacuucuccgacgacaucgagcagcaggccgacaacaugaucaccgagcuccugcagaaggaguacauggaccggcagggcaagacgccccuggggcugguggaccucuucguguucagcaccuccuucuaccugaucagcaucuuccugcaccucguccgcaucccgacccaccggcacgugaucggcaagcccugccccaagccccaccgccugaaccacauggggaucugcuccugcggccuguacaagcacccgggggugcccgucaaguggaagcggugaggacuagucccuguucccagagcccacuuuuuuuucuuuuuuugaaauaaaauagccugucuuucagaucuaaaaaaaaaaaaaaaaaaaaaaaaaaaaaaaaaaaaaaaaaaaaaaaaaaaaaaaaaaaaaaaaaaaaaaaaaaaaaaaaaaaaaaaaaaaaaaaaaaaa

SEQ ID NO: 40754 - RNA, 1740 nt, Artificial Sequence
  mRNA product Design a-2 (A100) comprising derived and/or modified sequence from LASV(Lassa virus/H.sapiens-wt/NGA/2018/ISTH_0959;Clade II)__AVV65099__GPCmut12 (opt1)
aggagaguccgcucagccagguugcagaagcggcuuagcguguguccuaaucuucucucugcguguagguaggccugugccgcaaacaagcuuaccaugggccagaucaucaccuucuuccaggaggugccccacgucaucgaggaggugaugaacaucgugcugaucgcccucagccugcuggccauccucaaggggaucuacaacgucgugaccugcggccuguucgggcugguguccuuccuccugcugugcggccgcagcugcuccacgaccuacaagggggucuacgagcuccagacccuggagcuggacauggcgagccucaacaugugcaugccgcuguccugcaccaagaacaacagccaccacuacaucauggugggcaacgagacgggccuggagcucacccugaccaacaccuccaucaucaaccacaaguucugcaaccugagcgacgcccacaagaagaaccucuacgaccacgcccugauguccaucaucagcacguuccaccuguccauccccaacuucaaccaguacgaggccaugagcugcgacuucaacgggggcaagaucuccgugcaguacaaccucagccacgccuacgcgaucgacgccgccaaccacugcgggaccaucgccaacggcguccugcagaccuucaugcggauggcguggggcggguccuacaucgcccuggacagcggcaagggguccugggacugcaucaugaccagcuaccaguaccucaucauccagaacacgaccugggaggaccacugccaguucucccgccccagccccaucggcuaccuggggcugcucagccagcggacccgcgacaucuacaucucccggcgccugcugggcaccuucacguggacccucagcgacuccgagggcaacgagacccccgggggcuacugccugacccgguggaugcugaucgaggccgagcucaagugcuucgggaacacggccguggccaagugcaacgagaagcacgacgaggaguucugcgacaugcugcgccuguucgacuucugcaagcaggcgauccggcgccucaagaccgaggcccagaugagcauccagcugaucaacaaggccgugaacgcccugaucaacgaccagcucaucaugaagaaccaccuccgggacaucaugggcauccccuacugcaacuacuccaaguacugcuaccugaaccacaccgucaccgggaagacgagccugccccgcugcugccugguguccaacggcagcuaccugaacgagacccacuucuccgacgacaucgagcagcaggccgacaacaugaucaccgagcuccugcagaaggaguacaucgaccggcagggcaagaccccgcuggggcugguggaccucuucgucuucagcacguccuucuaccugaucagcaucuuccugcaccucgugaagaucccgacccaccgccacgugaucggcaagcccugccccaagccccaccggcugaaccacauggggaucugcuccugcggccuguacaagcacccggggguccccgugaaguggaagcgcugaggacuagucccuguucccagagcccacuuuuuuuucuuuuuuugaaauaaaauagccugucuuucagaucuaaaaaaaaaaaaaaaaaaaaaaaaaaaaaaaaaaaaaaaaaaaaaaaaaaaaaaaaaaaaaaaaaaaaaaaaaaaaaaaaaaaaaaaaaaaaaaaaaaaa

SEQ ID NO: 40755 - RNA, 1740 nt, Artificial Sequence
  mRNA product Design a-2 (A100) comprising derived and/or modified sequence from LASV(LASV003-NIG-2008;Clade II)__AIT17580__GPCmut12 (opt1)
aggagaguccgcucagccagguugcagaagcggcuuagcguguguccuaaucuucucucugcguguagguaggccugugccgcaaacaagcuuaccaugggccagaucaucaccuucuuccaggaggugccccacgucaucgaggaggugaugaacaucgugcugaucgcccucagccugcuggccauccucaaggggaucuacaacgucgcgaccugcggccuguucgggcugguguccuuccuccugcugugcggccgcagcugcuccacgaccuacaaggggguguacgagcuccagacccuggagcuggacauggccagccucaacaugugcaugccgcuguccugcaccaagaacaacagccaccacuacaucauggucggcaacgagacgggccuggagcucacccugaccaacaccuccaucaucaaccacaaguucugcaaccugagcgacgcccacaagaagaaccucuacgaccacgcccugauguccaucaucagcacguuccaccuguccauccccaacuucaaccaguacgaggccaugagcugcgacuucaacgggggcaagaucuccgugcaguacaaccucagccacaccuacgcgguggacgccgccaaccacugcgggaccaucgccaacggcguccugcagaccuucaugcggauggcguggggcggguccuacaucgcccuggacagcggcaagggguccugggacugcaucaugacgagcuaccaguaccucaucauccagaacaccaccugggaggaccacugccaguucucccgccccagccccaucggcuaccuggggcugcucagccagcggacccgcgacaucuacaucucccggcgccugcugggcacguucaccuggacccucagcgacuccgagagcaacgagaccccgggcggguacugccugacgcgguggaugcugaucgaggccgagcucaagugcuucggcaacaccgccguggccaagugcaacgagaagcacgacgaggaguucugcgacaugcugcgccuguucgacuucugcaagcaggcgauccggcgccucaaggccgaggcccagauguccauccagcugaucaacaaggccgugaacgcccugaucaacgaccagcucaucaugaagaaccaccuccgggacaucauggggauccccuacugcaacuacagcaaguacugcuaccugaaccacaccgucaccggccgcacgucccugccccggugcugccuggugagcaacggguccuaccugaacgagacccacuucagcgacgacaucgagcagcaggcggacaacaugaucaccgagcuccugcagaaggaguacauggaccgccagggcaagacgccccugggccugguggaccucuucgucuucuccaccagcuucuaccugaucuccaucuuccugcaccucgugaagaucccgacccaccggcacgugaucgggaagcccugccccaagccccaccgccugaaccacaugggcaucugcagcugcgggcuguacaagcacccgggcguccccgugaaguggaagcggugaggacuagucccuguucccagagcccacuuuuuuuucuuuuuuugaaauaaaauagccugucuuucagaucuaaaaaaaaaaaaaaaaaaaaaaaaaaaaaaaaaaaaaaaaaaaaaaaaaaaaaaaaaaaaaaaaaaaaaaaaaaaaaaaaaaaaaaaaaaaaaaaaaaaa

SEQ ID NO: 40756 - RNA, 1740 nt, Artificial Sequence
  mRNA product Design a-2 (A100) comprising derived and/or modified sequence from LASV(LASV035-NIG-2009;Clade II)__AIT17588__GPCmut12 (opt1)
aggagaguccgcucagccagguugcagaagcggcuuagcguguguccuaaucuucucucugcguguagguaggccugugccgcaaacaagcuuaccaugggccagaucaucaccuucuuccaggaggugccccacgucaucgaggaggugaugaacaucgugcugaucgcccucagccugcuggccauccucaaggggaucuacaacgucgcgaccugcggccuguucgggcugguguccuuccuccugcugugcggccgcagcugcuccacgaccuacaaggggguguacgagcuccagacccuggagcuggacauggccagccucaacaugugcaugccgcuguccugcaccaagaacaacagccaccacuacaucauggucggcaacgagacgggccuggagcucacccugaccaacaccuccaucaucaaccacaaguucugcaaccugagcgacgcccacaagaagaaccucuacgaccacgcccugauguccaucaucagcacguuccaccuguccauccccaacuucaaccaguacgaggccaugagcugcgacuucaacgggggcaagaucuccgugcaguacaaccucagccacgcguacgccguggacgccgccaaccacugcgggaccaucgcgaacggcguccugcagaccuucaugcggauggccuggggcggguccuacaucgcccuggacagcggcaagggguccugggacugcaucaugaccagcuaccaguaccucaucauccagaacacgaccugggaggaccacugccaguucucccgccccagccccaucggcuaccuggggcugcucagccagcggacccgcgacaucuacaucucccggcgccugcugggcaccuucacguggacccucagcgacuccgagggcaacgagacccccgggggcuacugccugacccgguggaugcugaucgaggccgagcucaagugcuucgggaacacggccguggcgaagugcaacgagaagcacgacgaggaguucugcgacaugcugcgccuguucgacuucugcaagcaggccauccggcgccucaaggccgaggcccagaugagcauccagcugaucaacaaggccgugaacgcgcugaucaacgaccagcucaucaugaagaaccaccuccgggacaucaugggcauccccuacugcaacuacuccaaguacugcuaccugaaccacaccgucaccgggaagaccagccugccccgcugcugccugguguccaacggcagcuaccugaacgagacgcacuucuccgacgacaucgagcagcaggccgacaacaugaucaccgagcuccugcagaaggaguacaucgaccggcagggcaagaccccgcuggggcugguggaccucuucgucuucagcaccuccuucuaccugaucagcaucuuccugcaccucgugaagaucccgacgcaccgccacgugaucggcaagcccugccccaagccccaccggcugaaccacauggggaucugcuccugcggccuguacaagcacccggggguccccgugaaguggaagcgcugaggacuagucccuguucccagagcccacuuuuuuuucuuuuuuugaaauaaaauagccugucuuucagaucuaaaaaaaaaaaaaaaaaaaaaaaaaaaaaaaaaaaaaaaaaaaaaaaaaaaaaaaaaaaaaaaaaaaaaaaaaaaaaaaaaaaaaaaaaaaaaaaaaaaa

SEQ ID NO: 40757 - RNA, 1740 nt, Artificial Sequence
  mRNA product Design a-2 (A100) comprising derived and/or modified sequence from LASV(LASV1000-NIG-2009;Clade II)__AIT17782__GPCmut12 (opt1)
aggagaguccgcucagccagguugcagaagcggcuuagcguguguccuaaucuucucucugcguguagguaggccugugccgcaaacaagcuuaccaugggccagaucaucaccuucuuccaggaggugccccacgucaucgaggaggugaugaacaucgugcugaucgcccucagccugcuggccauccucaaggggaucuacaacgucgcgaccugcggccuguucgggcugguguccuuccuccugcugugcggccgcagcugcuccacgaccuacaaggggguguacgagcuccagacccuggagcuggacauggccagccucaacaugugcaugccgcuguccugcaccaagaacaacagccaccacuacaucauggucggcaacgagacgggccuggagcucacccugaccaacaccuccaucaucaaccacaaguucugcaaccugagcgacgcccacaagaagaaccucuacgaccacgcccugauguccaucaucagcacguuccaccuguccauccccaacuucaaccaguacgaggccaugagcugcgacuucaacgggggcaagaucuccgugcaguacaaccucagccacaccuacgcgguggacgccgccaaccacugcgggaccaucgccaacggcguccugcagaccuucaugcggauggcguggggcggguccuacaucgcccuggacagcggcaagggguccugggacugcaucaugacgagcuaccaguaccucaucauccagaacaccaccugggaggaccacugccaguucucccgccccagccccaucggcuaccuggggcugcucagccagcggacccgcgacaucuacaucucccggcgccugcugggcacguucaccuggacccucagcgacuccgagggcaacgagacccccgggggcuacugccugacgcgguggaugcugaucgaggccgagcucaagugcuucgggaacaccgccguggccaagugcaacgagaagcacgacgaggaguucugcgacaugcugcgccuguucgacuucugcaagcaggcgaucaagcggcucaagaccgaggcccagaugagcauccagcugaucaacaaggccgugaacgcccugaucaacgaccagcucaucaugaagaaccaccuccgcgacaucaugggcaucccguacugcaacuacuccaaguacugcuaccugaaccacaccgucacggggaagaccagccugccccggugcugccugguguccaacggcagcuaccugaacgagacccacuucuccgacgacaucgagcagcaggccgacaacaugaucaccgagcuccugcagaaggaguacaucgaccgccagggcaagacgccccuggggcugguggaccucuucgucuucagcaccuccuucuaccugaucagcaucuuccugcaccucgugaagaucccgacccaccggcacguggucggcaagcccugccccaagccccaccgccugaaccacauggggaucugcuccugcggccuguacaagcacccgggggugcccgugaaguggaagcggugaggacuagucccuguucccagagcccacuuuuuuuucuuuuuuugaaauaaaauagccugucuuucagaucuaaaaaaaaaaaaaaaaaaaaaaaaaaaaaaaaaaaaaaaaaaaaaaaaaaaaaaaaaaaaaaaaaaaaaaaaaaaaaaaaaaaaaaaaaaaaaaaaaaaa

SEQ ID NO: 40758 - RNA, 1740 nt, Artificial Sequence
  mRNA product Design a-2 (A100) comprising derived and/or modified sequence from LASV(LASV221-NIG-2010;Clade II)__AIT17624__GPCmut12 (opt1)
aggagaguccgcucagccagguugcagaagcggcuuagcguguguccuaaucuucucucugcguguagguaggccugugccgcaaacaagcuuaccaugggccagaucaucaccuucuuccaggaggugccccacgucaucgaggaggugaugaacaucgugcugaucgcccucagccugcuggccauccucaaggggaucuacaacgucgcgaccugcggccuguucgggcugguguccuuccuccugcugugcggccgcagcugcuccacgaccuacaaggggguguacgagcuccagacccuggagcuggacauggccagccucaacaugugcaugccgcuguccugcaccaagaacaacagccaccacuacaucauggucggcaacgagacgggccuggagcucacccugaccaacaccuccaucaucaaccacaaguucugcaaccugagcgacgcccacaagaagaaccucuacgaccacgcccugauguccaucaucagcacguuccaccuguccauccccaacuucaaccaguacgaggccaugagcugcgacuucaacgggggcaagaucuccgugcaguacaaccucagccacaccuacgcgaucgacgccgccaaccacugcgggaccaucgccaacggcgugcugcagaccuucaugcggauggcguggggcggguccuacaucgcccuggacagcggcaagggguccugggacugcaucaugacgagcuaccaguaccucaucauccagaacaccaccugggaggaccacugccaguucucccgccccagccccaucggcuaccuggggcugcucagccagcggacccgcgacaucuacaucucccggcgccugcugggcacguucaccuggacccucagcgacuccgagggcaacgagacccccgggggcuacugccugacgcgguggaugcugaucgaggccgagcucaagugcuucgggaacaccgccgucgccaagugcaacgagaagcacgacgaggaguucugcgacaugcugcgccuguucgacuucugcaagcaggcgauccggcgccucaagaccgaggcccagaugagcauccagcugaucaacaaggccgugaacgcccugaucaacgaccagcucaucaugaagaaccaccuccgggacaucaugggcaucccguacugcaacuacuccaaguacugcuaccugaaccacaccgugacggggaagaccagccugccccgcugcugccuggucuccaacggcagcuaccugaacgagacccacuucuccgacgacaucgagcagcaggccgacaacaugaucaccgagaugcuccagaaggaguacauggaccggcagggcaagacgccccuggggcugguggaccuguucguguucagcaccuccuucuaccucaucagcaucuuccugcaccuggucaagaucccgacccaccgccacgugaucggcaagcccugccccaagccccaccggcucaaccacauggggaucugcuccugcggccuguacaagcacccgggggugcccgucaaguggaagcgcugaggacuagucccuguucccagagcccacuuuuuuuucuuuuuuugaaauaaaauagccugucuuucagaucuaaaaaaaaaaaaaaaaaaaaaaaaaaaaaaaaaaaaaaaaaaaaaaaaaaaaaaaaaaaaaaaaaaaaaaaaaaaaaaaaaaaaaaaaaaaaaaaaaaaa

SEQ ID NO: 40759 - RNA, 1740 nt, Artificial Sequence
  mRNA product Design a-2 (A100) comprising derived and/or modified sequence from LASV(LASV237-NIG-2010;Clade II)__AIT17638__GPCmut12 (opt1)
aggagaguccgcucagccagguugcagaagcggcuuagcguguguccuaaucuucucucugcguguagguaggccugugccgcaaacaagcuuaccaugggccagaucaucaccuucuuccaggaggugccccacgucaucgaggaggugaugaacaucgugcugaucgcccucagccugcuggccauccucaaggggaucuacaacgucgcgaccugcggccuguucgggcugguguccuuccuccugcugugcggccgcagcugcuccacgaccuacaaggggguguacgagcuccagacccuggagcuggacauggccagccucaacaugugcaugccgcuguccugcaccaagaacaacagccaccacuacaucauggucggcaacgagacgggccuggagcucacccugaccaacaccuccaucaucaaccacaaguucugcaaccugagcgacgcccacaagaaggaccucuacgaccacgcccugauguccaucaucagcacguuccaccuguccauccccaacuucaaccaguacgaggccaugagcugcgacuucaacgggggcaagaucuccgugcaguacaaccucagccacaccuacgcgguggacgccgccaaccacugcgggaccaucgccaacggcguccugcagaccuucaugcggauggcguggggcggguccuacaucgcccuggacagcggcaagggguccugggacugcaucaugacgagcuaccaguaccucaucauccagaacaccaccugggaggaccacugccaguucucccgccccagccccaucggcuaccuggggcugcucagccagcggacccgcgacaucuacaucucccggcgccugcugggcacguucaccuggacccucagcgacuccgagggcaacgagacccccgggggcuacugccugacgcgguggaugcugaucgaggccgagcucaagugcuucgggaacaccgccguggccaagugcaacgagaagcacgacgaggaguucugcgacaugcugcgccuguucgacuucugcaagcaggcgauccggcgccucaagaccgaggcccagaugagcauccagcugaucaacaaggccgugaacgcccugaucaacgaccagcucaucaugaagaaccaccuccgggacaucaugggcaucccguacugcaacuacuccaaguacugcuaccugaaccacaccgucacggggaagaccagccugccccgcugcugccugguguccaacggcagcuaccugaacgagacccacuucuccgacgacaucgagcagcaggccgacaacaugaucaccgagcuccugcagaaggaguacauggaccggcagggcaagacgccccuggggcugguggaccucuucgucuucagcaccuccuucuaccugaucagcaucuuccugcaccucaucaagaucccgacccaccgccacaucaccggcaagcccugccccaagccccaccggcugaaccacauggggaucugcuccugcggccuguacaagcacccgggggugcccgugaaguggaagcgcugaggacuagucccuguucccagagcccacuuuuuuuucuuuuuuugaaauaaaauagccugucuuucagaucuaaaaaaaaaaaaaaaaaaaaaaaaaaaaaaaaaaaaaaaaaaaaaaaaaaaaaaaaaaaaaaaaaaaaaaaaaaaaaaaaaaaaaaaaaaaaaaaaaaaa

SEQ ID NO: 40760 - RNA, 1740 nt, Artificial Sequence
  mRNA product Design a-2 (A100) comprising derived and/or modified sequence from LASV(LASV253-NIG-2011;Clade II)__AIT17670__GPCmut12 (opt1)
aggagaguccgcucagccagguugcagaagcggcuuagcguguguccuaaucuucucucugcguguagguaggccugugccgcaaacaagcuuaccaugggccagaucaucaccuucuuccaggaggugccccacgucaucgaggaggugaugaacaucgugcugaucgcccucagccugcuggccauccucaaggggaucuacaacgucgcgaccugcggccuguucgggcugguguccuuccuccugcugugcggccgcagcugcuccacgaccuacaaggggguguacgagcuccagacccuggagcuggacauggccagccucaacaugugcaugccgcuguccugcaccaagaacaacagccaccacuacaucauggucggcaacgagacgggccuggagcucacccugaccaacaccuccaucaucaaccacaaguucugcaaccugagcgacgcccacaagaagaaccucuacgaccacgcccugauguccaucaucagcacguuccaccuguccauccccaacuucaaccaguacgaggccaugagcugcgacuucaacgggggcaagaucuccgugcaguacaaccucagccacaccuacgcgguggacgccgccaaccacugcgggaccaucgccaacggcguccugcagaccuucaugcggauggcguggggcggguccuacaucgcccuggacagcggcaagggguccugggacugcaucaugacgagcuaccaguaccucaucauccagaacaccaccugggaggaccacugccaguucucccgccccagccccaucggcuaccuggggcugcucagccagcggacccgcgacaucuacaucucccggcgccugcugggcacguucaccuggacccucagcgacuccgagggcaacgagacccccgggggcuacugccugacgcgguggaugcugaucgaggccgagcucaagugcuucgggaacaccgccguggccaagugcaacgagaagcacgacgaggaguucugcgacaugcugcgccuguucgacuucugcaagcaggcgauccggcgccucaaggccgaggcccagaugagcauccagcugaucaacaaggccgugaacgcccugaucaacgaccagcucaucaugaagaaccaccuccgggacaucaugggcauccccuacugcaacuacuccaaguacugcuaccugaaccacaccgucaccgggcgcacgagccugccccggugcugccugguguccaacggcagcuaccugaacgagacccacuucuccgacgacaucgagcagcaggcggacaacaugaucaccgagcuccugcagaaggaguacaucgaccgccagggcaagaccccgcuggggcugguggaccucuucgucuucagcacguccuucuaccugaucagcaucuuccugcaccucgugaagaucccgacccaccggcacaucaucggcaagcccugccccaagccccaccgccugaaccacauggggaucugcuccugcggccuguacaagcacccgggggugcccgucaaguggaagcggugaggacuagucccuguucccagagcccacuuuuuuuucuuuuuuugaaauaaaauagccugucuuucagaucuaaaaaaaaaaaaaaaaaaaaaaaaaaaaaaaaaaaaaaaaaaaaaaaaaaaaaaaaaaaaaaaaaaaaaaaaaaaaaaaaaaaaaaaaaaaaaaaaaaaa

SEQ ID NO: 40761 - RNA, 1740 nt, Artificial Sequence
  mRNA product Design a-2 (A100) comprising derived and/or modified sequence from LASV(LASV254-NIG-2011;Clade II)__AIT17674__GPCmut12 (opt1)
aggagaguccgcucagccagguugcagaagcggcuuagcguguguccuaaucuucucucugcguguagguaggccugugccgcaaacaagcuuaccaugggccagaucaucaccuucuuccaggaggugccccacgucaucgaggaggugaugaacaucgugcugaucgcccucagccugcuggccauccucaaggggaucuacaacgucgcgaccugcggccuguucgggcugguguccuuccuccugcugugcggccgcagcugcuccacgaccuacaaggggguguacgagcuccagacccuggagcuggacaugaccaaccucaacaugugcaugccgcugagcugcacgaagaacaacucccaccacuacaucauggucggcaacgagaccggccuggagcucacccugaccaacacgagcaucaucaaccacaaguucugcaaccuguccgacgcccacaagaagaaccucuacaaccacgcccugaugagcaucaucuccaccuuccaccugagcauccccaacuucaaccaguacgaggccauguccugcgacuucaacgggggcaagaucagcgugcaguacaaccucucccacagcuacgccguggacgcggccaaccacugcgggaccaucgccaacggcguccugcagaccuucaugcggauggccuggggcggguccuacaucgcgcuggacagcggcaaggggaacugggacugcaucaugacguccuaccaguaccucaucauccagaacaccaccugggaggaccacugccaguucagccgccccucccccaucggcuaccuggggcugcucagccagcggacccgcgacaucuacaucagccggcgccugcugggcacguucaccuggacccucuccgacagcgagggcaacgagacccccgggggcuacugccugacgcgguggaugcugaucgaggccgagcucaagugcuucgggaacaccgccguggccaagugcaacgagaagcacgacgaggaguucugcgacaugcugcgccuguucgacuucugcaagcaggccauccggcgccucaagaccgaggcgcaggccaacauccagcugaucaacaaggccgugaacgcccugaucaacgaccagcucaucaugaagaaccaccuccgggacaucaugggcaucccguacugcaacuacuccaaguacugcuaccugaaccacaccgucacggggaagaccagccugccccgcugcugccugguguccaacggcagcuaccugaacgagacccacuucuccgacgacaucgagcagcaggccgacaacaugaucaccgagcuccugcagaaggaguacauggaccggcagggcaagacgccccuggggcugguggaccucuucgucuucagcaccuccuucuaccugaucagcaucuuccugcaccucgugaagaucccgacccaccgccacgugaucggcaagcccugccccaagccccaccggcugaaccacauggggaucugcuccugcggccuguacaagcacccggggguccccgugaaguggaagcgcugaggacuagucccuguucccagagcccacuuuuuuuucuuuuuuugaaauaaaauagccugucuuucagaucuaaaaaaaaaaaaaaaaaaaaaaaaaaaaaaaaaaaaaaaaaaaaaaaaaaaaaaaaaaaaaaaaaaaaaaaaaaaaaaaaaaaaaaaaaaaaaaaaaaaa

SEQ ID NO: 40762 - RNA, 1740 nt, Artificial Sequence
  mRNA product Design a-2 (A100) comprising derived and/or modified sequence from LASV(Nig08-A19;Clade III)__ADU56618__GPCmut12 (opt1)
aggagaguccgcucagccagguugcagaagcggcuuagcguguguccuaaucuucucucugcguguagguaggccugugccgcaaacaagcuuaccaugggccagaucgugaccuucuuccaggaggucccccacgugaucgaggaggugaugaacaucguccugaucgcccucagcauccuggccauccugaaggggcucuacaacaucgcgaccugcggccugaucgggcuggugacguuccuccugcuguccggccgcagcugcuccaugaccuacaaggggguguacgagcuccagacccuggagcugaacaugaacacccucaacaugugcaugccgcugagcugcacgaagaacaacucccaccacuacaucauggucggcaacgagaccggccuggagcucacccugaccaacacgagccugcuccaccacaaguucugcaaccuguccgacgcccacaagaagaaccuguacgaccacacccucaugagcaucaucuccaccuuccaccugagcauccccaacuucaaccaguacgaggccauguccugcgacuucaacgggggcaagaucaccgugcaguacaaccugagccacuccuacgccaucgacgccgcgaaccacugcgggacgguggccaacggcguccuccagaccuucaugcggauggccuggggcgggagcuacaucgcccuggacuccggccgcgggaagugggacugcaucaugaccagcuaccaguaccugaucauccagaacaccacgugggaggaccacugccaguucucccggcccagccccaucggcuaccucgggcugcugucccagcgcacccgggacaucuacaucagccgccggcuccugggcaccuucaccuggacgcugagcgacuccgagggcaacgagacccccgggggcuacugccucacccgcuggaugcugaucgaggcggagcugaagugcuucgggaacaccgccguggccaagugcaacgagaagcacgacgaggaguucugcgacaugcuccggcuguucgacuucugcaagcaggccauccgccggcugaaggccgaggcgcagaugagcauccagcucaucaacaaggccgugaacgcccugaucaacgaccagcugaucaugaagaaccaccuccgcgacaucaugggcauccccuacugcaacuacuccaaguacugcuaccugaaccacacgagcaccgggcggaccucccugccccgcugcugccucgucagcaacggcuccuaccugaacgagacccacuucagcgacgacaucgagcagcaggccgacaacaugaucacggagaugcugcagaaggaguaccuggaccggcagggcaagaccccgcucgggcugguggaccuguucguguucuccaccagcuucuaccucaucuccaucuuccugcaccuggucaagaucccgacccaccgccacaucgugggcaagcccugccccaagccccaccggcucaaccacauggggaucugcagcugcggccuguacaagcagccgggggugcccguccgcuggaagcggugaggacuagucccuguucccagagcccacuuuuuuuucuuuuuuugaaauaaaauagccugucuuucagaucuaaaaaaaaaaaaaaaaaaaaaaaaaaaaaaaaaaaaaaaaaaaaaaaaaaaaaaaaaaaaaaaaaaaaaaaaaaaaaaaaaaaaaaaaaaaaaaaaaaaa

SEQ ID NO: 40763 - RNA, 1743 nt, Artificial Sequence
  mRNA product Design a-2 (A100) comprising derived and/or modified sequence from LASV(G1180-SLE-2010;Clade IV)__AIT17168__GPCmut12 (opt1)
aggagaguccgcucagccagguugcagaagcggcuuagcguguguccuaaucuucucucugcguguagguaggccugugccgcaaacaagcuuaccaugggccagaucgugaccuucuuccaggaggucccccacgugaucgaggaggugaugaacaucguccugaucgcccucagcauccuggccgugcugaaggggcucuacaacuucgcgaccugcggccugguggggcugcucacguuccugcugcucugcggccgcuccugcaccgccagccgguacaagggggucuacgagcugcagacccuggagcucaacauggagacccugaacaugugcaugccgcuguccugcacgaagaacaacagccaccacuacaucauggugggcaacgagaccggccucgagcugacccugaccaacacguccaucaucaaccacaaguucugcaaccucagcgacgcccacaagaagaaccuguacgaccacgcccugauguccaucaucagcaccuuccaccucuccauccccaacuucaaccaguacgaggccaugagcugcgacuucaacgggggcaagaucuccgugcaguacaaccugagccacuccuacgcgggggacgccgccaaccacugcggcaccgucgccaacggggugcugcagaccuucaugcgcauggcguggggcggcagcuacaucgcccucgacuccgggcacggcagcugggacugcaucaugacguccuaccaguaccugaucauccagaacaccaccugggaggaccacugccaguucagccggcccucccccaucggguaccugggccuccugagccagcgcacccgggacaucuacaucagccgccggcugcucggcacguucaccuggacccuguccgacagcgaggggaaggacaccccgggcggguacugccugacgcgcuggaugcucaucgaggccgagcugaagugcuucggcaacaccgccguggccaagugcaacgagaagcacgacgaggaguucugcgacaugcugcggcuguucgacuucugcaagcaggcgauccagcgccugaaggccgaggcccagauguccauccagcugaucaacaaggccgucaacgcccucaucaacgaccagcugaucaugaagaaccaccuccgggacaucauggggauccccuacugcaacuacagcaaguacugcuaccucaaccacaccaccacgggcaagaccucccugcccaagugcugccuggugagcaacggcuccuaccucaacgagacccacuucagcgacgacaucgagcagcaggcggacaacaugaucaccgagaugcugcagaaggaguacauggagcgccaggggaagacgccccugggccugguggaccucuucgucuucuccaccagcuucuaccugaucuccaucuuccugcaccucgugaagaucccgacccaccggcacaucgugggcaagagcugccccaagccccaccgccugaaccacauggggaucugcuccugcgggcuguacaagcagcccggcgucccggugaaguggaagcggugaggacuagucccuguucccagagcccacuuuuuuuucuuuuuuugaaauaaaauagccugucuuucagaucuaaaaaaaaaaaaaaaaaaaaaaaaaaaaaaaaaaaaaaaaaaaaaaaaaaaaaaaaaaaaaaaaaaaaaaaaaaaaaaaaaaaaaaaaaaaaaaaaaaaa

SEQ ID NO: 40764 - RNA, 1743 nt, Artificial Sequence
  mRNA product Design a-2 (A100) comprising derived and/or modified sequence from LASV(G1442-SLE-2011;Clade IV)__AIT17180__GPCmut12 (opt1)
aggagaguccgcucagccagguugcagaagcggcuuagcguguguccuaaucuucucucugcguguagguaggccugugccgcaaacaagcuuaccaugggccagaucgugaccuucuuccaggaggucccccacgugaucgaggaggugaugaacaucguccugaucgcccucagcauccuggccgugcugaaggggcucuacaacguggcgaccugcggccugaucgggcuggucaccuuccuccugcugugcggccgcuccugcaccaccacccucuacaaggggguguacgagcugcagacgcuggagcucaacauggagacccugaacaugugcaugccgcugagcugcaccaagaacaacucccaccacuacauccgggugggcaacgagaccggccucgagcugacgcugaccaacaccagcaucaucaaccacaaguucugcaaccucuccgacgcccacaagaagaaccuguacgaccacgcccugaugagcaucaucuccaccuuccaccucagcauccccaacuucaaccaguacgaggccauguccugcgacuucaacgggggcaagaucagcguccaguacaaccugucccacagcuacgccggggacgcggccaaccacugcggcacgguggccaacggggugcugcagaccuucaugcgcauggccuggggcggcuccuacaucgcgcucgacagcgggcggggcaacugggacugcaucaugaccuccuaccaguaccugaucauccagaacaccacgugggacgaccacugccaguucagccgccccucccccaucggguaccugggccuccugagccagcggacccgcgacgucuacaucucccggcgccugcucggcaccuucaccuggacgcugagcgacagcgaggggaaggacaccccgggcggguacugccugacccgguggaugcucaucgaggccgagcugaagugcuucggcaacaccgccguggccaagugcaacgagaagcacgacgaggaguucugcgacaugcugcgccucuucgacuucugcaagcaggccauccagcggcugaaggcggaggcccagauguccauccagcugaucaacaaggccgugaacgcccucaucaacgaccagcugaucaugaagaaccaccuccgcgacaucauggggauccccuacugcaacuacagcaaguacugcuaccugaacaacacggccaccggcaagaccucccugcccaagugcugccugaucagcaacggcuccuaccucaacgagacccacuucagcgacgacaucgagcaggaggcggacaacaugaucacggagaugcugcagaaggaguacauggagcggcaggggaagacgccccugggccuggucgaccucuucguguucuccaccagcuucuaccugaucuccaucuuccugcaccucgugaagaucccgacccaccgccacaucgucggcaagagcugccccaagccccaccggcugaaccacauggggaucugcuccugcgggcuguacaagcagcccggcgugccggugcgcuggaagcggugaggacuagucccuguucccagagcccacuuuuuuuucuuuuuuugaaauaaaauagccugucuuucagaucuaaaaaaaaaaaaaaaaaaaaaaaaaaaaaaaaaaaaaaaaaaaaaaaaaaaaaaaaaaaaaaaaaaaaaaaaaaaaaaaaaaaaaaaaaaaaaaaaaaaa

SEQ ID NO: 40765 - RNA, 1743 nt, Artificial Sequence
  mRNA product Design a-2 (A100) comprising derived and/or modified sequence from LASV(G3010-SLE-2013;Clade IV)__AIT17344__GPCmut12 (opt1)
aggagaguccgcucagccagguugcagaagcggcuuagcguguguccuaaucuucucucugcguguagguaggccugugccgcaaacaagcuuaccaugggccagaucgugaccuucuuccaggaggucccccacgugaucgaggaggugaugaacaucguccugaucgcccucagcauccuggccgugcugaaggggcucuacaacuucgcgaccugcggccugguggggcuggucacguuccuccugcugugcggccgcuccugcaccaccagccucuacaaggggguguacgagcugcagacccuggagcucaacauggagacgcugaacaugugcaugccgcuguccugcaccaagaacaacagccaccacuacaucauggugggcaacgagaccggccucgagcugacccugacgaacaccuccaucaucaaccacaaguucugcaaccucagcgacgcccacaagaagaaccuguacaaccacgcccugauguccaucaucagcaccuuccaccucuccauccccaacuucaaccaguacgaggccaugagcugcgacuucaacgggggcaagaucuccguccaguacaaccugagccacuccuacgccggggacgcggccagccacugcggcaccguggccaacggggugcugcagacguucaugcggauggccuggggcggcuccuacaucgcgcucgacagcggguacggcaagugggacugcaucaugaccuccuaccaguaccugaucauccagaacaccaccugggaggaccacugccaguucagccgccccucccccaucggguaccugggccuccugagccagcggacgcgcgacaucuacaucagccggcgccugcucggcaccuucaccuggacccuguccgacagcgaggggaaggacacgccgggcggguacugccugacccgguggaugcucaucgaggccgagcugaagugcuucggcaacaccgccgucgccaagugcaacgagaagcacgacgaggaguucugcgacaugcugcgccucuucgacuucugcaagcaggccauccagcggcugaagaccgaggcgcagauguccauccagcugaucaacaaggccgugaacgcccucaucaacgaccagcugaucaugaagaaccaccuccgcgacaucauggggauccccuacugcaacuacagcaaguacugcuaccugaaccacacgaccaccggcaagaccucccugcccaagugcugccuggugagcaacggcuccuaccucaacgagacgcacuucagcgacgacaucgagcagcaggccgacaacaugaucaccgagaugcugcagaaggaguacauggagcggcaggggaagacgccccugggccuggucgaccucuucguguucuccaccagcuucuaccugaucuccaucuuccugcaccucgugaagaucccgacccaccgccacaucgucggcaagagcugccccaagccccaccggcugaaccacauggggaucugcuccugcgggcuguacaagcagcccggcgugccggugcgcuggaagcggugaggacuagucccuguucccagagcccacuuuuuuuucuuuuuuugaaauaaaauagccugucuuucagaucuaaaaaaaaaaaaaaaaaaaaaaaaaaaaaaaaaaaaaaaaaaaaaaaaaaaaaaaaaaaaaaaaaaaaaaaaaaaaaaaaaaaaaaaaaaaaaaaaaaaa

SEQ ID NO: 40766 - RNA, 1743 nt, Artificial Sequence
  mRNA product Design a-2 (A100) comprising derived and/or modified sequence from LASV(G502-SLE-2009;Clade IV)__AIT17126__GPCmut12 (opt1)
aggagaguccgcucagccagguugcagaagcggcuuagcguguguccuaaucuucucucugcguguagguaggccugugccgcaaacaagcuuaccaugggccagaucgugaccuucuuccaggaggucccccacgugaucgaggaggugaugaacaucguccugaucgcccucagcauccuggccgugcugaaggggcucuacaacuucgcgaccugcggccugguggggcugcucacguuccugcugcucugcggccgcuccugcaccaccgggcuguacaagggcgucuacgagcugcagacccucgagcugaacauggagacgcugaacaugugcaugccgcucagcugcaccaagaacaacucccaccacuacaucauggugggcaacgagaccgggcuggagcugacccucacgaacaccagcaucaucaaccacaaguucugcaaccuguccgacgcccacaagaagaaccuguacgaccacgcccucaugagcaucaucuccaccuuccaccugagcauccccaacuucaaccaguacgaggccauguccugcgacuucaacggcgggaagaucagcgugcaguacaaccugucccacagcuacgccggcgacgcggccgaccacugcgggaccgucgccaacggcgugcuccagacguucaugcggauggccuggggcggguccuacaucgcgcuggacagcggccgcgggcggugggacugcaucaugaccuccuaccaguaccugaucauccagaacaccaccugggaggaccacugccaguucagccgccccucccccaucggcuaccucggccugcugagccagcggacgcgcgacaucuacaucucccggcgccuccuggggaccuucaccuggacccugagcgacagcgagggcaaggacacgcccgggggcuacugccucacccgguggaugcugaucgaggccgagcugaagugcuucgggaacaccgccguggccaagugcaacgagaagcacgacgaggaguucugcgacaugcuccgccuguucgacuucugcaagcaggccauccagcggcugaaggcggaggcccagauguccauccagcucaucaacaaggccgucaacgcccugaucaacgaccagcuggugaugaagaaccaccuccgcgacaucaugggcauccccuacugcaacuacagccgguacugcuaccugaaccacaccacgaccggccgcaccucccugcccaagugcugccucgugagcaacggguccuaccugaacgagacccacuucagcgacgacaucgagcagcaggccgacaacaugaucacggagaugcugcagaaggaguacauggagcggcagggcaagaccccgcuggggcucgucgaccuguucguguucuccaccagcuucuaccugaucuccaucuuccuccaccuggugaagaucccgacccaccgccacaucgucggcaagagcugccccaagccccaccggcugaaccacauggggaucugcuccugcggccucuacaagcagcccggcgugccggugaaguggaagcgcugaggacuagucccuguucccagagcccacuuuuuuuucuuuuuuugaaauaaaauagccugucuuucagaucuaaaaaaaaaaaaaaaaaaaaaaaaaaaaaaaaaaaaaaaaaaaaaaaaaaaaaaaaaaaaaaaaaaaaaaaaaaaaaaaaaaaaaaaaaaaaaaaaaaaa

SEQ ID NO: 40767 - RNA, 1743 nt, Artificial Sequence
  mRNA product Design a-2 (A100) comprising derived and/or modified sequence from LASV(G733-SLE-2010;Clade IV)__AIT17154__GPCmut12 (opt1)
aggagaguccgcucagccagguugcagaagcggcuuagcguguguccuaaucuucucucugcguguagguaggccugugccgcaaacaagcuuaccaugggccagaucgugaccuucuuccaggaggucccccacgugaucgaggaggugaugaacaucguccugaucgcccucagcauccuggccgugcugaaggggcucuacaacuucgcgaccugcggcaucguggggcuggucuccuuccugcuccugugcggccgcagcugcacgaccucccuguacaaggggguguacgagcuccagacccuggagcugaacauggagacccucaacaugugcaugccgcugagcugcacgaagaacaacucccaccacuacaucauggugggcaacgagaccggccuggagcucacccugaccaacacgagcaucaucaaccacaaguucugcaaccuguccgacgcccacaagaagaaccucuacgaccacgcccugaugagcaucaucuccaccuuccaccugagcauccccaacuucaaccaguacgaggccauguccugcgacuucaacgggggcaagaucagcguccaguacaaccucucccacagcuacgccggggacgcggccaaccacugcggcaccaucgccaacggggugcugcagaccuucaugcggauggccuggggcggcuccuacaucgcgcuggacagcgggcgcgaccggugggacugcaucaugacguccuaccaguaccucaucauccagaacaccaccugggaggaccacugccaguucagccgccccucccccaucggcuaccuggggcugcucagccagcggacccgcgacaucuacaucagccggcgccugcugggcacguucaccuggacccucuccgacagcgagggcaaggacacccccgggggcuacugccugacgcgguggaugcugaucgaggccgagcucaagugcuucgggaacaccgccguggccaagugcaacgagaagcacgacgaggaguucugcgacaugcugcgccuguucgacuucugcaagcaggccauccagcggcucaaggcggaggcccagauguccauccagcugaucaacaaggccgucaacgcccugaucaacgaccagcucaucaugaagaaccaccuccgcgacaucaugggcaucccguacugcaacuacagcaaguacugcuaccugaaccacaccaccacggggaagaccucccugcccaagugcugccuggugagcaacggcuccuaccugaacgagacccacuucagcgacgacaucgagcagcaggccgacaacaugaucaccgagaugcuccagaaggaguacauggagcggcagggcaagacgccccuggggcugguggaccuguucgucuucuccaccagcuucuaccucaucuccaucuuccugcaccuggugaagaucccgacccaccgccacguggucggcaagagcugccccaagccccaccggcucaaccacauggggaucugcuccugcggccuguacgggcagcccggcgugccggugaaguggaagcgcugaggacuagucccuguucccagagcccacuuuuuuuucuuuuuuugaaauaaaauagccugucuuucagaucuaaaaaaaaaaaaaaaaaaaaaaaaaaaaaaaaaaaaaaaaaaaaaaaaaaaaaaaaaaaaaaaaaaaaaaaaaaaaaaaaaaaaaaaaaaaaaaaaaaaa

SEQ ID NO: 40768 - RNA, 1743 nt, Artificial Sequence
  mRNA product Design a-2 (A100) comprising derived and/or modified sequence from MOPV/LASV reassortant(IGS-1;Clade IV)__AFY05576__GPCmut12 (opt1)
aggagaguccgcucagccagguugcagaagcggcuuagcguguguccuaaucuucucucugcguguagguaggccugugccgcaaacaagcuuaccaugggccagaucgugaccuucuuccaggaggucccccacgugaucgaggaggugaugaacaucguccugaucgcccucagcgugcuggccgugcugaaggggcucuacaacuucgcgaccugcggccuggucgggcuggugaccuuccuccugcugugcggccgcuccugcaccaccagccucuacaaggggguguacgagcugcagacccuggagcucaacauggagacgcugaacaugugcaugccgcuguccugcaccaagaacaacagccaccacuacaucauggucggcaacgagaccggccucgagcugacccugacgaacaccuccaucaucaaccacaaguucugcaaccucagcgacgcccacaagaagaaccuguacgaccacgcccugauguccaucaucagcaccuuccaccucuccauccccaacuucaaccaguacgaggccaugagcugcgacuucaacgggggcaagaucuccgugcaguacaaccugagccacuccuacgccggggacgcggccaaccacugcggcaccguggccaacgggguccugcagacguucaugcggauggccuggggcggcagcuacaucgcgcucgacuccgggcgcggcaacugggacugcaucaugaccagcuaccaguaccugaucauccagaacaccaccugggaggaccacugccaguucucccggcccagccccaucggguaccugggccuccugucccagcgcacgcgggacaucuacaucagccgccggcugcucggcaccuucaccuggacccugagcgacuccgagggggaggacacgccgggcggguacugccugacccgcuggaugcucaucgaggccgagcugaagugcuucggcaacaccgccguggccaagugcaacgagaagcacgacgaggaguucugcgacaugcugcggcuguucgacuucugcaagcaggccauccagcgccugaaggcggaggcccagaugagcauccagcugaucaacaaggccgugaacgcccucaucaacgaccagcugaucaugaagaaccaccuccgggacaucauggggauccccuacugcaacuacuccaaguacugcuaccucaaccacaccacgaccggccgcaccagccugcccaagugcugccuggucuccaacggcagcuaccucaacgagacccacuucuccgacgacaucgagcagcaggccgacaacaugaucacggagaugcugcagaaggaguacauggagcggcaggggaagacgccccugggccugguggaccucuucguguucagcaccuccuucuaccugaucagcaucuuccugcaccucgucaagaucccgacccaccgccacaucguggggaaguccugccccaagccccaccggcugaaccacaugggcaucugcagcugcgggcuguacaagcagcccggcgugccggucaaguggaagcgcugaggacuagucccuguucccagagcccacuuuuuuuucuuuuuuugaaauaaaauagccugucuuucagaucuaaaaaaaaaaaaaaaaaaaaaaaaaaaaaaaaaaaaaaaaaaaaaaaaaaaaaaaaaaaaaaaaaaaaaaaaaaaaaaaaaaaaaaaaaaaaaaaaaaaa

SEQ ID NO: 40769 - RNA, 1743 nt, Artificial Sequence
  mRNA product Design a-2 (A100) comprising derived and/or modified sequence from LASV(LM765-SLE-2012;Clade IV)__AIT17814__GPCmut12 (opt1)
aggagaguccgcucagccagguugcagaagcggcuuagcguguguccuaaucuucucucugcguguagguaggccugugccgcaaacaagcuuaccaugggccagaucgugaccuucuuccaggaggucccccacgugaucgaggaggugaugaacaucguccugaucgcccucagcauccuggccgugcugaaggggcucuacaacuucgcgaccugcggccugguggggcuggucacguuccuccugcugugcggccgcuccugcaccaccagccucuacaaggggguguacgagcugcagacccuggagcucaacauggagacgcugaacaugugcaugccgcuguccugcaccaagaacaacagccaccacuacaucauggugggcaacgagaccggccucgagcugacccugacgaacaccuccaucaucgaccacaaguucugcaaccucagcgacgcccaccggaagaaccuguacgaccacgcccugauguccaucaucagcaccuuccaccucuccauccccaacuucaaccaguacgaggccaugagcugcgacuucaacgggggcaagaucuccguccaguacaaccugagccacuccuacgccaaggacgcggccgaccacugcgggaccguggccaacggcgugcugcagacguucaugcgcauggccuggggcgggagcuacaucgcgcucgacuccggccgggggcgcugggacugcaucaugaccagcuaccaguaccugaucauccagaacaccaccugggaggaccacugccaguucucccggcccagccccaucggcuaccuggggcuccugucccagcgcacgcgggacaucuacaucagccgccggcugcucggcaccuucaccuggacccugagcgacuccgagggcaaggacacgcccgggggcuacugccugacccgcuggaugcucaucgaggccgagcugaagugcuucgggaacaccgccgucgccaagugcaacgagaagcacgacgaggaguucugcgacaugcugcggcuguucgacuucugcaagcaggccauccagcgccugaaggcggaggcccagaugagcauccagcugaucaacaaggccgugaacgcccucaucaacgaccagcugaucaugaagaaccaccuccgggacaucaugggcauccccuacugcaacuacuccaaguacugcuaccucaaccacaccacgaccgggaagaccagccugcccaagugcugccugguguccaacggcagcuaccucaacgagacccacuucuccgacgacaucgagcagcaggccgacaacaugaucacggagaugcugcagaaggaguacauggagcgccagggcaagaccccgcuggggcuggucgaccucuucguguucagcaccuccuucuaccugaucagcaucuuccugcaccucgugaagaucccgacccaccggcacaucgucggcaagcccugccccaagccccaccgccugaaccacauggggaucugcuccugcggccuguacaagcagccgggggugcccgugaaguggaagcggugaggacuagucccuguucccagagcccacuuuuuuuucuuuuuuugaaauaaaauagccugucuuucagaucuaaaaaaaaaaaaaaaaaaaaaaaaaaaaaaaaaaaaaaaaaaaaaaaaaaaaaaaaaaaaaaaaaaaaaaaaaaaaaaaaaaaaaaaaaaaaaaaaaaaa

SEQ ID NO: 40770 - RNA, 1743 nt, Artificial Sequence
  mRNA product Design a-2 (A100) comprising derived and/or modified sequence from LASV(LM776-SLE-2012;Clade IV)__AIT17824__GPCmut12 (opt1)
aggagaguccgcucagccagguugcagaagcggcuuagcguguguccuaaucuucucucugcguguagguaggccugugccgcaaacaagcuuaccaugggccagaucgugaccuucuuccaggaggucccccacgugaucgaggaggugaugaacaucguccugaucgcccucagcauccuggccgugcugaaggggcucuacaacuucgcgaccugcggccugguggggcuggucaccuuccuccugcugugcggccgcuccugcaccaccagcguguacaaggggguguacgagcuccagacccuggagcugaacauggagacgcucaacaugugcaugccgcuguccugcaccaagaacaacagccaccacuacaucauggucggcaacgagaccggccuggagcucacccugacgaacaccuccaucaucaaccacaaguucugcaaccugagcgacgcccacaagaagaaccucuacgaccacgcccugauguccaucaucagcaccuuccaccuguccauccccaacuucaaccaguacgaggccaugagcugcgacuucaacgggggcaagaucuccgugcaguacaaccucagccacuccuacgccggggacgcggccaaccacugcggcaccguggccaacgggguccugcagacguucaugcggauggccuggggcggcagcuacaucgcgcuggacuccgggcacggcaagugggacugcaucaugaccagcuaccaguaccucaucauccagaacaccaccugggaggaccacugccaguucucccgccccagccccaucggguaccugggccugcucucccagcggacgcgcgacaucuacaucagccggcgccugcugggcaccuucaccuggacccucagcgacuccgaggggaaggacacgccgggcggguacugccugacccgguggaugcugaucgaggccgagcucaagugcuucggcaacaccgccguggccaagugcaacgagaagcacgacgaggaguucugcgacaugcugcgccuguucgacuucugcaagcaggccauccagcggcucaaggcggaggcccagaugagcauccagcugaucaacaaggccgugaacgcccugaucaacgaccagcucaucaugaagaaccaccuccgcgacaucauggggauccccuacugcaacuacuccaaguacugcuaccugaaccacaccacgaccggcaagaccagccugcccaagugcugccuggucuccaacggcagcuaccugaacgagacccacuucuccgacgacaucgagcagcaggccgacaacaugaucacggagaugcuccagaaggaguacauggagcggcaggggaagacgccccugggccugguggaccuguucguguucagcaccuccuucuaccucaucagcaucuuccugcaccuggucaagaucccgacccaccgccacaucguggggaaguccugccccaagccccaccggcucaaccacaugggcaucugcagcugcgggcuguacaagcagcccggcgugccgguccgcuggaagcggugaggacuagucccuguucccagagcccacuuuuuuuucuuuuuuugaaauaaaauagccugucuuucagaucuaaaaaaaaaaaaaaaaaaaaaaaaaaaaaaaaaaaaaaaaaaaaaaaaaaaaaaaaaaaaaaaaaaaaaaaaaaaaaaaaaaaaaaaaaaaaaaaaaaaa

SEQ ID NO: 40771 - RNA, 1743 nt, Artificial Sequence
  mRNA product Design a-2 (A100) comprising derived and/or modified sequence from LASV(Mad39;Clade IV)__ANH09722__GPCmut12 (opt1)
aggagaguccgcucagccagguugcagaagcggcuuagcguguguccuaaucuucucucugcguguagguaggccugugccgcaaacaagcuuaccaugggccagaucgugaccuucuuccaggaggucccccacgugaucgaggaggugaugaacaucguccugaucgcccucagcauccuggccgugcugaaggggcucuacaacguggcgaccugcggccugaucgggcuggucacguuccuccugcugugcggccgcuccugcaccaccacccucuacaaggggguguacgagcugcaggcccuggagcucaacauggagacgcugaacaugugcaugccgcugagcugcaccaagaacaacucccaccacuacauccgggugggcaacgagaccggccucgagcugacccugacgaacaccagccucaucaaccacaaguucugcaaccuguccgacgcccacaagaagaaccuguacgaccacgcccucaugagcaucaucuccaccuuccaccugagcauccccaacuucaaccaguacgaggccauguccugcgacuucaacgacgggaagaucagcguccaguacaaccugucccacaccuacgcgggcgacacggccaaccacugcgggaccguggccaacggcgugcuccagaccuucaugcgcauggccuggggcgggagcuacaucgcgcuggacuccggccgcgggggcugggacugcaucaugaccagcuaccaguaccugaucauccagaacacgaccugggaggaccacugccaguucucccggcccagccccaucggguaccucggccugcugucccagcggacccgcgacaucuacaucagccggcgccuccugggcaccuucacguggacccuguccgacagcgaggggaaggacaccccgggcggguacugccucacccgguggaugcugaucgaggccgagcugaagugcuucggcaacacggccgucgccaagugcaacgagaagcacgacgaggaguucugcgacaugcuccgccuguucgacuucugcaagcaggccauccagcggcugaaggcggaggcccagaugagcauccagcucaucaacaaggccgugaacgcccugaucaacgaccagcugaucaugaagaaccaccuccgcgacaucauggggauccccuacugcaacuacuccaaguacugcuaccugaaccacaccgugaccggcaagaccagccugcccaagugcugccucgucuccaacggcagcuaccugaacgagacgcacuucuccgacgacaucgagcagcaggccgacaacaugaucaccgagaugcugcagaaggaguacauggagcggcaggggaagacgccccugggccucguggaccuguucguguucagcaccuccuucuaccugaucagcaucuuccuccaccuggucaagaucccgacccaccgccacgugguggggaagcccugccccaagccccaccggcugaaccacaugggcaucugcuccugcggguucuacaagcagccgggcguccccgugcgcuggaagcggugaggacuagucccuguucccagagcccacuuuuuuuucuuuuuuugaaauaaaauagccugucuuucagaucuaaaaaaaaaaaaaaaaaaaaaaaaaaaaaaaaaaaaaaaaaaaaaaaaaaaaaaaaaaaaaaaaaaaaaaaaaaaaaaaaaaaaaaaaaaaaaaaaaaaa

SEQ ID NO: 40772 - RNA, 1743 nt, Artificial Sequence
  mRNA product Design a-2 (A100) comprising derived and/or modified sequence from LASV(Z0947-SLE-2011;Clade IV)__AIT17840__GPCmut12 (opt1)
aggagaguccgcucagccagguugcagaagcggcuuagcguguguccuaaucuucucucugcguguagguaggccugugccgcaaacaagcuuaccaugggccagaucgugaccuucuuccaggaggucccccacgugaucgaggaggugaugaacaucguccugaucgcccucagcauccuggccgugcugaaggggcucuacaacuucgcgaccugcggccugguggggcuggucacguuccuccugcugugcggccgcuccugcaccaucagccucuacaaggggguguacgagcugcagacccuggagcucaacauggagacccugaacaugugcaugccgcuguccugcacgaagaacaacagccaccacuacaucauggugggcaacgagaccggccucgagcugacccugaccaacacguccaucaucaaccacaaguucugcaaccucagcgacgcccacaagaagaaccuguacgaccacgcccugauguccaucaucagcaccuuccaccucuccauccccaacuucaaccaguacgaggccaugagcugcgacuucaacgggggcaagaucuccguccaguacaaccugagccacuccuacgccggggacgcggccaaccacugcggcaccguggccaacggggugcugcagaccuucaugcggauggccuggggcggcagcuacaucgcgcucgacuccgggcgcgaccggugggacugcaucaugacgagcuaccaguaccugaucauccagaacaccaccugggaggaccacugccaguucucccgccccagccccaucggcuaccuggggcuccugucccagcggacccgcgacaucuacaucagccggcgccugcucggcacguucaccuggacccugagcgacuccgagggcaaggacacccccgggggcuacugccugacgcgguggaugcucaucgaggccgagcugaagugcuucgggaacaccgccgucgccaagugcaacgagaagcacgacgaggaguucugcgacaugcugcgccucuucgacuucugcaagcaggccauccagcggcugaaggcggaggcccagaugagcauccagcugaucaacaaggccgugaacgcccucaucaacgaccagcugaucaugaagaaccaccuccgcgacaucaugggcaucccguacugcaacuacuccaaguacugcuaccugaaccacaccaccacggggaagaccagccugcccaagugcugccugguguccaacggcagcuaccucaacgagacccacuucuccgacgacaucgagcagcaggccgacaacaugaucaccgagaugcugcagaaggaguacauggagcggcagggcaagacgccccuggggcuggucgaccucuucguguucagcaccuccuucuaccugaucagcaucuuccugcaccucgugaagaucccgacccaccgccacaucgucggcaagcccugccccaagccccaccggcugaaccacauggggaucugcuccugcggccuguacaagcagccgggggugcccgugaaguggaagcgcugaggacuagucccuguucccagagcccacuuuuuuuucuuuuuuugaaauaaaauagccugucuuucagaucuaaaaaaaaaaaaaaaaaaaaaaaaaaaaaaaaaaaaaaaaaaaaaaaaaaaaaaaaaaaaaaaaaaaaaaaaaaaaaaaaaaaaaaaaaaaaaaaaaaaa

SEQ ID NO: 40773 - RNA, 1743 nt, Artificial Sequence
  mRNA product Design a-2 (A100) comprising derived and/or modified sequence from LASV(Josiah;Clade IV)__NP_694870__GPCmut12 (opt4)
aggagaguccgcucagccagguugcagaagcggcuuagcguguguccuaaucuucucucugcguguagguaggccugugccgcaaacaagcuuaccaugggccagaucgugaccuucuuccaggaggugccccacgugaucgaggaggugaugaacaucgugcugaucgcccugagcgugcuggccgugcugaagggccuguacaacuucgccaccugcggccuggugggccuggugaccuuccugcugcugugcggcagaagcugcaccaccagccuguacaagggcguguacgagcugcagacccuggagcugaacauggagacccugaacaugugcaugccccugagcugcaccaagaacaacagccaccacuacaucauggugggcaacgagaccggccuggagcugacccugaccaacaccagcaucaucaaccacaaguucugcaaccugagcgacgcccacaagaagaaccuguacgaccacgcccugaugagcaucaucagcaccuuccaccugagcauccccaacuucaaccaguacgaggccaugagcugcgacuucaacggcggcaagaucagcgugcaguacaaccugagccacagcuacgccggcgacgccgccaaccacugcggcaccguggccaacggcgugcugcagaccuucaugagaauggccuggggcggcagcuacaucgcccuggacagcggcagaggcaacugggacugcaucaugaccagcuaccaguaccugaucauccagaacaccaccugggaggaccacugccaguucagcagacccagccccaucggcuaccugggccugcugagccagagaaccagagacaucuacaucagcagaagacugcugggcaccuucaccuggacccugagcgacagcgagggcaaggacacccccggcggcuacugccugaccagauggaugcugaucgaggccgagcugaagugcuucggcaacaccgccguggccaagugcaacgagaagcacgacgaggaguucugcgacaugcugagacuguucgacuucugcaagcaggccauccagagacugaaggccgaggcccagaugagcauccagcugaucaacaaggccgugaacgcccugaucaacgaccagcugaucaugaagaaccaccugagagacaucaugggcauccccuacugcaacuacagcaaguacugcuaccugaaccacaccaccaccggcagaaccagccugcccaagugcugccuggugagcaacggcagcuaccugaacgagacccacuucagcgacgacaucgagcagcaggccgacaacaugaucaccgagaugcugcagaaggaguacauggagagacagggcaagaccccccugggccugguggaccuguucguguucagcaccagcuucuaccugaucagcaucuuccugcaccuggugaagauccccacccacagacacaucgugggcaagagcugccccaagccccacagacugaaccacaugggcaucugcagcugcggccuguacaagcagcccggcgugcccgugaaguggaagagaugaggacuagucccuguucccagagcccacuuuuuuuucuuuuuuugaaauaaaauagccugucuuucagaucuaaaaaaaaaaaaaaaaaaaaaaaaaaaaaaaaaaaaaaaaaaaaaaaaaaaaaaaaaaaaaaaaaaaaaaaaaaaaaaaaaaaaaaaaaaaaaaaaaaaa

SEQ ID NO: 40774 - RNA, 1740 nt, Artificial Sequence
  mRNA product Design a-2 (A100) comprising derived and/or modified sequence from LASV(LP;Clade I)__AAF86701__GPCmut12 (opt4)
aggagaguccgcucagccagguugcagaagcggcuuagcguguguccuaaucuucucucugcguguagguaggccugugccgcaaacaagcuuaccaugggccagaucaucaccuucuuccaggaggugccccacgugaucgaggaggugaugaacaucgugcugaucgcccugagccugcuggccauccugaagggccuguacaacaucgccaccugcggcaucaucggccugguggccuuccuguuccugugcggcaagagcugcagccugacccugaagggcggcuacgagcugcagacccuggagcugaacauggagacccugaacaugugcaugccccugagcugcaccaagaacagcagccaccacuacaucagagugggcaacgagaccggccuggagcugacccugaccaacaccagcaucaucaaccacaaguucugcaaccugagcgacgcccacaagaagaaccuguacgaccacgcccugaugagcaucaucagcaccuuccaccugagcauccccaacuucaaccaguacgaggccaugagcugcgacuucaacggcggcaagaucagcgugcaguacaaccugagccacagcuacgccggcgacgccgccgagcacugcggcaccguggccaacggcgugcugcagaccuucaugagaauggccuggggcggcagauacaucgcccuggacagcggcaagggcaacugggacugcaucaugaccagcuaccaguaccugaucauccagaacaccaccugggaggaccacugccaguucagcagacccagccccaucggcuaccugggccugcugagccagagaaccagagacaucuacaucagcagaagacugcugggcaccuucaccuggacccugagcgacagcgagggcaacgagacccccggcggcuacugccugaccagauggaugcugaucgaggccgagcugaagugcuucggcaacaccgccguggccaagugcaacgagaagcacgacgaggaguucugcgacaugcugagacuguucgacuucugcaagcaggccaucagaagacugaaggccgaggcccagaugagcauccagcugaucaacaaggccgugaacgcccugaucaacgaccagcugaucaugaagaaccaccugagagacaucaugggcauccccuacugcaacuacagcaaguacugcuaccugaaccacaccagcagcggcagaaccagccugcccaagugcugccugaucagcaacggcagcuaccugaacgagacccaguucagcgacgacaucgagcagcaggccgacaacaugaucaccgagaugcugcagaaggaguacaucgagagacagggcaagaccccccugggccugguggacaucuucaucuucagcaccagcuucuaccugaucagcaucuuccugcaccugaucaagauccccacccacagacacaucgugggcaagcccugccccaagccccacagacugaaccacaugggcgugugcagcugcggccuguacaagcaccccggcgugcccaccaaguggaagagaugaggacuagucccuguucccagagcccacuuuuuuuucuuuuuuugaaauaaaauagccugucuuucagaucuaaaaaaaaaaaaaaaaaaaaaaaaaaaaaaaaaaaaaaaaaaaaaaaaaaaaaaaaaaaaaaaaaaaaaaaaaaaaaaaaaaaaaaaaaaaaaaaaaaaa

SEQ ID NO: 40775 - RNA, 1740 nt, Artificial Sequence
  mRNA product Design a-2 (A100) comprising derived and/or modified sequence from LASV(803213;Clade II)__AAF86703__GPCmut12 (opt4)
aggagaguccgcucagccagguugcagaagcggcuuagcguguguccuaaucuucucucugcguguagguaggccugugccgcaaacaagcuuaccaugggccagaucaucaccuucuuccaggaggugccccacgugaucgaggaggugaugaacaucgugcugaucgcccugagccugcuggccauccugaagggcaucuacaacguggccaccugcggccuguucggccugaucagcuuccugcugcugugcggcagaagcugcagcgugaccuacaagggcguguacgagcugcagacccuggagcugaacauggccaaccugaacaugugcaugccccugagcugcaccaagaacaacagccaccacuacaucauggugggcaacgagaccggccuggagcugacccugaccaacaccagcaucaucaaccacaaguucugcaaccugagcgacgcccacaagaagaaccuguacgaccacgcccugaugagcaucaucagcaccuuccaccugagcauccccaacuucaaccaguacgaggccaugagcugcgacuucaacggcggcaagaucagcgugcaguacaaccugagccacagcuucgccguggacgccgccaaccacugcggcaccaucgccaacggcgugcugcagaccuucaugagaauggccuggggcggcagcuacaucgcccuggacagcggcaagggcaacugggacugcaucaugaccagcuaccaguaccugaucauccagaacaccaccugggaggaccacugccaguucagcagacccagccccaucggcuaccugggccugcugagccagagaaccagagacaucuacaucagcagaagacugcugggcaccuucaccuggacccugagcgacagcgagggcaacgaggcccccggcggcuacugccugaccagauggaugcugaucgaggccgagcugaagugcuucggcaacaccgccguggccaagugcaacgagaagcacgacgaggaguucugcgacaugcugagacuguucgacuucugcaagcaggccaucaagagacugaagaccgaggcccagaugagcauccagcugaucaacaaggccgugaacgcccugaucaacgaccagcugaucaugaagaaccaccugagagacaucaugggcauccccuacugcaacuacagcagauacugcuaccugaaccacaccgugaccggcaagaccagccugcccagaugcugccuggugagcaacggcagcuaccugaacgagacccacuucagcgacgacaucgagcagcaggccgacaacaugaucaccgagaugcugcagaaggaguacauggacagacagggcaagaccccccugggccugguggaccuguucguguucagcaccagcuucuaccugaucagcaucuuccugcaccuggugaagauccccacccacagacacaucgugggcaagcccugccccaagccccacagacugaaccacaugggcaucugcagcugcggccuguacaagcaccccggcgugcccgugaaguggaagagaugaggacuagucccuguucccagagcccacuuuuuuuucuuuuuuugaaauaaaauagccugucuuucagaucuaaaaaaaaaaaaaaaaaaaaaaaaaaaaaaaaaaaaaaaaaaaaaaaaaaaaaaaaaaaaaaaaaaaaaaaaaaaaaaaaaaaaaaaaaaaaaaaaaaaa

SEQ ID NO: 40776 - RNA, 1740 nt, Artificial Sequence
  mRNA product Design a-2 (A100) comprising derived and/or modified sequence from LASV(GA391;Clade III)__CAA36645__GPCmut12 (opt4)
aggagaguccgcucagccagguugcagaagcggcuuagcguguguccuaaucuucucucugcguguagguaggccugugccgcaaacaagcuuaccaugggccagaucgugaccuucuuccaggaggugccccacgugaucgaggaggugaugaacaucgugcugaucgcccugagcauccuggccauccugaagggccuguacaacguggccaccugcggccugaucggccuggugaccuuccugcugcugagcggcagaagcugcagccugaucuacaagggcaccuacgagcugcagacccuggagcugaacauggagacccugaacaugugcaugccccugagcugcaccaagaacaacagccaccacuacaucagagugggcaacgagaccggccuggagcugacccugaccaacaccagcauccugaaccacaaguucugcaaccugagcgacgcccacaagagaaaccuguacgaccacagccugaugagcaucaucagcaccuuccaccugagcauccccaacuucaaccaguacgaggccaugagcugcgacuucaacggcggcaagaucaccgugcaguacaaccugagccacagcuucgccguggacgccgccggccacugcggcacccuggccaacggcgugcugcagaccuucaugagaauggccuggggcggcagcuacaucgcccuggacagcggcagaggcaacugggacugcaucaugaccagcuaccaguaccugaucauccagaacaccaccugggacgaccacugccaguucagcagacccagccccaucggcuaccugggccugcugagccagagaaccagagacaucuacaucagcagaagacugcugggcaccuucaccuggacccugagcgacagcgagggcaacgagacccccggcggcuacugccugaccagauggaugcugaucgaggccgagcugaagugcuucggcaacaccgccguggccaagugcaacgagaagcacgacgaggaguucugcgacaugcugagacuguucgacuucugcaagcaggccaucagaagacugaagaccgaggcccagaugagcauccagcugaucaacaaggccgugaacgcccugaucaacgaccagcugaucaugaagaaccaccugagagacaucaugggcauccccuacugcaacuacagcagauacugcuaccugaaccacaccagcaccggcaagaccagccugcccagaugcugccugaucagcaacggcagcuaccugaacgagaccaaguucagcgacgacaucgagcagcaggccgacaacaugaucaccgagaugcugcagaaggaguacaucgacagacagggcaagaccccccugggccugguggaccuguucguguucagcaccagcuucuaccugaucagcaucuuccugcaccuggugaagauccccacccacagacacaucgugggcaagcccugccccaagccccacagacugaaccacaugggcaucugcagcugcggccuguacaagcagcccggcgugcccgugagauggaagagaugaggacuagucccuguucccagagcccacuuuuuuuucuuuuuuugaaauaaaauagccugucuuucagaucuaaaaaaaaaaaaaaaaaaaaaaaaaaaaaaaaaaaaaaaaaaaaaaaaaaaaaaaaaaaaaaaaaaaaaaaaaaaaaaaaaaaaaaaaaaaaaaaaaaaa

SEQ ID NO: 40777 - RNA, 1743 nt, Artificial Sequence
  mRNA product Design a-2 (A100) comprising derived and/or modified sequence from LASV(AV;Clade V)__CCA30314__GPCmut12 (opt4)
aggagaguccgcucagccagguugcagaagcggcuuagcguguguccuaaucuucucucugcguguagguaggccugugccgcaaacaagcuuaccaugggccagaucgugaccuucuuccaggaggugccccacgugaucgaggaggugaugaacaucgugcugaucgcccugagcauccuggccgugcugaagggccuguacaacaucgccaccugcggccugaucggccugaucaccuuccugcugcugugcggcagaagcugcagcagcaaccuguacaagggcguguacgagcugcagagccuggaccugaacauggagacccugaacaugugcaugccccugagcugcaccaagaacaacagccaccacuacaucagagugggcaacgacaccggccuggagcugacccugaccaacaccagcauccugaaccacaaguucugcaaccugagcgacgcccacaagaaggaccuguacgaccacgcccugaugagcaucaucagcaccuuccaccugagcauccccaacuucaaccaguacgaggccaugagcugcgacuucaacggcggcaagaucagcgugcaguacaaccugagccacagcuacgccaucgacgccgccaaccacugcggcaccguggccaacggcauccugcagaccuucaugagaauggccuggggcggcagcuacaucgcccuggacagcggcagaggcaacugggacugcaucaugaccagcuaccaguaccugaucauccagaacaccaccugggagaaccacugccaguucagcagacccagccccaucggcuaccugggccugcugagccagagaaccagagacaucuacaucagcagaagacugcugggcaccuucaccuggacccugagcgacagcgagggcaacgccacccccggcggcuacugccugaccagauggaugcugaucgaggccgagcugaagugcuucggcaacaccgccguggccaagugcaacgagaagcacgacgaggaguucugcgacaugcugagacuguucgacuucugcaagcaggccaucagcagacugaagagcgaggcccagaugagcauccagcugaucaacaaggccgugaacgcccugaucaacgaccagcugaucaugaagaaccaccugagagacaucaugggcauccccuacugcaacuacagcaaguacugcuaccugaaccacaccaucaccggcaagaccagccugcccaagugcugccuggugagcaacggcagcuaccugaacgagacccacuucagcgacgacaucgagcagcaggccgacaacaugaucaccgagaugcugcagaaggaguacauggagagacagggcaagaccccccugggccugguggaccuguucguguucagcaccagcuucuaccugaucagcaucuuccugagacuggugaagauccccacccacagacacaucgugggcaagcccugccccaagccccacagacugaaccacaugggcaucugcagcugcggccuguacaagcagcccggcgugcccgugagauggaagagaugaggacuagucccuguucccagagcccacuuuuuuuucuuuuuuugaaauaaaauagccugucuuucagaucuaaaaaaaaaaaaaaaaaaaaaaaaaaaaaaaaaaaaaaaaaaaaaaaaaaaaaaaaaaaaaaaaaaaaaaaaaaaaaaaaaaaaaaaaaaaaaaaaaaaa

SEQ ID NO: 40778 - RNA, 1740 nt, Artificial Sequence
  mRNA product Design a-2 (A100) comprising derived and/or modified sequence from LASV(Togo/2016/7082;Clade VI)__AMR44577__GPCmut12 (opt4)
aggagaguccgcucagccagguugcagaagcggcuuagcguguguccuaaucuucucucugcguguagguaggccugugccgcaaacaagcuuaccaugggccagaucaucaccuucuuccaggaggugccccacgugaucgaggaggugaugaacaucgugcugaucgcccugagccugcuggccauccugaagggcguguacaacguggccaccugcggcaucaucggccuggugaccuuccuguuccugugcggcagaagcugcagccugaucuacaagggcagcuacgagcugcagacccuggagcugaacauggagacccugaacaugugcaugccccugagcugcaccaagaacagcagccaccacuacaucagagugggcaacgagaccggccuggagcugacccugaccaacaccagcaucaucaaccacaaguucugcaaccugagcgacgcccacaagagaaaccuguacgaccacgcccugaugagcauccugagcaccuuccaccugagcauccccaacuucaaccaguacgaggccaugagcugcgacuucaacggcggcaagaucagcgugcaguacaaccugagccacgccuacgccguggacgccgccgagcacugcggcaccguggccaacggcgugcugcagaccuucaugagaauggccuggggcggcagcuacaucgcccuggacagcggcagaggcaacugggacugcaucaugaccagcuaccaguaccugaucauccagaacaccaccugggaggaccacugccaguucagcagacccagccccaucggcuaccugggccugcugagccagagaaccagagacaucuacaucagcagaagacugcugggcaccuucaccuggacccugagcgacagcgagggcaacgagacccccggcggcuacugccugaccagauggaugcugaucgaggccgagcugaagugcuucggcaacaccgccguggccaagugcaacgagaagcacgacgaggaguucugcgacaugcugagacuguucgacuucugcaagcaggccauccagagacugaagagcgaggcccagaugagcauccagcugaucaacaaggccgugaacgcccugaucaacgaccagcugaucaugaagaaccaccugagagacaugaugggcauccccuacugcaacuacagcaaguacugcuaccugaaccacaccagcagcggcagaaccagccugcccaagugcugccuggugagcaacggcagcuaccugaacgagacccacuucagcgacgacaucgagcagcaggccgacaacaugaucaccgagaugcugcagaaggaguacaucgacagacagggcaagaccccccugggccugguggaccuguucguguucagcaccagcuucuaccugaucagcaucuuccugcaccugaucaagauccccacccacagacacaucgugggcaagcccugccccaagccccacagacugaaccacaugggcaucugcagcugcggccuguacaagcagcccggcgugcccaccagauggaagagaugaggacuagucccuguucccagagcccacuuuuuuuucuuuuuuugaaauaaaauagccugucuuucagaucuaaaaaaaaaaaaaaaaaaaaaaaaaaaaaaaaaaaaaaaaaaaaaaaaaaaaaaaaaaaaaaaaaaaaaaaaaaaaaaaaaaaaaaaaaaaaaaaaaaaa

SEQ ID NO: 40779 - RNA, 1740 nt, Artificial Sequence
  mRNA product Design a-2 (A100) comprising derived and/or modified sequence from LASV(KAK-428;Clade n.d. (VII))__ANH09740__GPCmut12 (opt4)
aggagaguccgcucagccagguugcagaagcggcuuagcguguguccuaaucuucucucugcguguagguaggccugugccgcaaacaagcuuaccaugggccagaucgugaccuucuuccaggaggugccccacgugaucgaggaggugaugaacaucgugcugaucgcccugagccugcuggccauccugaagggccuguacaacuucgccaccugcggcgugaucggccugaucaccuuccugcugcugugcggcagaagcugcagcgccaccuacaagggccaguacgagcugcagacccuggagcugaacauggagagccugaacaugugcaugccccugagcugcaccaagaacaacagccaccacuacaucagagccggcaacaacaccggccuggagcugacccugaccaacaccagcaucaucagccacaaguucugcaaccugagcgacgcccacaagaagaaccuguacgaccacacccugaugagcaucaucaccaccuuccaccugagcauccccaacuucaaccaguacgaggccaugagcugcgacuucaacggcggcaagaucagcauccaguacaaccugagccacagcuacgccggcgacgccgcccagcacugcggcaccguggccaacggcgugcugcagaccuucaugagaauggccuggggcggcagcuaccuggcccuggacagcggcagaagaggcugggacugcaucaucagcagcuaccaguaccugaucauccagaacaccaccugggacgaccacugccaguucagcagacccagccccaucggcuaccugggcuucgugagccagaagaccagagacaucuacaucagcagaagacugcugggcaccuucaccuggacccugagcgacagcgagggccacgacaugcccggcggcuacugccugaccagauggaugcugaucgaggccgaccugaagugcuucggcaacaccgccguggccaagugcaacgagaagcacgacgaggaguucugcgacauguggagacuguucgacuucugcaagcaggccauccagagacugaaggccgaggcccagaugaacauccagcugaucaacaaggccgugaacgcccugaucaacgaccagcugaugaugaagaaccaccugagagacaucaugggcauccccuacugcaacuacagcaaguucugcuaccugaacaacaccaccaccggcagaaccagccugcccagaugcugccugaucagcaacggcagcuaccugaacgagacccacuucagcgacgacaucgagcagcaggccgacaacaugaucaccgagaugcugcagaaggaguacauggacagacagggcaagaccccccugggccugguggaccuguucguguucagcaccagcuucuaccugaucaccaucuuccugcaccuggugaagauccccacccacagacacaucgugggcaagcccugccccaagccccacagacugaaccacaugggcaucugcagcugcggccuguacaagcagcccggcgugcccgugagauggaagagaugaggacuagucccuguucccagagcccacuuuuuuuucuuuuuuugaaauaaaauagccugucuuucagaucuaaaaaaaaaaaaaaaaaaaaaaaaaaaaaaaaaaaaaaaaaaaaaaaaaaaaaaaaaaaaaaaaaaaaaaaaaaaaaaaaaaaaaaaaaaaaaaaaaaaa

SEQ ID NO: 40780 - RNA, 1740 nt, Artificial Sequence; identical to SEQ ID NO: 40774
  mRNA product Design a-2 (A100) comprising derived and/or modified sequence from LASV(Pinneo-NIG-1969;Clade I)__AIT17836__GPCmut12 (opt4)

SEQ ID NO: 40781 - RNA, 1740 nt, Artificial Sequence
  mRNA product Design a-2 (A100) comprising derived and/or modified sequence from LASV(ISTH0009-NIG-2011;Clade II)__AIT17404__GPCmut12 (opt4)
aggagaguccgcucagccagguugcagaagcggcuuagcguguguccuaaucuucucucugcguguagguaggccugugccgcaaacaagcuuaccaugggccagaucaucaccuucuuccaggaggugccccacgugaucgaggaggugaugaacaucgugcugaucgcccugagccugcuggccauccugaagggcaucuacaacguggccaccugcggccuguucggccuggugagcuuccugcugcugugcggcagaagcugcagcaccaccuacaagggcguguacgagcugcagacccuggagcuggacauggccagccugaacaugugcaugccccugagcugcaccaagaacaacagccaccacuacaucauggugggcaacgagaccggccuggagcugacccugaccaacaccagcaucaucaaccacaaguucugcaaccugagcgacgcccacaagaagaaccuguacgaccacgcccugaugagcaucaucagcaccuuccaccugagcauccccaacuucaaccaguacgaggccaugagcugcgacuucaacggcggcaagaucagcgugcaguacaaccugagccacgccuacgccguggacgccgccaaccacugcggcaccaucgccaacggcgugcugcagaccuucaugagaauggccuggggcggcagcuacaucgcccuggacagcggcaagggcagcugggacugcaucaugaccagcuaccaguaccugaucauccagaacaccaccugggaggaccacugccaguucagcagacccagccccaucggcuaccugggccugcugagccagagaaccagagacaucuacaucagcagaagacugcugggcaccuucaccuggacccugagcgacagcgagggcaacgagacccccggcggcuacugccugaccagauggaugcugaucgaggccgagcugaagugcuucggcaacaccgccguggccaagugcaacgagaagcacgacgaggaguucugcgacaugcugagacuguucgacuucugcaagcaggccaucagaagacugaagaccgaggcccagaugagcauccagcugaucaacaaggccgugaacgcccugaucaacgaccagcugaucaugaagaaccaccugagagacaucaugggcauccccuacugcaacuacagcaaguacugcuaccugaaccacaccgugaccggcaagaccagccugcccagaugcugccuggugagcaacggcagcuaccugaacgagacccacuucagcgacgacaucgagcagcaggccgacaacaugaucaccgagcugcugcagaaggaguacauggacagacagggcaagaccccccugggccugguggaccuguucguguucagcaccagcuucuaccugaucagcaucuuccugcaccugaucaagauccccacccacagacacaucaccggcaagcccugccccaagccccacagacugaaccacaugggcaucugcagcugcggccuguacaagcaccccggcgugcccgugaaguggaagagaugaggacuagucccuguucccagagcccacuuuuuuuucuuuuuuugaaauaaaauagccugucuuucagaucuaaaaaaaaaaaaaaaaaaaaaaaaaaaaaaaaaaaaaaaaaaaaaaaaaaaaaaaaaaaaaaaaaaaaaaaaaaaaaaaaaaaaaaaaaaaaaaaaaaaa

SEQ ID NO: 40782 - RNA, 1740 nt, Artificial Sequence
  mRNA product Design a-2 (A100) comprising derived and/or modified sequence from LASV(ISTH2010-NIG-2012;Clade II)__AIT17482__GPCmut12 (opt4)
aggagaguccgcucagccagguugcagaagcggcuuagcguguguccuaaucuucucucugcguguagguaggccugugccgcaaacaagcuuaccaugggccagaucaucaccuucuuccaggaggugccccacgugaucgaggaggugaugaacaucgugcugaucgcccugagccugcuggccauccugaagggcaucuacaacguggccaccugcggccuguucggccuggugagcuuccugcugcugugcggcagaagcugcagcaccaccuacaagggcguguacgagcugcagacccuggagcuggacauggccagccugaacaugugcaugccccugagcugcaccaagaacaacagccaccacuacaucauggugggcaacgagaccggccuggagcugacccugaccaacaccagcaucaucaaccacaaguucugcaaccugagcgacgcccacaagaagaaccuguacgaccacgcccugaugagcaucaucagcaccuuccaccugagcauccccaacuucaaccaguacgaggccaugagcugcgacuucaacggcggcaagaucagcgugcaguacaaccugagccacgccuacgccguggacgccgccaaccacugcggcaccaucgccaacggcgugcugcagaccuucaugagaauggccuggggcggcagcuacaucgcccuggacagcggcaagggcagcugggacugcaucaugaccagcuaccaguaccugaucauccagaacaucaccugggaggaccacugccaguucagcagacccagccccaucggcuaccugggccugcugagccagagaaccagagacaucuacaucagcagaagacugcugggcaccuucaccuggacccugagcgacagcgagggcaacgagacccccggcggcuacugccugaccagauggaugcugaucgaggccgagcugaagugcuucggcaacaccgccguggccaagugcaacgagaagcacgacgaggaguucugcgacaugcugagacuguucgacuucugcaagcaggccaucagaagacugaagaccgaggcccagaugagcauccagcugaucaacaaggccgugaacgcccugaucaacgaccagcugaucaugaagaaccaccugagagacaucaugggcauccccuacugcaacuacagcaaguacugcuaccugaaccacaccgugaccggcaagaccagccugcccagaugcugccuggugagcaacggcagcuaccugaacgagacccacuucagcgacgacaucgagcagcaggccgacaacaugaucaccgagcugcugcagaaggaguacaucgacagacagggcaagaccccccugggccugguggaccuguucguguucagcaccagcuucuaccugaucagcaucuuccugcaccuggugaagauccccacccacagacacguggugggcaagcccugccccaagccccacagacugaaccacaugggcaucugcagcugcggccuguacaagcaccccggcgugcccgugaaguggaagagaugaggacuagucccuguucccagagcccacuuuuuuuucuuuuuuugaaauaaaauagccugucuuucagaucuaaaaaaaaaaaaaaaaaaaaaaaaaaaaaaaaaaaaaaaaaaaaaaaaaaaaaaaaaaaaaaaaaaaaaaaaaaaaaaaaaaaaaaaaaaaaaaaaaaaa

SEQ ID NO: 40783 - RNA, 1740 nt, Artificial Sequence
  mRNA product Design a-2 (A100) comprising derived and/or modified sequence from LASV(Lassa virus/H.sapiens-wt/NGA/2015/ISTH_0543;Clade II)__AVO03639__GPCmut12 (opt4)
aggagaguccgcucagccagguugcagaagcggcuuagcguguguccuaaucuucucucugcguguagguaggccugugccgcaaacaagcuuaccaugggccagaucaucaccuucuuccaggaggugccccacgugaucgaggaggugaugaacaucgugcugaucgcccugagccugcuggccauccugaagggcaucuacaacguggccaccugcggccuguucggccuggugagcuuccugcugcugugcggcagaagcugcagcaccaccuacaagggcguguacgagcugcagacccuggagcuggacauggccaaccugaacaugugcaugccccugagcugcaccaagaacaacagccaccacuacaucauggugggcaacgagaccggccuggagcugacccugaccaacaccagcaucaucaaccacaaguucugcaaccugagcgacgcccacaagaagaaccuguacgaccacgcccugaugagcaucaucagcaccuuccaccugagcauccccaacuucaaccaguacgaggccaugagcugcgacuucaacggcggcaagaucagcgugcaguacaaccugagccacaccuacgccguggacgccgccaaccacugcggcaccaucgccaacggcgugcugcagaccuucaugagaauggccuggggcggcagcuacaucgcccuggacagcggcaagggcagcugggacugcaucaugaccagcuaccaguaccuggugauccagaacaccaccugggaggaccacugccaguucagcagacccagccccaucggcuaccugggccugcugagccagagaaccagagacaucuacaucagcagaagacugcugggcaccuucaccuggacccugagcgacagcgagggcaacgagacccccggcggcuacugccugaccagauggaugcugaucgaggccgagcugaagugcuucggcaacaccgccguggccaagugcaacgagaagcacgacgaggaguucugcgacaugcugagacuguucgacuucugcaagcaggccaucagaagacugaagaccgaggcccagaugagcauccagcugaucaacaaggccgugaacgcccugaucaacgaccagcugaucaugaagaaccaccugagagacaucaugggcauccccuacugcaacuacagcaaguacugcuaccugaaccacaccgugaccggcaagaccagccugcccagaugcugccuggugagcaacggcagcuaccugaacgagacccacuucagcgacgacaucgagcagcaggccgacaacaugaucaccgagcugcugcagaaggaguacaucgacagacagggcaagaccccccugggccugguggaccuguucguguucagcaccagcuucuaccugaucagcaucuuccugcaccuggugaagauccccacccacagacacaucaccggcaagcccugccccaagccccacagacugaaccacaugggcaucugcagcugcggccuguacaagcaccccggcgugcccgugaaguggaagagaugaggacuagucccuguucccagagcccacuuuuuuuucuuuuuuugaaauaaaauagccugucuuucagaucuaaaaaaaaaaaaaaaaaaaaaaaaaaaaaaaaaaaaaaaaaaaaaaaaaaaaaaaaaaaaaaaaaaaaaaaaaaaaaaaaaaaaaaaaaaaaaaaaaaaa

SEQ ID NO: 40784 - RNA, 1740 nt, Artificial Sequence
  mRNA product Design a-2 (A100) comprising derived and/or modified sequence from LASV(Lassa virus/H.sapiens-wt/NGA/2016/ISTH_0009;Clade II)__AVO03571__GPCmut12 (opt4)
aggagaguccgcucagccagguugcagaagcggcuuagcguguguccuaaucuucucucugcguguagguaggccugugccgcaaacaagcuuaccaugggccagaucaucaccuucuuccaggaggugccccacgugaucgaggaggugaugaacaucgugcugaucgcccugagccugcuggccauccugaagggcaucuacaacguggccaccugcggccugcugggccuggugagcuuccugcugcugugcggcagaagcugcagcaccaccuacaagggcguguacgagcugcagacccuggagcuggacauggccagccugaacaugugcaugccccugagcugcaccaagaacaacagccaccacuacaucauggugggcaacgagaccggccuggagcugacccugaccaacaccagcaucaucaaccacaaguucugcaaccugagcgacgcccacaagaagaaccuguacgaccacgcccugaugagcaucaucagcaccuuccaccugagcauccccaacuucaaccaguacgaggccaugagcugcgacuucaacggcggcagaaucagcgugcaguacaaccugagccacagcuacgccguggacgccgccaaccacugcggcaccaucgccaacggcgugcugcagaccuucaugagaauggccuggggcggcagcuacaucgcccuggacagcggcaagggcagcugggacugcaucaugaccagcuaccaguaccugaucauccagaacaccaccugggaggaccacugccaguucagcagacccagccccaucggcuaccugggccugcugagccagagaaccagagacaucuacaucagcagaagacugcugggcaccuucaccuggacccugagcgacagcgagggcaacgagacccccggcggcuacugccugaccagauggaugcugaucgaggccgagcugaagugcuucggcaacaccgccguggccaagugcaacgagaagcacgacgaggaguucugcgacaugcugagacuguucgacuucugcaagcaggccaucagaagacugaagaccgaggcccagaugagcauccagcugaucaacaaggccgugaacgcccugaucaacgaccagcugaucaugaagaaccaccugagagacaucaugggcauccccuacugcaacuacagcaaguacugcuaccugaaccacaccgugaccggcaagaccagccugcccagaugcugccuggugagcaacggcagcuaccugaacgagacccacuucagcgacgacaucgagcagcaggccgacaacaugaucaccgagcugcugcagaaggaguacaucgacagacagggcaagaccccccugggccugguggaccuguucguguucagcaccagcuucuaccugaucagcaucuuccugcaccuggugaagauccccacccacagacacaucaccggcaagcccugccccaagccccacagacugaaccacaugggcaucugcagcugcggccuguacaaccaccccggcgugcccgugaaguggaagagaugaggacuagucccuguucccagagcccacuuuuuuuucuuuuuuugaaauaaaauagccugucuuucagaucuaaaaaaaaaaaaaaaaaaaaaaaaaaaaaaaaaaaaaaaaaaaaaaaaaaaaaaaaaaaaaaaaaaaaaaaaaaaaaaaaaaaaaaaaaaaaaaaaaaaa

SEQ ID NO: 40785 - RNA, 1740 nt, Artificial Sequence
  mRNA product Design a-2 (A100) comprising derived and/or modified sequence from LASV(Lassa virus/H.sapiens-wt/NGA/2016/ISTH_0017;Clade II)__AVO03567__GPCmut12 (opt4)
aggagaguccgcucagccagguugcagaagcggcuuagcguguguccuaaucuucucucugcguguagguaggccugugccgcaaacaagcuuaccaugggccagaucaucaccuucuuccaggaggugccccacgugaucgaggaggugaugaacaucgugcugaucgcccugagccugcuggccauccugaagggcaucuacaacguggccaccugcggccuguucggccuggugagcuuccugcugcugugcggcagaagcugcagcaccaccuacaagggcguguacgagcugcagacccuggagcuggacauggccagccugaacaugugcaugccccugagcugcaccaagaacaacagccaccacuacaucauggugggcaacgagaccggccuggagcugacccugaccaacaccagcaucaucaaccacaaguucugcaaccugagcgacgcccacaagaagaaccuguacgaccacgcccugaugagcaucaucagcaccuuccaccugagcauccccaacuucaaccaguacgaggccaugagcugcgacuucaacggcggcaagaucagcgugcaguacaaccugagccacaccuacgccaucgacgccgccaaccacugcggcaccaucgccaacggcgugcugcagaccuucaugagaauggccuggggcggcagcuacaucgcccuggacagcggcaagggcagcugggacugcaucaugaccagcuaccaguaccugaucauccagaacaccaccugggaggaccacugccaguucagcagacccagccccaucggcuaccugggccugcugagccagagaaccagagacaucuacaucagcagaagacugcugggcaccuucaccuggacccugagcgacagcgagggcaacgagacccccggcggcuacugccugaccagauggaugcugaucgaggccgagcugaagugcuucggcaacaccgccguggccaagugcaacgagaagcacgacgaggaguucugcgacaugcugagacuguucgacuucugcaagcaggccaucagaagacugaagaccgaggcccagaugagcauccagcugaucaacaaggccgugaacgcccugaucaacgaccagcugaucaugaagaaccaccugagagacaucaugggcauccccuacugcaacuacagcaaguacugcuaccugaaccacaccgugaccggcaagaccagccugcccagaugcugccuggugagcaacggcagcuaccugaacgagacccacuucagcgacgacaucgagcagcaggccgacaacaugaucaccgagcugcugcagaaggaguacauggacagacagggcaagaccccccugggccugguggaccuguucguguucagcaccagcuucuaccugaucagcaucuuccugcaccuggugagaauccccacccacagacacgugaucggcaagcccugccccaagccccacagacugaaccacaugggcaucugcagcugcggccuguacaagcaccccggcgugcccgugaaguggaagagaugaggacuagucccuguucccagagcccacuuuuuuuucuuuuuuugaaauaaaauagccugucuuucagaucuaaaaaaaaaaaaaaaaaaaaaaaaaaaaaaaaaaaaaaaaaaaaaaaaaaaaaaaaaaaaaaaaaaaaaaaaaaaaaaaaaaaaaaaaaaaaaaaaaaaa

SEQ ID NO: 40786 - RNA, 1740 nt, Artificial Sequence
  mRNA product Design a-2 (A100) comprising derived and/or modified sequence from LASV(Lassa virus/H.sapiens-wt/NGA/2018/ISTH_0959;Clade II)__AVV65099__GPCmut12 (opt4)
aggagaguccgcucagccagguugcagaagcggcuuagcguguguccuaaucuucucucugcguguagguaggccugugccgcaaacaagcuuaccaugggccagaucaucaccuucuuccaggaggugccccacgugaucgaggaggugaugaacaucgugcugaucgcccugagccugcuggccauccugaagggcaucuacaacguggugaccugcggccuguucggccuggugagcuuccugcugcugugcggcagaagcugcagcaccaccuacaagggcguguacgagcugcagacccuggagcuggacauggccagccugaacaugugcaugccccugagcugcaccaagaacaacagccaccacuacaucauggugggcaacgagaccggccuggagcugacccugaccaacaccagcaucaucaaccacaaguucugcaaccugagcgacgcccacaagaagaaccuguacgaccacgcccugaugagcaucaucagcaccuuccaccugagcauccccaacuucaaccaguacgaggccaugagcugcgacuucaacggcggcaagaucagcgugcaguacaaccugagccacgccuacgccaucgacgccgccaaccacugcggcaccaucgccaacggcgugcugcagaccuucaugagaauggccuggggcggcagcuacaucgcccuggacagcggcaagggcagcugggacugcaucaugaccagcuaccaguaccugaucauccagaacaccaccugggaggaccacugccaguucagcagacccagccccaucggcuaccugggccugcugagccagagaaccagagacaucuacaucagcagaagacugcugggcaccuucaccuggacccugagcgacagcgagggcaacgagacccccggcggcuacugccugaccagauggaugcugaucgaggccgagcugaagugcuucggcaacaccgccguggccaagugcaacgagaagcacgacgaggaguucugcgacaugcugagacuguucgacuucugcaagcaggccaucagaagacugaagaccgaggcccagaugagcauccagcugaucaacaaggccgugaacgcccugaucaacgaccagcugaucaugaagaaccaccugagagacaucaugggcauccccuacugcaacuacagcaaguacugcuaccugaaccacaccgugaccggcaagaccagccugcccagaugcugccuggugagcaacggcagcuaccugaacgagacccacuucagcgacgacaucgagcagcaggccgacaacaugaucaccgagcugcugcagaaggaguacaucgacagacagggcaagaccccccugggccugguggaccuguucguguucagcaccagcuucuaccugaucagcaucuuccugcaccuggugaagauccccacccacagacacgugaucggcaagcccugccccaagccccacagacugaaccacaugggcaucugcagcugcggccuguacaagcaccccggcgugcccgugaaguggaagagaugaggacuagucccuguucccagagcccacuuuuuuuucuuuuuuugaaauaaaauagccugucuuucagaucuaaaaaaaaaaaaaaaaaaaaaaaaaaaaaaaaaaaaaaaaaaaaaaaaaaaaaaaaaaaaaaaaaaaaaaaaaaaaaaaaaaaaaaaaaaaaaaaaaaaa

SEQ ID NO: 40787 - RNA, 1740 nt, Artificial Sequence
  mRNA product Design a-2 (A100) comprising derived and/or modified sequence from LASV(LASV003-NIG-2008;Clade II)__AIT17580__GPCmut12 (opt4)
aggagaguccgcucagccagguugcagaagcggcuuagcguguguccuaaucuucucucugcguguagguaggccugugccgcaaacaagcuuaccaugggccagaucaucaccuucuuccaggaggugccccacgugaucgaggaggugaugaacaucgugcugaucgcccugagccugcuggccauccugaagggcaucuacaacguggccaccugcggccuguucggccuggugagcuuccugcugcugugcggcagaagcugcagcaccaccuacaagggcguguacgagcugcagacccuggagcuggacauggccagccugaacaugugcaugccccugagcugcaccaagaacaacagccaccacuacaucauggugggcaacgagaccggccuggagcugacccugaccaacaccagcaucaucaaccacaaguucugcaaccugagcgacgcccacaagaagaaccuguacgaccacgcccugaugagcaucaucagcaccuuccaccugagcauccccaacuucaaccaguacgaggccaugagcugcgacuucaacggcggcaagaucagcgugcaguacaaccugagccacaccuacgccguggacgccgccaaccacugcggcaccaucgccaacggcgugcugcagaccuucaugagaauggccuggggcggcagcuacaucgcccuggacagcggcaagggcagcugggacugcaucaugaccagcuaccaguaccugaucauccagaacaccaccugggaggaccacugccaguucagcagacccagccccaucggcuaccugggccugcugagccagagaaccagagacaucuacaucagcagaagacugcugggcaccuucaccuggacccugagcgacagcgagagcaacgagacccccggcggcuacugccugaccagauggaugcugaucgaggccgagcugaagugcuucggcaacaccgccguggccaagugcaacgagaagcacgacgaggaguucugcgacaugcugagacuguucgacuucugcaagcaggccaucagaagacugaaggccgaggcccagaugagcauccagcugaucaacaaggccgugaacgcccugaucaacgaccagcugaucaugaagaaccaccugagagacaucaugggcauccccuacugcaacuacagcaaguacugcuaccugaaccacaccgugaccggcagaaccagccugcccagaugcugccuggugagcaacggcagcuaccugaacgagacccacuucagcgacgacaucgagcagcaggccgacaacaugaucaccgagcugcugcagaaggaguacauggacagacagggcaagaccccccugggccugguggaccuguucguguucagcaccagcuucuaccugaucagcaucuuccugcaccuggugaagauccccacccacagacacgugaucggcaagcccugccccaagccccacagacugaaccacaugggcaucugcagcugcggccuguacaagcaccccggcgugcccgugaaguggaagagaugaggacuagucccuguucccagagcccacuuuuuuuucuuuuuuugaaauaaaauagccugucuuucagaucuaaaaaaaaaaaaaaaaaaaaaaaaaaaaaaaaaaaaaaaaaaaaaaaaaaaaaaaaaaaaaaaaaaaaaaaaaaaaaaaaaaaaaaaaaaaaaaaaaaaa

SEQ ID NO: 40788 - RNA, 1740 nt, Artificial Sequence
  mRNA product Design a-2 (A100) comprising derived and/or modified sequence from LASV(LASV035-NIG-2009;Clade II)__AIT17588__GPCmut12 (opt4)
aggagaguccgcucagccagguugcagaagcggcuuagcguguguccuaaucuucucucugcguguagguaggccugugccgcaaacaagcuuaccaugggccagaucaucaccuucuuccaggaggugccccacgugaucgaggaggugaugaacaucgugcugaucgcccugagccugcuggccauccugaagggcaucuacaacguggccaccugcggccuguucggccuggugagcuuccugcugcugugcggcagaagcugcagcaccaccuacaagggcguguacgagcugcagacccuggagcuggacauggccagccugaacaugugcaugccccugagcugcaccaagaacaacagccaccacuacaucauggugggcaacgagaccggccuggagcugacccugaccaacaccagcaucaucaaccacaaguucugcaaccugagcgacgcccacaagaagaaccuguacgaccacgcccugaugagcaucaucagcaccuuccaccugagcauccccaacuucaaccaguacgaggccaugagcugcgacuucaacggcggcaagaucagcgugcaguacaaccugagccacgccuacgccguggacgccgccaaccacugcggcaccaucgccaacggcgugcugcagaccuucaugagaauggccuggggcggcagcuacaucgcccuggacagcggcaagggcagcugggacugcaucaugaccagcuaccaguaccugaucauccagaacaccaccugggaggaccacugccaguucagcagacccagccccaucggcuaccugggccugcugagccagagaaccagagacaucuacaucagcagaagacugcugggcaccuucaccuggacccugagcgacagcgagggcaacgagacccccggcggcuacugccugaccagauggaugcugaucgaggccgagcugaagugcuucggcaacaccgccguggccaagugcaacgagaagcacgacgaggaguucugcgacaugcugagacuguucgacuucugcaagcaggccaucagaagacugaaggccgaggcccagaugagcauccagcugaucaacaaggccgugaacgcccugaucaacgaccagcugaucaugaagaaccaccugagagacaucaugggcauccccuacugcaacuacagcaaguacugcuaccugaaccacaccgugaccggcaagaccagccugcccagaugcugccuggugagcaacggcagcuaccugaacgagacccacuucagcgacgacaucgagcagcaggccgacaacaugaucaccgagcugcugcagaaggaguacaucgacagacagggcaagaccccccugggccugguggaccuguucguguucagcaccagcuucuaccugaucagcaucuuccugcaccuggugaagauccccacccacagacacgugaucggcaagcccugccccaagccccacagacugaaccacaugggcaucugcagcugcggccuguacaagcaccccggcgugcccgugaaguggaagagaugaggacuagucccuguucccagagcccacuuuuuuuucuuuuuuugaaauaaaauagccugucuuucagaucuaaaaaaaaaaaaaaaaaaaaaaaaaaaaaaaaaaaaaaaaaaaaaaaaaaaaaaaaaaaaaaaaaaaaaaaaaaaaaaaaaaaaaaaaaaaaaaaaaaaa

SEQ ID NO: 40789 - RNA, 1740 nt, Artificial Sequence
  mRNA product Design a-2 (A100) comprising derived and/or modified sequence from LASV(LASV1000-NIG-2009;Clade II)__AIT17782__GPCmut12 (opt4)
aggagaguccgcucagccagguugcagaagcggcuuagcguguguccuaaucuucucucugcguguagguaggccugugccgcaaacaagcuuaccaugggccagaucaucaccuucuuccaggaggugccccacgugaucgaggaggugaugaacaucgugcugaucgcccugagccugcuggccauccugaagggcaucuacaacguggccaccugcggccuguucggccuggugagcuuccugcugcugugcggcagaagcugcagcaccaccuacaagggcguguacgagcugcagacccuggagcuggacauggccagccugaacaugugcaugccccugagcugcaccaagaacaacagccaccacuacaucauggugggcaacgagaccggccuggagcugacccugaccaacaccagcaucaucaaccacaaguucugcaaccugagcgacgcccacaagaagaaccuguacgaccacgcccugaugagcaucaucagcaccuuccaccugagcauccccaacuucaaccaguacgaggccaugagcugcgacuucaacggcggcaagaucagcgugcaguacaaccugagccacaccuacgccguggacgccgccaaccacugcggcaccaucgccaacggcgugcugcagaccuucaugagaauggccuggggcggcagcuacaucgcccuggacagcggcaagggcagcugggacugcaucaugaccagcuaccaguaccugaucauccagaacaccaccugggaggaccacugccaguucagcagacccagccccaucggcuaccugggccugcugagccagagaaccagagacaucuacaucagcagaagacugcugggcaccuucaccuggacccugagcgacagcgagggcaacgagacccccggcggcuacugccugaccagauggaugcugaucgaggccgagcugaagugcuucggcaacaccgccguggccaagugcaacgagaagcacgacgaggaguucugcgacaugcugagacuguucgacuucugcaagcaggccaucaagagacugaagaccgaggcccagaugagcauccagcugaucaacaaggccgugaacgcccugaucaacgaccagcugaucaugaagaaccaccugagagacaucaugggcauccccuacugcaacuacagcaaguacugcuaccugaaccacaccgugaccggcaagaccagccugcccagaugcugccuggugagcaacggcagcuaccugaacgagacccacuucagcgacgacaucgagcagcaggccgacaacaugaucaccgagcugcugcagaaggaguacaucgacagacagggcaagaccccccugggccugguggaccuguucguguucagcaccagcuucuaccugaucagcaucuuccugcaccuggugaagauccccacccacagacacguggugggcaagcccugccccaagccccacagacugaaccacaugggcaucugcagcugcggccuguacaagcaccccggcgugcccgugaaguggaagagaugaggacuagucccuguucccagagcccacuuuuuuuucuuuuuuugaaauaaaauagccugucuuucagaucuaaaaaaaaaaaaaaaaaaaaaaaaaaaaaaaaaaaaaaaaaaaaaaaaaaaaaaaaaaaaaaaaaaaaaaaaaaaaaaaaaaaaaaaaaaaaaaaaaaaa

SEQ ID NO: 40790 - RNA, 1740 nt, Artificial Sequence
  mRNA product Design a-2 (A100) comprising derived and/or modified sequence from LASV(LASV221-NIG-2010;Clade II)__AIT17624__GPCmut12 (opt4)
aggagaguccgcucagccagguugcagaagcggcuuagcguguguccuaaucuucucucugcguguagguaggccugugccgcaaacaagcuuaccaugggccagaucaucaccuucuuccaggaggugccccacgugaucgaggaggugaugaacaucgugcugaucgcccugagccugcuggccauccugaagggcaucuacaacguggccaccugcggccuguucggccuggugagcuuccugcugcugugcggcagaagcugcagcaccaccuacaagggcguguacgagcugcagacccuggagcuggacauggccagccugaacaugugcaugccccugagcugcaccaagaacaacagccaccacuacaucauggugggcaacgagaccggccuggagcugacccugaccaacaccagcaucaucaaccacaaguucugcaaccugagcgacgcccacaagaagaaccuguacgaccacgcccugaugagcaucaucagcaccuuccaccugagcauccccaacuucaaccaguacgaggccaugagcugcgacuucaacggcggcaagaucagcgugcaguacaaccugagccacaccuacgccaucgacgccgccaaccacugcggcaccaucgccaacggcgugcugcagaccuucaugagaauggccuggggcggcagcuacaucgcccuggacagcggcaagggcagcugggacugcaucaugaccagcuaccaguaccugaucauccagaacaccaccugggaggaccacugccaguucagcagacccagccccaucggcuaccugggccugcugagccagagaaccagagacaucuacaucagcagaagacugcugggcaccuucaccuggacccugagcgacagcgagggcaacgagacccccggcggcuacugccugaccagauggaugcugaucgaggccgagcugaagugcuucggcaacaccgccguggccaagugcaacgagaagcacgacgaggaguucugcgacaugcugagacuguucgacuucugcaagcaggccaucagaagacugaagaccgaggcccagaugagcauccagcugaucaacaaggccgugaacgcccugaucaacgaccagcugaucaugaagaaccaccugagagacaucaugggcauccccuacugcaacuacagcaaguacugcuaccugaaccacaccgugaccggcaagaccagccugcccagaugcugccuggugagcaacggcagcuaccugaacgagacccacuucagcgacgacaucgagcagcaggccgacaacaugaucaccgagaugcugcagaaggaguacauggacagacagggcaagaccccccugggccugguggaccuguucguguucagcaccagcuucuaccugaucagcaucuuccugcaccuggugaagauccccacccacagacacgugaucggcaagcccugccccaagccccacagacugaaccacaugggcaucugcagcugcggccuguacaagcaccccggcgugcccgugaaguggaagagaugaggacuagucccuguucccagagcccacuuuuuuuucuuuuuuugaaauaaaauagccugucuuucagaucuaaaaaaaaaaaaaaaaaaaaaaaaaaaaaaaaaaaaaaaaaaaaaaaaaaaaaaaaaaaaaaaaaaaaaaaaaaaaaaaaaaaaaaaaaaaaaaaaaaaa

SEQ ID NO: 40791 - RNA, 1740 nt, Artificial Sequence
  mRNA product Design a-2 (A100) comprising derived and/or modified sequence from LASV(LASV237-NIG-2010;Clade II)__AIT17638__GPCmut12 (opt4)
aggagaguccgcucagccagguugcagaagcggcuuagcguguguccuaaucuucucucugcguguagguaggccugugccgcaaacaagcuuaccaugggccagaucaucaccuucuuccaggaggugccccacgugaucgaggaggugaugaacaucgugcugaucgcccugagccugcuggccauccugaagggcaucuacaacguggccaccugcggccuguucggccuggugagcuuccugcugcugugcggcagaagcugcagcaccaccuacaagggcguguacgagcugcagacccuggagcuggacauggccagccugaacaugugcaugccccugagcugcaccaagaacaacagccaccacuacaucauggugggcaacgagaccggccuggagcugacccugaccaacaccagcaucaucaaccacaaguucugcaaccugagcgacgcccacaagaaggaccuguacgaccacgcccugaugagcaucaucagcaccuuccaccugagcauccccaacuucaaccaguacgaggccaugagcugcgacuucaacggcggcaagaucagcgugcaguacaaccugagccacaccuacgccguggacgccgccaaccacugcggcaccaucgccaacggcgugcugcagaccuucaugagaauggccuggggcggcagcuacaucgcccuggacagcggcaagggcagcugggacugcaucaugaccagcuaccaguaccugaucauccagaacaccaccugggaggaccacugccaguucagcagacccagccccaucggcuaccugggccugcugagccagagaaccagagacaucuacaucagcagaagacugcugggcaccuucaccuggacccugagcgacagcgagggcaacgagacccccggcggcuacugccugaccagauggaugcugaucgaggccgagcugaagugcuucggcaacaccgccguggccaagugcaacgagaagcacgacgaggaguucugcgacaugcugagacuguucgacuucugcaagcaggccaucagaagacugaagaccgaggcccagaugagcauccagcugaucaacaaggccgugaacgcccugaucaacgaccagcugaucaugaagaaccaccugagagacaucaugggcauccccuacugcaacuacagcaaguacugcuaccugaaccacaccgugaccggcaagaccagccugcccagaugcugccuggugagcaacggcagcuaccugaacgagacccacuucagcgacgacaucgagcagcaggccgacaacaugaucaccgagcugcugcagaaggaguacauggacagacagggcaagaccccccugggccugguggaccuguucguguucagcaccagcuucuaccugaucagcaucuuccugcaccugaucaagauccccacccacagacacaucaccggcaagcccugccccaagccccacagacugaaccacaugggcaucugcagcugcggccuguacaagcaccccggcgugcccgugaaguggaagagaugaggacuagucccuguucccagagcccacuuuuuuuucuuuuuuugaaauaaaauagccugucuuucagaucuaaaaaaaaaaaaaaaaaaaaaaaaaaaaaaaaaaaaaaaaaaaaaaaaaaaaaaaaaaaaaaaaaaaaaaaaaaaaaaaaaaaaaaaaaaaaaaaaaaaa

SEQ ID NO: 40792 - RNA, 1740 nt, Artificial Sequence
  mRNA product Design a-2 (A100) comprising derived and/or modified sequence from LASV(LASV253-NIG-2011;Clade II)__AIT17670__GPCmut12 (opt4)
aggagaguccgcucagccagguugcagaagcggcuuagcguguguccuaaucuucucucugcguguagguaggccugugccgcaaacaagcuuaccaugggccagaucaucaccuucuuccaggaggugccccacgugaucgaggaggugaugaacaucgugcugaucgcccugagccugcuggccauccugaagggcaucuacaacguggccaccugcggccuguucggccuggugagcuuccugcugcugugcggcagaagcugcagcaccaccuacaagggcguguacgagcugcagacccuggagcuggacauggccagccugaacaugugcaugccccugagcugcaccaagaacaacagccaccacuacaucauggugggcaacgagaccggccuggagcugacccugaccaacaccagcaucaucaaccacaaguucugcaaccugagcgacgcccacaagaagaaccuguacgaccacgcccugaugagcaucaucagcaccuuccaccugagcauccccaacuucaaccaguacgaggccaugagcugcgacuucaacggcggcaagaucagcgugcaguacaaccugagccacaccuacgccguggacgccgccaaccacugcggcaccaucgccaacggcgugcugcagaccuucaugagaauggccuggggcggcagcuacaucgcccuggacagcggcaagggcagcugggacugcaucaugaccagcuaccaguaccugaucauccagaacaccaccugggaggaccacugccaguucagcagacccagccccaucggcuaccugggccugcugagccagagaaccagagacaucuacaucagcagaagacugcugggcaccuucaccuggacccugagcgacagcgagggcaacgagacccccggcggcuacugccugaccagauggaugcugaucgaggccgagcugaagugcuucggcaacaccgccguggccaagugcaacgagaagcacgacgaggaguucugcgacaugcugagacuguucgacuucugcaagcaggccaucagaagacugaaggccgaggcccagaugagcauccagcugaucaacaaggccgugaacgcccugaucaacgaccagcugaucaugaagaaccaccugagagacaucaugggcauccccuacugcaacuacagcaaguacugcuaccugaaccacaccgugaccggcagaaccagccugcccagaugcugccuggugagcaacggcagcuaccugaacgagacccacuucagcgacgacaucgagcagcaggccgacaacaugaucaccgagcugcugcagaaggaguacaucgacagacagggcaagaccccccugggccugguggaccuguucguguucagcaccagcuucuaccugaucagcaucuuccugcaccuggugaagauccccacccacagacacaucaucggcaagcccugccccaagccccacagacugaaccacaugggcaucugcagcugcggccuguacaagcaccccggcgugcccgugaaguggaagagaugaggacuagucccuguucccagagcccacuuuuuuuucuuuuuuugaaauaaaauagccugucuuucagaucuaaaaaaaaaaaaaaaaaaaaaaaaaaaaaaaaaaaaaaaaaaaaaaaaaaaaaaaaaaaaaaaaaaaaaaaaaaaaaaaaaaaaaaaaaaaaaaaaaaaa

SEQ ID NO: 40793 - RNA, 1740 nt, Artificial Sequence
  mRNA product Design a-2 (A100) comprising derived and/or modified sequence from LASV(LASV254-NIG-2011;Clade II)__AIT17674__GPCmut12 (opt4)
aggagaguccgcucagccagguugcagaagcggcuuagcguguguccuaaucuucucucugcguguagguaggccugugccgcaaacaagcuuaccaugggccagaucaucaccuucuuccaggaggugccccacgugaucgaggaggugaugaacaucgugcugaucgcccugagccugcuggccauccugaagggcaucuacaacguggccaccugcggccuguucggccuggugagcuuccugcugcugugcggcagaagcugcagcaccaccuacaagggcguguacgagcugcagacccuggagcuggacaugaccaaccugaacaugugcaugccccugagcugcaccaagaacaacagccaccacuacaucauggugggcaacgagaccggccuggagcugacccugaccaacaccagcaucaucaaccacaaguucugcaaccugagcgacgcccacaagaagaaccuguacaaccacgcccugaugagcaucaucagcaccuuccaccugagcauccccaacuucaaccaguacgaggccaugagcugcgacuucaacggcggcaagaucagcgugcaguacaaccugagccacagcuacgccguggacgccgccaaccacugcggcaccaucgccaacggcgugcugcagaccuucaugagaauggccuggggcggcagcuacaucgcccuggacagcggcaagggcaacugggacugcaucaugaccagcuaccaguaccugaucauccagaacaccaccugggaggaccacugccaguucagcagacccagccccaucggcuaccugggccugcugagccagagaaccagagacaucuacaucagcagaagacugcugggcaccuucaccuggacccugagcgacagcgagggcaacgagacccccggcggcuacugccugaccagauggaugcugaucgaggccgagcugaagugcuucggcaacaccgccguggccaagugcaacgagaagcacgacgaggaguucugcgacaugcugagacuguucgacuucugcaagcaggccaucagaagacugaagaccgaggcccaggccaacauccagcugaucaacaaggccgugaacgcccugaucaacgaccagcugaucaugaagaaccaccugagagacaucaugggcauccccuacugcaacuacagcaaguacugcuaccugaaccacaccgugaccggcaagaccagccugcccagaugcugccuggugagcaacggcagcuaccugaacgagacccacuucagcgacgacaucgagcagcaggccgacaacaugaucaccgagcugcugcagaaggaguacauggacagacagggcaagaccccccugggccugguggaccuguucguguucagcaccagcuucuaccugaucagcaucuuccugcaccuggugaagauccccacccacagacacgugaucggcaagcccugccccaagccccacagacugaaccacaugggcaucugcagcugcggccuguacaagcaccccggcgugcccgugaaguggaagagaugaggacuagucccuguucccagagcccacuuuuuuuucuuuuuuugaaauaaaauagccugucuuucagaucuaaaaaaaaaaaaaaaaaaaaaaaaaaaaaaaaaaaaaaaaaaaaaaaaaaaaaaaaaaaaaaaaaaaaaaaaaaaaaaaaaaaaaaaaaaaaaaaaaaaa

SEQ ID NO: 40794 - RNA, 1740 nt, Artificial Sequence
  mRNA product Design a-2 (A100) comprising derived and/or modified sequence from LASV(Nig08-A19;Clade III)__ADU56618__GPCmut12 (opt4)
aggagaguccgcucagccagguugcagaagcggcuuagcguguguccuaaucuucucucugcguguagguaggccugugccgcaaacaagcuuaccaugggccagaucgugaccuucuuccaggaggugccccacgugaucgaggaggugaugaacaucgugcugaucgcccugagcauccuggccauccugaagggccuguacaacaucgccaccugcggccugaucggccuggugaccuuccugcugcugagcggcagaagcugcagcaugaccuacaagggcguguacgagcugcagacccuggagcugaacaugaacacccugaacaugugcaugccccugagcugcaccaagaacaacagccaccacuacaucauggugggcaacgagaccggccuggagcugacccugaccaacaccagccugcugcaccacaaguucugcaaccugagcgacgcccacaagaagaaccuguacgaccacacccugaugagcaucaucagcaccuuccaccugagcauccccaacuucaaccaguacgaggccaugagcugcgacuucaacggcggcaagaucaccgugcaguacaaccugagccacagcuacgccaucgacgccgccaaccacugcggcaccguggccaacggcgugcugcagaccuucaugagaauggccuggggcggcagcuacaucgcccuggacagcggcagaggcaagugggacugcaucaugaccagcuaccaguaccugaucauccagaacaccaccugggaggaccacugccaguucagcagacccagccccaucggcuaccugggccugcugagccagagaaccagagacaucuacaucagcagaagacugcugggcaccuucaccuggacccugagcgacagcgagggcaacgagacccccggcggcuacugccugaccagauggaugcugaucgaggccgagcugaagugcuucggcaacaccgccguggccaagugcaacgagaagcacgacgaggaguucugcgacaugcugagacuguucgacuucugcaagcaggccaucagaagacugaaggccgaggcccagaugagcauccagcugaucaacaaggccgugaacgcccugaucaacgaccagcugaucaugaagaaccaccugagagacaucaugggcauccccuacugcaacuacagcaaguacugcuaccugaaccacaccagcaccggcagaaccagccugcccagaugcugccuggugagcaacggcagcuaccugaacgagacccacuucagcgacgacaucgagcagcaggccgacaacaugaucaccgagaugcugcagaaggaguaccuggacagacagggcaagaccccccugggccugguggaccuguucguguucagcaccagcuucuaccugaucagcaucuuccugcaccuggugaagauccccacccacagacacaucgugggcaagcccugccccaagccccacagacugaaccacaugggcaucugcagcugcggccuguacaagcagcccggcgugcccgugagauggaagagaugaggacuagucccuguucccagagcccacuuuuuuuucuuuuuuugaaauaaaauagccugucuuucagaucuaaaaaaaaaaaaaaaaaaaaaaaaaaaaaaaaaaaaaaaaaaaaaaaaaaaaaaaaaaaaaaaaaaaaaaaaaaaaaaaaaaaaaaaaaaaaaaaaaaaa

SEQ ID NO: 40795 - RNA, 1743 nt, Artificial Sequence
  mRNA product Design a-2 (A100) comprising derived and/or modified sequence from LASV(G1180-SLE-2010;Clade IV)__AIT17168__GPCmut12 (opt4)
aggagaguccgcucagccagguugcagaagcggcuuagcguguguccuaaucuucucucugcguguagguaggccugugccgcaaacaagcuuaccaugggccagaucgugaccuucuuccaggaggugccccacgugaucgaggaggugaugaacaucgugcugaucgcccugagcauccuggccgugcugaagggccuguacaacuucgccaccugcggccuggugggccugcugaccuuccugcugcugugcggcagaagcugcaccgccagcagauacaagggcguguacgagcugcagacccuggagcugaacauggagacccugaacaugugcaugccccugagcugcaccaagaacaacagccaccacuacaucauggugggcaacgagaccggccuggagcugacccugaccaacaccagcaucaucaaccacaaguucugcaaccugagcgacgcccacaagaagaaccuguacgaccacgcccugaugagcaucaucagcaccuuccaccugagcauccccaacuucaaccaguacgaggccaugagcugcgacuucaacggcggcaagaucagcgugcaguacaaccugagccacagcuacgccggcgacgccgccaaccacugcggcaccguggccaacggcgugcugcagaccuucaugagaauggccuggggcggcagcuacaucgcccuggacagcggccacggcagcugggacugcaucaugaccagcuaccaguaccugaucauccagaacaccaccugggaggaccacugccaguucagcagacccagccccaucggcuaccugggccugcugagccagagaaccagagacaucuacaucagcagaagacugcugggcaccuucaccuggacccugagcgacagcgagggcaaggacacccccggcggcuacugccugaccagauggaugcugaucgaggccgagcugaagugcuucggcaacaccgccguggccaagugcaacgagaagcacgacgaggaguucugcgacaugcugagacuguucgacuucugcaagcaggccauccagagacugaaggccgaggcccagaugagcauccagcugaucaacaaggccgugaacgcccugaucaacgaccagcugaucaugaagaaccaccugagagacaucaugggcauccccuacugcaacuacagcaaguacugcuaccugaaccacaccaccaccggcaagaccagccugcccaagugcugccuggugagcaacggcagcuaccugaacgagacccacuucagcgacgacaucgagcagcaggccgacaacaugaucaccgagaugcugcagaaggaguacauggagagacagggcaagaccccccugggccugguggaccuguucguguucagcaccagcuucuaccugaucagcaucuuccugcaccuggugaagauccccacccacagacacaucgugggcaagagcugccccaagccccacagacugaaccacaugggcaucugcagcugcggccuguacaagcagcccggcgugcccgugaaguggaagagaugaggacuagucccuguucccagagcccacuuuuuuuucuuuuuuugaaauaaaauagccugucuuucagaucuaaaaaaaaaaaaaaaaaaaaaaaaaaaaaaaaaaaaaaaaaaaaaaaaaaaaaaaaaaaaaaaaaaaaaaaaaaaaaaaaaaaaaaaaaaaaaaaaaaaa

SEQ ID NO: 40796 - RNA, 1743 nt, Artificial Sequence
  mRNA product Design a-2 (A100) comprising derived and/or modified sequence from LASV(G1442-SLE-2011;Clade IV)__AIT17180__GPCmut12 (opt4)
aggagaguccgcucagccagguugcagaagcggcuuagcguguguccuaaucuucucucugcguguagguaggccugugccgcaaacaagcuuaccaugggccagaucgugaccuucuuccaggaggugccccacgugaucgaggaggugaugaacaucgugcugaucgcccugagcauccuggccgugcugaagggccuguacaacguggccaccugcggccugaucggccuggugaccuuccugcugcugugcggcagaagcugcaccaccacccuguacaagggcguguacgagcugcagacccuggagcugaacauggagacccugaacaugugcaugccccugagcugcaccaagaacaacagccaccacuacaucagagugggcaacgagaccggccuggagcugacccugaccaacaccagcaucaucaaccacaaguucugcaaccugagcgacgcccacaagaagaaccuguacgaccacgcccugaugagcaucaucagcaccuuccaccugagcauccccaacuucaaccaguacgaggccaugagcugcgacuucaacggcggcaagaucagcgugcaguacaaccugagccacagcuacgccggcgacgccgccaaccacugcggcaccguggccaacggcgugcugcagaccuucaugagaauggccuggggcggcagcuacaucgcccuggacagcggcagaggcaacugggacugcaucaugaccagcuaccaguaccugaucauccagaacaccaccugggacgaccacugccaguucagcagacccagccccaucggcuaccugggccugcugagccagagaaccagagacguguacaucagcagaagacugcugggcaccuucaccuggacccugagcgacagcgagggcaaggacacccccggcggcuacugccugaccagauggaugcugaucgaggccgagcugaagugcuucggcaacaccgccguggccaagugcaacgagaagcacgacgaggaguucugcgacaugcugagacuguucgacuucugcaagcaggccauccagagacugaaggccgaggcccagaugagcauccagcugaucaacaaggccgugaacgcccugaucaacgaccagcugaucaugaagaaccaccugagagacaucaugggcauccccuacugcaacuacagcaaguacugcuaccugaacaacaccgccaccggcaagaccagccugcccaagugcugccugaucagcaacggcagcuaccugaacgagacccacuucagcgacgacaucgagcaggaggccgacaacaugaucaccgagaugcugcagaaggaguacauggagagacagggcaagaccccccugggccugguggaccuguucguguucagcaccagcuucuaccugaucagcaucuuccugcaccuggugaagauccccacccacagacacaucgugggcaagagcugccccaagccccacagacugaaccacaugggcaucugcagcugcggccuguacaagcagcccggcgugcccgugagauggaagagaugaggacuagucccuguucccagagcccacuuuuuuuucuuuuuuugaaauaaaauagccugucuuucagaucuaaaaaaaaaaaaaaaaaaaaaaaaaaaaaaaaaaaaaaaaaaaaaaaaaaaaaaaaaaaaaaaaaaaaaaaaaaaaaaaaaaaaaaaaaaaaaaaaaaaa

SEQ ID NO: 40797 - RNA, 1743 nt, Artificial Sequence
  mRNA product Design a-2 (A100) comprising derived and/or modified sequence from LASV(G3010-SLE-2013;Clade IV)__AIT17344__GPCmut12 (opt4)
aggagaguccgcucagccagguugcagaagcggcuuagcguguguccuaaucuucucucugcguguagguaggccugugccgcaaacaagcuuaccaugggccagaucgugaccuucuuccaggaggugccccacgugaucgaggaggugaugaacaucgugcugaucgcccugagcauccuggccgugcugaagggccuguacaacuucgccaccugcggccuggugggccuggugaccuuccugcugcugugcggcagaagcugcaccaccagccuguacaagggcguguacgagcugcagacccuggagcugaacauggagacccugaacaugugcaugccccugagcugcaccaagaacaacagccaccacuacaucauggugggcaacgagaccggccuggagcugacccugaccaacaccagcaucaucaaccacaaguucugcaaccugagcgacgcccacaagaagaaccuguacaaccacgcccugaugagcaucaucagcaccuuccaccugagcauccccaacuucaaccaguacgaggccaugagcugcgacuucaacggcggcaagaucagcgugcaguacaaccugagccacagcuacgccggcgacgccgccagccacugcggcaccguggccaacggcgugcugcagaccuucaugagaauggccuggggcggcagcuacaucgcccuggacagcggcuacggcaagugggacugcaucaugaccagcuaccaguaccugaucauccagaacaccaccugggaggaccacugccaguucagcagacccagccccaucggcuaccugggccugcugagccagagaaccagagacaucuacaucagcagaagacugcugggcaccuucaccuggacccugagcgacagcgagggcaaggacacccccggcggcuacugccugaccagauggaugcugaucgaggccgagcugaagugcuucggcaacaccgccguggccaagugcaacgagaagcacgacgaggaguucugcgacaugcugagacuguucgacuucugcaagcaggccauccagagacugaagaccgaggcccagaugagcauccagcugaucaacaaggccgugaacgcccugaucaacgaccagcugaucaugaagaaccaccugagagacaucaugggcauccccuacugcaacuacagcaaguacugcuaccugaaccacaccaccaccggcaagaccagccugcccaagugcugccuggugagcaacggcagcuaccugaacgagacccacuucagcgacgacaucgagcagcaggccgacaacaugaucaccgagaugcugcagaaggaguacauggagagacagggcaagaccccccugggccugguggaccuguucguguucagcaccagcuucuaccugaucagcaucuuccugcaccuggugaagauccccacccacagacacaucgugggcaagagcugccccaagccccacagacugaaccacaugggcaucugcagcugcggccuguacaagcagcccggcgugcccgugagauggaagagaugaggacuagucccuguucccagagcccacuuuuuuuucuuuuuuugaaauaaaauagccugucuuucagaucuaaaaaaaaaaaaaaaaaaaaaaaaaaaaaaaaaaaaaaaaaaaaaaaaaaaaaaaaaaaaaaaaaaaaaaaaaaaaaaaaaaaaaaaaaaaaaaaaaaaa

SEQ ID NO: 40798 - RNA, 1743 nt, Artificial Sequence
  mRNA product Design a-2 (A100) comprising derived and/or modified sequence from LASV(G502-SLE-2009;Clade IV)__AIT17126__GPCmut12 (opt4)
aggagaguccgcucagccagguugcagaagcggcuuagcguguguccuaaucuucucucugcguguagguaggccugugccgcaaacaagcuuaccaugggccagaucgugaccuucuuccaggaggugccccacgugaucgaggaggugaugaacaucgugcugaucgcccugagcauccuggccgugcugaagggccuguacaacuucgccaccugcggccuggugggccugcugaccuuccugcugcugugcggcagaagcugcaccaccggccuguacaagggcguguacgagcugcagacccuggagcugaacauggagacccugaacaugugcaugccccugagcugcaccaagaacaacagccaccacuacaucauggugggcaacgagaccggccuggagcugacccugaccaacaccagcaucaucaaccacaaguucugcaaccugagcgacgcccacaagaagaaccuguacgaccacgcccugaugagcaucaucagcaccuuccaccugagcauccccaacuucaaccaguacgaggccaugagcugcgacuucaacggcggcaagaucagcgugcaguacaaccugagccacagcuacgccggcgacgccgccgaccacugcggcaccguggccaacggcgugcugcagaccuucaugagaauggccuggggcggcagcuacaucgcccuggacagcggcagaggcagaugggacugcaucaugaccagcuaccaguaccugaucauccagaacaccaccugggaggaccacugccaguucagcagacccagccccaucggcuaccugggccugcugagccagagaaccagagacaucuacaucagcagaagacugcugggcaccuucaccuggacccugagcgacagcgagggcaaggacacccccggcggcuacugccugaccagauggaugcugaucgaggccgagcugaagugcuucggcaacaccgccguggccaagugcaacgagaagcacgacgaggaguucugcgacaugcugagacuguucgacuucugcaagcaggccauccagagacugaaggccgaggcccagaugagcauccagcugaucaacaaggccgugaacgcccugaucaacgaccagcuggugaugaagaaccaccugagagacaucaugggcauccccuacugcaacuacagcagauacugcuaccugaaccacaccaccaccggcagaaccagccugcccaagugcugccuggugagcaacggcagcuaccugaacgagacccacuucagcgacgacaucgagcagcaggccgacaacaugaucaccgagaugcugcagaaggaguacauggagagacagggcaagaccccccugggccugguggaccuguucguguucagcaccagcuucuaccugaucagcaucuuccugcaccuggugaagauccccacccacagacacaucgugggcaagagcugccccaagccccacagacugaaccacaugggcaucugcagcugcggccuguacaagcagcccggcgugcccgugaaguggaagagaugaggacuagucccuguucccagagcccacuuuuuuuucuuuuuuugaaauaaaauagccugucuuucagaucuaaaaaaaaaaaaaaaaaaaaaaaaaaaaaaaaaaaaaaaaaaaaaaaaaaaaaaaaaaaaaaaaaaaaaaaaaaaaaaaaaaaaaaaaaaaaaaaaaaaa

SEQ ID NO: 40799 - RNA, 1743 nt, Artificial Sequence
  mRNA product Design a-2 (A100) comprising derived and/or modified sequence from LASV(G733-SLE-2010;Clade IV)__AIT17154__GPCmut12 (opt4)
aggagaguccgcucagccagguugcagaagcggcuuagcguguguccuaaucuucucucugcguguagguaggccugugccgcaaacaagcuuaccaugggccagaucgugaccuucuuccaggaggugccccacgugaucgaggaggugaugaacaucgugcugaucgcccugagcauccuggccgugcugaagggccuguacaacuucgccaccugcggcaucgugggccuggugagcuuccugcugcugugcggcagaagcugcaccaccagccuguacaagggcguguacgagcugcagacccuggagcugaacauggagacccugaacaugugcaugccccugagcugcaccaagaacaacagccaccacuacaucauggugggcaacgagaccggccuggagcugacccugaccaacaccagcaucaucaaccacaaguucugcaaccugagcgacgcccacaagaagaaccuguacgaccacgcccugaugagcaucaucagcaccuuccaccugagcauccccaacuucaaccaguacgaggccaugagcugcgacuucaacggcggcaagaucagcgugcaguacaaccugagccacagcuacgccggcgacgccgccaaccacugcggcaccaucgccaacggcgugcugcagaccuucaugagaauggccuggggcggcagcuacaucgcccuggacagcggcagagacagaugggacugcaucaugaccagcuaccaguaccugaucauccagaacaccaccugggaggaccacugccaguucagcagacccagccccaucggcuaccugggccugcugagccagagaaccagagacaucuacaucagcagaagacugcugggcaccuucaccuggacccugagcgacagcgagggcaaggacacccccggcggcuacugccugaccagauggaugcugaucgaggccgagcugaagugcuucggcaacaccgccguggccaagugcaacgagaagcacgacgaggaguucugcgacaugcugagacuguucgacuucugcaagcaggccauccagagacugaaggccgaggcccagaugagcauccagcugaucaacaaggccgugaacgcccugaucaacgaccagcugaucaugaagaaccaccugagagacaucaugggcauccccuacugcaacuacagcaaguacugcuaccugaaccacaccaccaccggcaagaccagccugcccaagugcugccuggugagcaacggcagcuaccugaacgagacccacuucagcgacgacaucgagcagcaggccgacaacaugaucaccgagaugcugcagaaggaguacauggagagacagggcaagaccccccugggccugguggaccuguucguguucagcaccagcuucuaccugaucagcaucuuccugcaccuggugaagauccccacccacagacacguggugggcaagagcugccccaagccccacagacugaaccacaugggcaucugcagcugcggccuguacggccagcccggcgugcccgugaaguggaagagaugaggacuagucccuguucccagagcccacuuuuuuuucuuuuuuugaaauaaaauagccugucuuucagaucuaaaaaaaaaaaaaaaaaaaaaaaaaaaaaaaaaaaaaaaaaaaaaaaaaaaaaaaaaaaaaaaaaaaaaaaaaaaaaaaaaaaaaaaaaaaaaaaaaaaa

SEQ ID NO: 40800 - RNA, 1743 nt, Artificial Sequence
  mRNA product Design a-2 (A100) comprising derived and/or modified sequence from MOPV/LASV reassortant(IGS-1;Clade IV)__AFY05576__GPCmut12 (opt4)
aggagaguccgcucagccagguugcagaagcggcuuagcguguguccuaaucuucucucugcguguagguaggccugugccgcaaacaagcuuaccaugggccagaucgugaccuucuuccaggaggugccccacgugaucgaggaggugaugaacaucgugcugaucgcccugagcgugcuggccgugcugaagggccuguacaacuucgccaccugcggccuggugggccuggugaccuuccugcugcugugcggcagaagcugcaccaccagccuguacaagggcguguacgagcugcagacccuggagcugaacauggagacccugaacaugugcaugccccugagcugcaccaagaacaacagccaccacuacaucauggugggcaacgagaccggccuggagcugacccugaccaacaccagcaucaucaaccacaaguucugcaaccugagcgacgcccacaagaagaaccuguacgaccacgcccugaugagcaucaucagcaccuuccaccugagcauccccaacuucaaccaguacgaggccaugagcugcgacuucaacggcggcaagaucagcgugcaguacaaccugagccacagcuacgccggcgacgccgccaaccacugcggcaccguggccaacggcgugcugcagaccuucaugagaauggccuggggcggcagcuacaucgcccuggacagcggcagaggcaacugggacugcaucaugaccagcuaccaguaccugaucauccagaacaccaccugggaggaccacugccaguucagcagacccagccccaucggcuaccugggccugcugagccagagaaccagagacaucuacaucagcagaagacugcugggcaccuucaccuggacccugagcgacagcgagggcgaggacacccccggcggcuacugccugaccagauggaugcugaucgaggccgagcugaagugcuucggcaacaccgccguggccaagugcaacgagaagcacgacgaggaguucugcgacaugcugagacuguucgacuucugcaagcaggccauccagagacugaaggccgaggcccagaugagcauccagcugaucaacaaggccgugaacgcccugaucaacgaccagcugaucaugaagaaccaccugagagacaucaugggcauccccuacugcaacuacagcaaguacugcuaccugaaccacaccaccaccggcagaaccagccugcccaagugcugccuggugagcaacggcagcuaccugaacgagacccacuucagcgacgacaucgagcagcaggccgacaacaugaucaccgagaugcugcagaaggaguacauggagagacagggcaagaccccccugggccugguggaccuguucguguucagcaccagcuucuaccugaucagcaucuuccugcaccuggugaagauccccacccacagacacaucgugggcaagagcugccccaagccccacagacugaaccacaugggcaucugcagcugcggccuguacaagcagcccggcgugcccgugaaguggaagagaugaggacuagucccuguucccagagcccacuuuuuuuucuuuuuuugaaauaaaauagccugucuuucagaucuaaaaaaaaaaaaaaaaaaaaaaaaaaaaaaaaaaaaaaaaaaaaaaaaaaaaaaaaaaaaaaaaaaaaaaaaaaaaaaaaaaaaaaaaaaaaaaaaaaaa

SEQ ID NO: 40801 - RNA, 1743 nt, Artificial Sequence
  mRNA product Design a-2 (A100) comprising derived and/or modified sequence from LASV(LM765-SLE-2012;Clade IV)__AIT17814__GPCmut12 (opt4)
aggagaguccgcucagccagguugcagaagcggcuuagcguguguccuaaucuucucucugcguguagguaggccugugccgcaaacaagcuuaccaugggccagaucgugaccuucuuccaggaggugccccacgugaucgaggaggugaugaacaucgugcugaucgcccugagcauccuggccgugcugaagggccuguacaacuucgccaccugcggccuggugggccuggugaccuuccugcugcugugcggcagaagcugcaccaccagccuguacaagggcguguacgagcugcagacccuggagcugaacauggagacccugaacaugugcaugccccugagcugcaccaagaacaacagccaccacuacaucauggugggcaacgagaccggccuggagcugacccugaccaacaccagcaucaucgaccacaaguucugcaaccugagcgacgcccacagaaagaaccuguacgaccacgcccugaugagcaucaucagcaccuuccaccugagcauccccaacuucaaccaguacgaggccaugagcugcgacuucaacggcggcaagaucagcgugcaguacaaccugagccacagcuacgccaaggacgccgccgaccacugcggcaccguggccaacggcgugcugcagaccuucaugagaauggccuggggcggcagcuacaucgcccuggacagcggcagaggcagaugggacugcaucaugaccagcuaccaguaccugaucauccagaacaccaccugggaggaccacugccaguucagcagacccagccccaucggcuaccugggccugcugagccagagaaccagagacaucuacaucagcagaagacugcugggcaccuucaccuggacccugagcgacagcgagggcaaggacacccccggcggcuacugccugaccagauggaugcugaucgaggccgagcugaagugcuucggcaacaccgccguggccaagugcaacgagaagcacgacgaggaguucugcgacaugcugagacuguucgacuucugcaagcaggccauccagagacugaaggccgaggcccagaugagcauccagcugaucaacaaggccgugaacgcccugaucaacgaccagcugaucaugaagaaccaccugagagacaucaugggcauccccuacugcaacuacagcaaguacugcuaccugaaccacaccaccaccggcaagaccagccugcccaagugcugccuggugagcaacggcagcuaccugaacgagacccacuucagcgacgacaucgagcagcaggccgacaacaugaucaccgagaugcugcagaaggaguacauggagagacagggcaagaccccccugggccugguggaccuguucguguucagcaccagcuucuaccugaucagcaucuuccugcaccuggugaagauccccacccacagacacaucgugggcaagcccugccccaagccccacagacugaaccacaugggcaucugcagcugcggccuguacaagcagcccggcgugcccgugaaguggaagagaugaggacuagucccuguucccagagcccacuuuuuuuucuuuuuuugaaauaaaauagccugucuuucagaucuaaaaaaaaaaaaaaaaaaaaaaaaaaaaaaaaaaaaaaaaaaaaaaaaaaaaaaaaaaaaaaaaaaaaaaaaaaaaaaaaaaaaaaaaaaaaaaaaaaaa

SEQ ID NO: 40802 - RNA, 1743 nt, Artificial Sequence
  mRNA product Design a-2 (A100) comprising derived and/or modified sequence from LASV(LM776-SLE-2012;Clade IV)__AIT17824__GPCmut12 (opt4)
aggagaguccgcucagccagguugcagaagcggcuuagcguguguccuaaucuucucucugcguguagguaggccugugccgcaaacaagcuuaccaugggccagaucgugaccuucuuccaggaggugccccacgugaucgaggaggugaugaacaucgugcugaucgcccugagcauccuggccgugcugaagggccuguacaacuucgccaccugcggccuggugggccuggugaccuuccugcugcugugcggcagaagcugcaccaccagcguguacaagggcguguacgagcugcagacccuggagcugaacauggagacccugaacaugugcaugccccugagcugcaccaagaacaacagccaccacuacaucauggugggcaacgagaccggccuggagcugacccugaccaacaccagcaucaucaaccacaaguucugcaaccugagcgacgcccacaagaagaaccuguacgaccacgcccugaugagcaucaucagcaccuuccaccugagcauccccaacuucaaccaguacgaggccaugagcugcgacuucaacggcggcaagaucagcgugcaguacaaccugagccacagcuacgccggcgacgccgccaaccacugcggcaccguggccaacggcgugcugcagaccuucaugagaauggccuggggcggcagcuacaucgcccuggacagcggccacggcaagugggacugcaucaugaccagcuaccaguaccugaucauccagaacaccaccugggaggaccacugccaguucagcagacccagccccaucggcuaccugggccugcugagccagagaaccagagacaucuacaucagcagaagacugcugggcaccuucaccuggacccugagcgacagcgagggcaaggacacccccggcggcuacugccugaccagauggaugcugaucgaggccgagcugaagugcuucggcaacaccgccguggccaagugcaacgagaagcacgacgaggaguucugcgacaugcugagacuguucgacuucugcaagcaggccauccagagacugaaggccgaggcccagaugagcauccagcugaucaacaaggccgugaacgcccugaucaacgaccagcugaucaugaagaaccaccugagagacaucaugggcauccccuacugcaacuacagcaaguacugcuaccugaaccacaccaccaccggcaagaccagccugcccaagugcugccuggugagcaacggcagcuaccugaacgagacccacuucagcgacgacaucgagcagcaggccgacaacaugaucaccgagaugcugcagaaggaguacauggagagacagggcaagaccccccugggccugguggaccuguucguguucagcaccagcuucuaccugaucagcaucuuccugcaccuggugaagauccccacccacagacacaucgugggcaagagcugccccaagccccacagacugaaccacaugggcaucugcagcugcggccuguacaagcagcccggcgugcccgugagauggaagagaugaggacuagucccuguucccagagcccacuuuuuuuucuuuuuuugaaauaaaauagccugucuuucagaucuaaaaaaaaaaaaaaaaaaaaaaaaaaaaaaaaaaaaaaaaaaaaaaaaaaaaaaaaaaaaaaaaaaaaaaaaaaaaaaaaaaaaaaaaaaaaaaaaaaaa

SEQ ID NO: 40803 - RNA, 1743 nt, Artificial Sequence
  mRNA product Design a-2 (A100) comprising derived and/or modified sequence from LASV(Mad39;Clade IV)__ANH09722__GPCmut12 (opt4)
aggagaguccgcucagccagguugcagaagcggcuuagcguguguccuaaucuucucucugcguguagguaggccugugccgcaaacaagcuuaccaugggccagaucgugaccuucuuccaggaggugccccacgugaucgaggaggugaugaacaucgugcugaucgcccugagcauccuggccgugcugaagggccuguacaacguggccaccugcggccugaucggccuggugaccuuccugcugcugugcggcagaagcugcaccaccacccuguacaagggcguguacgagcugcaggcccuggagcugaacauggagacccugaacaugugcaugccccugagcugcaccaagaacaacagccaccacuacaucagagugggcaacgagaccggccuggagcugacccugaccaacaccagccugaucaaccacaaguucugcaaccugagcgacgcccacaagaagaaccuguacgaccacgcccugaugagcaucaucagcaccuuccaccugagcauccccaacuucaaccaguacgaggccaugagcugcgacuucaacgacggcaagaucagcgugcaguacaaccugagccacaccuacgccggcgacaccgccaaccacugcggcaccguggccaacggcgugcugcagaccuucaugagaauggccuggggcggcagcuacaucgcccuggacagcggcagaggcggcugggacugcaucaugaccagcuaccaguaccugaucauccagaacaccaccugggaggaccacugccaguucagcagacccagccccaucggcuaccugggccugcugagccagagaaccagagacaucuacaucagcagaagacugcugggcaccuucaccuggacccugagcgacagcgagggcaaggacacccccggcggcuacugccugaccagauggaugcugaucgaggccgagcugaagugcuucggcaacaccgccguggccaagugcaacgagaagcacgacgaggaguucugcgacaugcugagacuguucgacuucugcaagcaggccauccagagacugaaggccgaggcccagaugagcauccagcugaucaacaaggccgugaacgcccugaucaacgaccagcugaucaugaagaaccaccugagagacaucaugggcauccccuacugcaacuacagcaaguacugcuaccugaaccacaccgugaccggcaagaccagccugcccaagugcugccuggugagcaacggcagcuaccugaacgagacccacuucagcgacgacaucgagcagcaggccgacaacaugaucaccgagaugcugcagaaggaguacauggagagacagggcaagaccccccugggccugguggaccuguucguguucagcaccagcuucuaccugaucagcaucuuccugcaccuggugaagauccccacccacagacacguggugggcaagcccugccccaagccccacagacugaaccacaugggcaucugcagcugcggcuucuacaagcagcccggcgugcccgugagauggaagagaugaggacuagucccuguucccagagcccacuuuuuuuucuuuuuuugaaauaaaauagccugucuuucagaucuaaaaaaaaaaaaaaaaaaaaaaaaaaaaaaaaaaaaaaaaaaaaaaaaaaaaaaaaaaaaaaaaaaaaaaaaaaaaaaaaaaaaaaaaaaaaaaaaaaaa

SEQ ID NO: 40804 - RNA, 1743 nt, Artificial Sequence
  mRNA product Design a-2 (A100) comprising derived and/or modified sequence from LASV(Z0947-SLE-2011;Clade IV)__AIT17840__GPCmut12 (opt4)
aggagaguccgcucagccagguugcagaagcggcuuagcguguguccuaaucuucucucugcguguagguaggccugugccgcaaacaagcuuaccaugggccagaucgugaccuucuuccaggaggugccccacgugaucgaggaggugaugaacaucgugcugaucgcccugagcauccuggccgugcugaagggccuguacaacuucgccaccugcggccuggugggccuggugaccuuccugcugcugugcggcagaagcugcaccaucagccuguacaagggcguguacgagcugcagacccuggagcugaacauggagacccugaacaugugcaugccccugagcugcaccaagaacaacagccaccacuacaucauggugggcaacgagaccggccuggagcugacccugaccaacaccagcaucaucaaccacaaguucugcaaccugagcgacgcccacaagaagaaccuguacgaccacgcccugaugagcaucaucagcaccuuccaccugagcauccccaacuucaaccaguacgaggccaugagcugcgacuucaacggcggcaagaucagcgugcaguacaaccugagccacagcuacgccggcgacgccgccaaccacugcggcaccguggccaacggcgugcugcagaccuucaugagaauggccuggggcggcagcuacaucgcccuggacagcggcagagacagaugggacugcaucaugaccagcuaccaguaccugaucauccagaacaccaccugggaggaccacugccaguucagcagacccagccccaucggcuaccugggccugcugagccagagaaccagagacaucuacaucagcagaagacugcugggcaccuucaccuggacccugagcgacagcgagggcaaggacacccccggcggcuacugccugaccagauggaugcugaucgaggccgagcugaagugcuucggcaacaccgccguggccaagugcaacgagaagcacgacgaggaguucugcgacaugcugagacuguucgacuucugcaagcaggccauccagagacugaaggccgaggcccagaugagcauccagcugaucaacaaggccgugaacgcccugaucaacgaccagcugaucaugaagaaccaccugagagacaucaugggcauccccuacugcaacuacagcaaguacugcuaccugaaccacaccaccaccggcaagaccagccugcccaagugcugccuggugagcaacggcagcuaccugaacgagacccacuucagcgacgacaucgagcagcaggccgacaacaugaucaccgagaugcugcagaaggaguacauggagagacagggcaagaccccccugggccugguggaccuguucguguucagcaccagcuucuaccugaucagcaucuuccugcaccuggugaagauccccacccacagacacaucgugggcaagcccugccccaagccccacagacugaaccacaugggcaucugcagcugcggccuguacaagcagcccggcgugcccgugaaguggaagagaugaggacuagucccuguucccagagcccacuuuuuuuucuuuuuuugaaauaaaauagccugucuuucagaucuaaaaaaaaaaaaaaaaaaaaaaaaaaaaaaaaaaaaaaaaaaaaaaaaaaaaaaaaaaaaaaaaaaaaaaaaaaaaaaaaaaaaaaaaaaaaaaaaaaaa

SEQ ID NO: 40805 - RNA, 1743 nt, Artificial Sequence
  mRNA product Design a-2 (A100) comprising derived and/or modified sequence from LASV(Josiah;Clade IV)__NP_694870__GPCmut12 (opt5)
aggagaguccgcucagccagguugcagaagcggcuuagcguguguccuaaucuucucucugcguguagguaggccugugccgcaaacaagcuuaccaugggccagaucgugaccuucuuucaagaggucccccacguuauugaagaggugaugaacaucgugcugauugcccucagcguccuggcugugcuuaaggggcuguacaauuucgccacaugcggacucguuggccuggugacguuucuucugcucugugggagauccugcaccacaucucuguauaaaggagucuacgaacugcagacccucgagcugaacauggaaacacuuaauauguguaugccucugagcugcaccaagaacaauucccaucacuauaucauggugggcaacgagacagggcucgagcugacccuuacgaauaccucuauuaucaaccauaaauucuguaaucugagcgacgcgcacaagaaaaaccucuacgaucaugcucugauguccaucauuucuacauuucaccugagcaucccgaauuucaaccaguaugaagccauguccugcgacuuuaauggaggcaagauuagcguucaguacaaccucucucacuccuaugccggcgaugcugccaaucauugugggaccguggcuaacggaguccugcaaacauucaugcggauggccuggggcgggagcuacaucgcgcuugacucuggacgcggcaacugggauugcauuaugaccuccuaccaguaucugaucauucagaauacgacaugggaggaccacugucaguuuagcagacccucuccuaucggguaccucggacugcuuucccaacggacccgcgauaucuauauuagcagacggcugcucggcacauucaccuggacccuguccgacucugaaggcaaggauacacccgggggauacugccugacgcgcuggaugcucaucgaggccgagcugaaauguuuuggcaacaccgcuguggccaagugcaaugaaaaacaugacgaggaguucugcgauaugcuuagacuguuugacuucuguaagcaggcuauucagcggcucaaagccgaagcgcagaugagcauccaacugauuaacaaggccgugaaugcucuuaucaacgaucagcugaucaugaagaaucaccuccgcgacauuauggggaucccuuauugcaacuacuccaaauauuguuaccugaaucacacaaccacaggaagaaccagccugcccaagugcugucucgucucuaacggcuccuaccugaaugaaacgcauuucagcgacgauauugagcagcaagccgacaacaugaucacagagaugcuucagaaagaauauauggagcggcaggggaagaccccucugggacucguugaucuguuuguguucucuaccagcuuuuaccugauuuccaucuuccuucaccucgugaaaaucccgacacaucgccacauugucggcaagucuugccccaaaccucauagacugaaucacaugggcaucuguagcugcgggcuguauaagcagcccggagugccuguuaaguggaaacggugaggacuagucccuguucccagagcccacuuuuuuuucuuuuuuugaaauaaaauagccugucuuucagaucuaaaaaaaaaaaaaaaaaaaaaaaaaaaaaaaaaaaaaaaaaaaaaaaaaaaaaaaaaaaaaaaaaaaaaaaaaaaaaaaaaaaaaaaaaaaaaaaaaaaa

SEQ ID NO: 40806 - RNA, 1740 nt, Artificial Sequence
  mRNA product Design a-2 (A100) comprising derived and/or modified sequence from LASV(LP;Clade I)__AAF86701__GPCmut12 (opt5)
aggagaguccgcucagccagguugcagaagcggcuuagcguguguccuaaucuucucucugcguguagguaggccugugccgcaaacaagcuuaccaugggccagaucauuaccuucuuucaagaggugccccacgucaucgaagagguuaugaacauugugcugaucgcccucagccugcuugcuauucugaaggggcucuacaauaucgccacaugcggaaucauuggccugguggcguuccuuuuucugugugggaaauccugcucucucacgcugaagggaggcuaugaacugcagacccucgagcugaacauggaaacacuuaauauguguaugccucugagcugcaccaaaaacuccucucaucacuacaucagagucgggaaugagacaggacucgagcugacccuuacaaacaccagcauuaucaaucauaaguucuguaaccuguccgacgcucacaaaaagaaucucuaugaucaugcccugaugucuauuaucagcacguuucaccuguccauuccgaacuucaaucaguacgaagccaugagcugcgacuuuaacggcggcaagaucucugugcaguauaaucucucccacagcuacgcuggggaugccgcugagcauuguggaaccguugccaacggcgugcugcaaacauucaugcggauggcguggggagggcgcuauaucgcccuugacucuggcaaagggaauugggauugcauuaugaccuccuaccaguaccugaucauucagaacacaaccugggaagaccacugucaguuuagcagacccucuccuaucggauaucucggccugcuuucccaacggacgcgcgauauuuacaucagcagacggcugcucggcacauucaccuggacacuguccgacucugaggggaacgagacccccggaggcuauugccugacccgcuggaugcucaucgaagcugagcugaaguguuuugggaauacagccgucgcuaaaugcaacgaaaagcaugaugaggaguucugcgacaugcuuagacuguuugauuucuguaaacaggccauucggcgccucaaggcggaagcccagaugagcauccagcugauuaauaaggcugugaacgcccuuaucaaugaccaacugauuaugaaaaaccaccucagagauaucaugggaaucccuuacugcaauuauuccaaguacuguuaucugaaccacacgagcucuggccggaccucccugcccaaaugcugucucauuagcaaugggucuuaccugaacgagacacaguucagcgacgacaucgaacagcaagcugauaauaugauuaccgagaugcuucagaaggaauacaucgagcgccagggaaaaacaccucugggccucguugacauuuuuaucuucuccaccucuuuuuaucugauuagcaucuuccugcaucuuaucaagauuccgacgcacagacauaucgugggcaaacccugcccuaagccccaccggcucaaccauaugggggucuguuccugcggacuguacaagcacccuggcgugcccacaaaauggaagcgcugaggacuagucccuguucccagagcccacuuuuuuuucuuuuuuugaaauaaaauagccugucuuucagaucuaaaaaaaaaaaaaaaaaaaaaaaaaaaaaaaaaaaaaaaaaaaaaaaaaaaaaaaaaaaaaaaaaaaaaaaaaaaaaaaaaaaaaaaaaaaaaaaaaaaa

SEQ ID NO: 40807 - RNA, 1740 nt, Artificial Sequence
  mRNA product Design a-2 (A100) comprising derived and/or modified sequence from LASV(803213;Clade II)__AAF86703__GPCmut12 (opt5)
aggagaguccgcucagccagguugcagaagcggcuuagcguguguccuaaucuucucucugcguguagguaggccugugccgcaaacaagcuuaccaugggccagaucauuaccuucuuucaagaggugccccacgucaucgaagagguuaugaacauugugcugaucgcccucagccugcuugcuauucugaaggggaucuacaauguggccacaugcggacucuucggccugaucuccuuucuucugcucugugggagaucuugcagcgucacguauaaaggaguguacgaacugcagacccuggagcucaacauggcgaaucugaacauguguaugccucuuuccugcacaaagaauaacucucaucacuauauuaugguuggcaaugaaaccgggcuggagcucacacugaccaacacaagcaucauuaaucauaaauucuguaaccuuuccgacgcucacaagaaaaaucuguacgaucaugcccucaugucuaucauuagcaccuuucaccuguccaucccgaacuucaaucaguaugaggccaugagcugcgacuuuaacggaggcaagauuucugugcaguacaaucugucccacagcuucgcugucgaugccgcuaaccauuguggcacgaucgccaacggggugcuccaaaccuuuaugcggauggcguggggaggcucuuauaucgcccuggacuccgggaagggaaauugggauugcauuaugacaagcuaccaguaccuuaucauucagaacaccacaugggaagaccacugucaguucucucgccccuccccuaucggcuaucuggggcuccugagccaaagaacccgggauauuuacaucucccgcagacuucugggaacguuuacauggacccucucugacagcgagggcaaugaagcucccggcggguauugccugacacgguggaugcugaucgaggccgagcucaaauguuucggaaacaccgcuguugccaagugcaaugaaaaacaugaugaggaauuuugcgacaugcugcgccuuuucgauuucuguaagcaggcgauuaaaagacugaagaccgaggcccagauguccauccagcucauuaacaaggcugugaaugcccugaucaacgaccaacuuauuaugaaaaaucaucugcgggauaucaugggcaucccuuacugcaacuauagccgcuacuguuaucucaaucacacagucacggggaagaccucucugcccagaugcugucugguguccaacggaagcuaccucaaugaaacacacuuuucugacgacauugagcagcaggcugauaacaugaucaccgagaugcugcaaaaagaauacauggaccggcagggcaagacaccucuugggcugguggaucucuucgucuuuagcaccuccuucuaucugauuucuaucuuucugcaccuuguuaaaauuccgacgcaucgccacaucgugggaaagcccugcccuaaaccccauagacucaaucacaugggcauuuguagcugcggccuguacaagcacccuggggugcccgucaaguggaaacggugaggacuagucccuguucccagagcccacuuuuuuuucuuuuuuugaaauaaaauagccugucuuucagaucuaaaaaaaaaaaaaaaaaaaaaaaaaaaaaaaaaaaaaaaaaaaaaaaaaaaaaaaaaaaaaaaaaaaaaaaaaaaaaaaaaaaaaaaaaaaaaaaaaaaa

SEQ ID NO: 40808 - RNA, 1740 nt, Artificial Sequence
  mRNA product Design a-2 (A100) comprising derived and/or modified sequence from LASV(GA391;Clade III)__CAA36645__GPCmut12 (opt5)
aggagaguccgcucagccagguugcagaagcggcuuagcguguguccuaaucuucucucugcguguagguaggccugugccgcaaacaagcuuaccaugggccagaucgugaccuucuuucaagaggucccccacguuauugaagaggugaugaacaucgugcugauugcccucagcauccuggcuauucuuaaggggcuguacaaugucgccacaugcggacucaucggccuggugacguuccuucugcucuccgggagaucuuguagccugaucuauaaaggaaccuacgaacugcagacacucgagcugaacauggaaacccuuaauaugugcaugccucuguccuguacaaagaacaauucucaucacuauauucggguuggcaacgagaccgggcucgagcugacacuuaccaauacgagcauccugaaccauaaauuuugcaaucucuccgacgcgcacaagcgcaaccuguacgaucauucucugaugagcauuaucuccaccuuccaccucagcauuccgaauuuuaaccaguaugaagcuaugucuugugacuucaauggaggcaaaaucacagugcaguacaaccugucccacagcuuugccgucgaugccgcuggccauugcgggacccuugccaauggagugcugcaaacauucaugagaauggcuuggggcgggucuuauauugcccucgacuccggacggggcaacugggauuguaucaugaccagcuaccaguaccugaucauucagaacacgacaugggacgaucacugccaguuuucucgccccuccccuaucggguaucuuggacugcucagccaaagaacccgggacauuuacaucucccgcagacugcugggcacauucaccuggacccucucugauagcgagggcaaugaaacacccgggggauauugucugacgcgguggaugcuuauugaggcggagcugaagugcuuuggcaacaccgccguugcuaaguguaaugaaaaacaugacgaggaguucugcgauaugcuccgccuguuugacuucugcaagcaggccaucagacggcuuaaaacagaagcucagauguccauccagcugauuaacaaggccgugaaugcgcucaucaacgaucaacugauuaugaaaaaucaucugcgcgacaucauggggauuccuuacuguaacuauagcagauacugcuaucucaaucacaccucuacaggaaagaccucccugccccgguguugccuuaucagcaacggcucuuaccugaaugaaacgaaguucagcgacgauaucgagcagcaggccgacaacaugauuacagagaugcuccaaaaagaauacaucgaucgccaggggaagaccccucugggacuggucgaccuuuuuguguucuccaccucuuuuuaucucauuagcaucuuccugcaccuggugaaaauuccgacacacagacauaucgucggcaagcccuguccuaaaccccaccggcucaaucauaugggcauuugcuccugugggcuguacaagcagccuggaguucccgugagauggaaacgcugaggacuagucccuguucccagagcccacuuuuuuuucuuuuuuugaaauaaaauagccugucuuucagaucuaaaaaaaaaaaaaaaaaaaaaaaaaaaaaaaaaaaaaaaaaaaaaaaaaaaaaaaaaaaaaaaaaaaaaaaaaaaaaaaaaaaaaaaaaaaaaaaaaaaa

SEQ ID NO: 40809 - RNA, 1743 nt, Artificial Sequence
  mRNA product Design a-2 (A100) comprising derived and/or modified sequence from LASV(AV;Clade V)__CCA30314__GPCmut12 (opt5)
aggagaguccgcucagccagguugcagaagcggcuuagcguguguccuaaucuucucucugcguguagguaggccugugccgcaaacaagcuuaccaugggccagaucgugaccuucuuucaagaggucccccacguuauugaagaggugaugaacaucgugcugauugcccucagcauccuggcuguccuuaaggggcuguacaauauugccacaugcggacucaucggccugaucacguuccuucugcucugugggagauccugcucuagcaaccuguauaaaggaguguacgaacugcagucccucgaccugaauauggagacccuuaacauguguaugccucugucuugcacaaagaauaacagccaucacuauauucggguuggcaaugauaccgggcucgaacugacacuuaccaacacauccauccugaaucauaaauuuuguaaccucucugacgcgcacaagaaagaucuguacgaccaugcucugaugagcauuaucuccaccuuccaccucagcauuccgaauuuuaaccaguaugaggccaugucuugcgauuucaauggaggcaagaucuccgugcaguacaaccugagccacucuuaugccauugacgcugccaaucauuguggcacggucgcuaacgggauccuucaaaccuuuaugcgcauggccuggggaggcuccuacaucgcgcuggauagcgggagaggaaacugggacugcauuaugacaucuuaccaguaucucaucauucagaauaccacaugggagaaccacugucaguucucccggcccagcccuaucggcuaccuggggcuucugucccaacgcaccagagauauuuauaucucucggcgccuccugggaacguuuacauggacccugagcgacuccgaaggcaaugccacacccggcggguacugccucaccagauggaugcugaucgaggcugaacuuaaguguuucggaaacaccgccguggcuaaaugcaaugagaagcaugaugaggaauuuugcgacaugcugcgccucuucgauuuuuguaaacaggccauuagccggcugaagucugaggcgcagauguccauccagcuuauuaacaaagccguuaaugcucugaucaacgaccaacucauuaugaagaaucaccugagagacaucaugggcaucccuuauugcaacuacagcaaguauuguuaccugaaucacacaauuacggggaaaaccucucuccccaagugcugucuggugagcaacggauccuaccuuaaugaaacacauuucucugaugacaucgagcagcaggccgauaacaugauuaccgaaaugcugcaaaaagaguauauggagcggcagggcaagacaccucucgggcuggucgaccuguucguguuuagcaccuccuucuaccuuaucagcauuuuucuccgccuggugaaaaucccgacgcacagacauauugucggaaagcccugcccuaaaccccaccggcugaaucauaugggcaucuguucuugcggccucuauaagcagccugggguucccgugcgcuggaagagaugaggacuagucccuguucccagagcccacuuuuuuuucuuuuuuugaaauaaaauagccugucuuucagaucuaaaaaaaaaaaaaaaaaaaaaaaaaaaaaaaaaaaaaaaaaaaaaaaaaaaaaaaaaaaaaaaaaaaaaaaaaaaaaaaaaaaaaaaaaaaaaaaaaaaa

SEQ ID NO: 40810 - RNA, 1740 nt, Artificial Sequence
  mRNA product Design a-2 (A100) comprising derived and/or modified sequence from LASV(Togo/2016/7082;Clade VI)__AMR44577__GPCmut12 (opt5)
aggagaguccgcucagccagguugcagaagcggcuuagcguguguccuaaucuucucucugcguguagguaggccugugccgcaaacaagcuuaccaugggccagaucauuaccuucuuucaagaggugccccacgucaucgaagagguuaugaacauugugcugaucgcccucagccugcuugcuauucugaaggggguguacaaugucgccacaugcggaaucaucggccucgugacguuccuguuucuuugugggagauccugcucucugauuuauaaaggaagcuacgaacuccagacccuggagcugaacauggaaacacucaauauguguaugccucuguccugcaccaagaacucuagccaucacuauauccggguuggcaaugagacagggcuugagcugacccucacaaacaccuccauuaucaaucauaaauucuguaaccugucugacgcgcacaagcgcaaucuuuacgaucaugcucugaugagcauucucuccacguuucaccugagcaucccgaacuucaaucaguaugaagccaugucuugcgacuuuaacggaggcaaaauuuccgugcaguacaaucugagccacgccuaugcugucgaugccgcugagcauuguggcaccguggccaacgggguucuccaaacauucaugagaauggcguggggaggcucuuacaucgcccuggacuccgggcggggaaauugggauugcaucaugaccagcuaccaguaucuuauuauccagaacacaaccugggaagaccacugucaguuuucucgccccuccccuauuggcuaccuggggcuccugagccaaagaacgcgggauaucuauauuucccgcagacuucugggaacauucaccuggacacucucugacagcgagggcaacgagacccccggcggguacugccugacccgguggaugcugaucgaagcugagcucaaguguuuuggaaauacagccguggcuaagugcaacgaaaaacaugaugaggaguucugcgacaugcugcgccuuuuugauuucuguaagcaggccauccagagacugaaauccgaagcgcagaugagcauucaacucaucaauaaggccgucaacgcucugauuaaugaccagcuuaucaugaaaaaccaucugcgggauaugaugggcauuccuuauugcaauuacucuaaguauuguuaccucaaccacacguccagcgggcgcaccucucugcccaagugcugucuggugagcaauggauccuaccucaacgagacacacuucucugacgacaucgaacagcaagccgauaauaugaucaccgagaugcugcagaaagaauauauugacagacagggcaagacaccucuugggcugguggaucucuuugucuucagcaccuccuuuuaccugaucagcauuuuccugcaccuuaucaaaauuccgacgcaucggcacaucguuggaaagcccugcccuaaaccccaucgccucaaccacaugggcauuuguucuugcggccuguauaagcagccuggggugcccacaagauggaaacggugaggacuagucccuguucccagagcccacuuuuuuuucuuuuuuugaaauaaaauagccugucuuucagaucuaaaaaaaaaaaaaaaaaaaaaaaaaaaaaaaaaaaaaaaaaaaaaaaaaaaaaaaaaaaaaaaaaaaaaaaaaaaaaaaaaaaaaaaaaaaaaaaaaaaa

SEQ ID NO: 40811 - RNA, 1740 nt, Artificial Sequence
  mRNA product Design a-2 (A100) comprising derived and/or modified sequence from LASV(KAK-428;Clade n.d. (VII))__ANH09740__GPCmut12 (opt5)
aggagaguccgcucagccagguugcagaagcggcuuagcguguguccuaaucuucucucugcguguagguaggccugugccgcaaacaagcuuaccaugggccagaucgugaccuucuuucaagaggucccccacguuauugaagaggugaugaacaucgugcugauugcccucagccugcuugcuauccugaaggggcucuacaauuucgccacaugcggagucauuggccugaucacguuucuucugcucugugggagauccugcucugcgaccuauaaaggacaguacgaacugcagacacuggagcucaacauggaaagccugaauauguguaugccucuuuccugcaccaagaacaauucucaucacuauauccgggcuggcaacaauacagggcuggagcucacccugacaaacaccagcauuaucucccauaaauucuguaaucuuucugacgcccacaagaaaaaccuguacgaucauacgcucaugagcauuaucaccacauuucaccuguccauuccgaauuucaaccaguaugaggccaugagcugcgacuuuaauggaggcaagaucucuauucaauacaaccugucccacagcuaugcuggcgaugccgcucagcauugugggaccguggccaauggaguucuccagacauucaugcgcauggcguggggcgggucuuaccuggcccuugacuccggaagacggggcugggauugcaucaucagcucuuaccaguaucugauuauccaaaacaccacgugggacgaucacugucaguuuucccgccccagcccuauuggguaccucggauucgugucccagaagacaagagacaucuauauuucucggcgccugcuuggcaccuuuacauggacccugagcgauuccgaaggccaugacaugcccgggggauacugccucaccagauggaugcugaucgaggcugaucugaaauguuucggcaacacagccgucgcuaagugcaaugaaaaacacgacgaggaguuuugcgauauguggcgccucuucgacuucuguaagcaggccauccaacggcugaaagcggaagcccagaugaacauucagcuuaucaauaaggcugugaacgcccugauuaaugaccaacucaugaugaagaaccaccugagagauaucauggggauuccuuauugcaauuacagcaaauuuuguuaucuuaacaauacgaccacaggacggaccucucugccccgcugcugucucaucuccaacggcagcuaccugaaugagacacauuucucugacgauaucgaacagcaggcugacaacaugauuaccgagaugcugcagaaggaauacauggauagacaagggaaaacgccucucggacugguugaccuuuuuguguucagcacauccuuuuaucugaucaccauuuuccuccaccuggucaagaucccgacccaucggcacauugugggcaaacccugcccuaagccccaucgccugaaucacaugggcaucuguucuugcgggcuuuacaaacagccuggagugcccgucagauggaagcggugaggacuagucccuguucccagagcccacuuuuuuuucuuuuuuugaaauaaaauagccugucuuucagaucuaaaaaaaaaaaaaaaaaaaaaaaaaaaaaaaaaaaaaaaaaaaaaaaaaaaaaaaaaaaaaaaaaaaaaaaaaaaaaaaaaaaaaaaaaaaaaaaaaaaa

SEQ ID NO: 40812 - RNA, 1740 nt, Artificial Sequence; identical to SEQ ID NO: 40806
  mRNA product Design a-2 (A100) comprising derived and/or modified sequence from LASV(Pinneo-NIG-1969;Clade I)__AIT17836__GPCmut12 (opt5)

SEQ ID NO: 40813 - RNA, 1740 nt, Artificial Sequence
  mRNA product Design a-2 (A100) comprising derived and/or modified sequence from LASV(ISTH0009-NIG-2011;Clade II)__AIT17404__GPCmut12 (opt5)
aggagaguccgcucagccagguugcagaagcggcuuagcguguguccuaaucuucucucugcguguagguaggccugugccgcaaacaagcuuaccaugggccagaucauuaccuucuuucaagaggugccccacgucaucgaagagguuaugaacauugugcugaucgcccucagccugcuugcuauucugaaggggaucuacaauguggccacaugcggacucuucggccuggucuccuuucuucugcucugugggagaucuugcagcacgaccuauaaaggaguguacgaacugcagacacuggagcucgacauggcgucccugaacauguguaugccucuuucuugcaccaagaauaacagccaucacuauaucaugguuggcaaugaaacagggcuggagcucacccugacaaacaccuccauuaucaaucauaaauucuguaaccuuucugaugcucacaagaaaaaucuguacgaccaugcccucaugagcauuaucuccacguuucaccugagcauuccgaacuucaaucaguaugaggccaugucuugcgauuuuaacggaggcaagaucuccgugcaguacaaucugagccacgcuuaugccgucgacgcugccaaccauuguggcaccauugcgaauggggugcuccaaacauucaugcggauggccuggggaggcucuuacaucgcucuggauuccgggaagggaagcugggacugcaucaugaccucuuaccaguaucuuauuauccagaacacaaccugggaagaucacugucaguuuucccgccccagcccuauuggcuaccuggggcuccugucccaaagaacgcgggacaucuauauuucucgcagacuucugggaacauucaccuggacacucagcgauuccgagggcaacgaaacccccggcggguacugccugacccgguggaugcugaucgaggccgagcucaaauguuuuggaaauacagcuguugccaagugcaacgaaaaacaugacgaggaguucugcgauaugcugcgccuuuuugacuucuguaagcaggcgaucagacggcugaaaacggaagcccagaugagcauucagcucaucaauaaggcugugaacgcccugauuaaugaucaacuuaucaugaagaaccaucugcgcgacauuaugggcaucccuuauugcaauuacucuaaauauuguuaccucaaccacaccgucacagggaagaccucccugcccagaugcugucuggugagcaauggaucuuaccucaacgaaacacacuucagcgacgauaucgagcagcaggcugacaauaugauuaccgagcugcuucaaaaagaauauauggaucggcagggcaagacgccucuggggcucguggaccuguuugucuucuccacaucuuuuuaccugaucagcauuuuccuucaccucaucaaaauuccgacccaucgccacaucaccggaaagcccugcccuaaaccccauagacugaaccacaugggcauuuguuccugcggccuguauaagcacccugggguucccgugaaguggaaacggugaggacuagucccuguucccagagcccacuuuuuuuucuuuuuuugaaauaaaauagccugucuuucagaucuaaaaaaaaaaaaaaaaaaaaaaaaaaaaaaaaaaaaaaaaaaaaaaaaaaaaaaaaaaaaaaaaaaaaaaaaaaaaaaaaaaaaaaaaaaaaaaaaaaaa

SEQ ID NO: 40814 - RNA, 1740 nt, Artificial Sequence
  mRNA product Design a-2 (A100) comprising derived and/or modified sequence from LASV(ISTH2010-NIG-2012;Clade II)__AIT17482__GPCmut12 (opt5)
aggagaguccgcucagccagguugcagaagcggcuuagcguguguccuaaucuucucucugcguguagguaggccugugccgcaaacaagcuuaccaugggccagaucauuaccuucuuucaagaggugccccacgucaucgaagagguuaugaacauugugcugaucgcccucagccugcuugcuauucugaaggggaucuacaauguggccacaugcggacucuucggccuggucuccuuucuucugcucugugggagaucuugcagcacgaccuauaaaggaguguacgaacugcagacacuggagcucgacauggcgucccugaacauguguaugccucuuucuugcaccaagaauaacagccaucacuauaucaugguuggcaaugaaacagggcuggagcucacccugacaaacaccuccauuaucaaucauaaauucuguaaccuuucugaugcucacaagaaaaaucuguacgaccaugcccucaugagcauuaucuccacguuucaccugagcauuccgaacuucaaucaguaugaggccaugucuugcgauuuuaacggaggcaagaucuccgugcaguacaaucugagccacgcuuaugccgucgacgcugccaaccauuguggcaccauugcgaauggggugcuccaaacauucaugcggauggccuggggaggcucuuacaucgcucuggauuccgggaagggaagcugggacugcaucaugaccucuuaccaguaucuuauuauccagaacauuacaugggaagaucacugucaguuuucccgccccagcccuaucggcuaccuggggcuccugucccaaagaacccgggacauuuauaucucucgcagacuucugggaacguucacauggacccucagcgauuccgagggcaacgaaacacccggcggguacugccugacccgguggaugcugaucgaggccgagcucaaauguuuuggaaauaccgcuguugccaagugcaacgaaaaacaugacgaggaguucugcgauaugcugcgccuuuuugacuucuguaagcaggcgauuagacggcugaaaacagaagcccagaugagcauccagcucauuaauaaggcugugaacgcccugaucaaugaucaacuuauuaugaagaaccaucugcgcgacaucaugggcaucccuuauugcaauuacucuaaauauuguuaccucaaccacacggucaccgggaagacaucccugcccagaugcugucuggugagcaauggaucuuaccucaacgaaacccacuucagcgacgauauugagcagcaggcugacaauaugaucacagagcugcuucaaaaagaauauauugaucggcagggcaagaccccucuggggcucguggaccuguuugucuucuccacgucuuuuuaccugaucagcauuuuccuucaccucguuaaaaucccgacacaucgccacguggugggaaagcccugcccuaaaccccauagacugaaccacaugggcauuuguuccugcggccuguauaagcacccugggguccccgugaaguggaaacggugaggacuagucccuguucccagagcccacuuuuuuuucuuuuuuugaaauaaaauagccugucuuucagaucuaaaaaaaaaaaaaaaaaaaaaaaaaaaaaaaaaaaaaaaaaaaaaaaaaaaaaaaaaaaaaaaaaaaaaaaaaaaaaaaaaaaaaaaaaaaaaaaaaaaa

SEQ ID NO: 40815 - RNA, 1740 nt, Artificial Sequence
  mRNA product Design a-2 (A100) comprising derived and/or modified sequence from LASV(Lassa virus/H.sapiens-wt/NGA/2015/ISTH_0543;Clade II)__AVO03639__GPCmut12 (opt5)
aggagaguccgcucagccagguugcagaagcggcuuagcguguguccuaaucuucucucugcguguagguaggccugugccgcaaacaagcuuaccaugggccagaucauuaccuucuuucaagaggugccccacgucaucgaagagguuaugaacauugugcugaucgcccucagccugcuugcuauucugaaggggaucuacaauguggccacaugcggacucuucggccuggucuccuuucuucugcucugugggagaucuugcagcacgaccuauaaaggaguguacgaacugcagacacuggagcucgacauggcgaaccugaauauguguaugccucuuuccugcaccaagaacaauucucaucacuauaucaugguuggcaacgaaacagggcuggagcucacccugacaaauaccagcauuaucaaccauaaauucuguaaucuuuccgaugcucacaagaaaaaccuguacgaccaugcccucaugucuauuaucagcacguuucaccuguccauuccgaauuucaaccaguaugaggccaugagcugcgauuuuaauggaggcaagaucucugugcaguacaaccugucccacaccuaugcugucgacgccgcuaaucauuguggcacaauugccaacggggugcuccaaaccuucaugcggauggcguggggaggcagcuacaucgcccuggauucugggaagggauccugggacugcaucaugacaagcuaccaguaucuuguuauucagaacaccacgugggaagaucacugucaguuuucucgccccuccccuaucggcuaccuggggcuccugagccaaagaacacgggacauuuauaucucccgcagacuucugggaaccuucacauggacccucucugauagcgagggcaaugaaacccccggcggguacugccugacacgguggaugcugauugaggcugagcucaaauguuuuggaaacacggccguggcuaagugcaaugaaaaacaugacgaggaguucugcgauaugcugcgccuuuuugacuucuguaagcaggccaucagacggcugaaaaccgaagcgcagauguccauccagcucauuaacaaggccgucaaugcucugaucaacgaucaacuuauuaugaagaaucaucugcgcgacaucaugggcauuccuuauugcaacuacagcaaauauuguuaccucaaucacacagugaccgggaagacaucucugcccagaugcugucugguguccaacggaagcuaccucaaugaaacccacuucucugacgauaucgagcagcaggccgacaacaugaucacggagcugcuucaaaaagaauauauugaucggcagggcaagacaccucuggggcucgucgaccuguuuguuuucagcaccuccuuuuaccugaucucuauuuuccuucaccucgugaaaaucccgacccaucgccacauuacaggaaagcccugcccuaaaccccauagacugaaucacaugggcaucuguagcugcggccuguauaagcacccuggggugcccgucaaguggaaacggugaggacuagucccuguucccagagcccacuuuuuuuucuuuuuuugaaauaaaauagccugucuuucagaucuaaaaaaaaaaaaaaaaaaaaaaaaaaaaaaaaaaaaaaaaaaaaaaaaaaaaaaaaaaaaaaaaaaaaaaaaaaaaaaaaaaaaaaaaaaaaaaaaaaaa

SEQ ID NO: 40816 - RNA, 1740 nt, Artificial Sequence
  mRNA product Design a-2 (A100) comprising derived and/or modified sequence from LASV(Lassa virus/H.sapiens-wt/NGA/2016/ISTH_0009;Clade II)__AVO03571__GPCmut12 (opt5)
aggagaguccgcucagccagguugcagaagcggcuuagcguguguccuaaucuucucucugcguguagguaggccugugccgcaaacaagcuuaccaugggccagaucauuaccuucuuucaagaggugccccacgucaucgaagagguuaugaacauugugcugaucgcccucagccugcuugcuauucugaaggggaucuacaauguggccacaugcggacuccugggccuugucuccuuccugcuccugugugggagaucuugcagcacgaccuauaaaggaguguacgaacugcagacacucgagcuggacauggcgucccuuaacauguguaugccucugucuugcaccaagaauaacagccaucacuauaucaugguuggcaaugaaacagggcucgagcugacccuuacaaacaccuccauuaucaaucauaaauuuuguaaccugucugaugcucacaagaaaaaucucuacgaccaugcccugaugagcauuaucuccacguuccaccugagcauuccgaacuuuaaucaguaugaggccaugucuugcgauuucaacggaggccggaucuccgugcaguacaaucucagccacucuuaugcugucgacgccgcuaaccauuguggcaccauugccaauggggugcugcaaacauuuaugcgcauggcguggggaggcuccuacaucgcccuugauagcgggaagggaucuugggacugcaucaugaccuccuaccaguaucugauuauccagaacacaaccugggaagaucacugucaguucagcagacccuccccuauuggcuaccucgggcugcuuucucaacggacgcgcgacaucuauauuagcagacggcugcucggaacauuuaccuggacacuguccgauagcgagggcaacgaaacccccggcggguacugccugacccgcuggaugcucaucgaggcugagcugaaguguuucggaaauacagccguugcuaaaugcaacgaaaagcaugacgaggaauuuugcgauaugcuuagacuguucgacuuuuguaaacaggccauccggcgccucaagacggaggcgcagaugucuauucagcugaucaauaaagccgugaacgcucuuauuaaugaucaacugaucaugaagaaccaccucagagacauuaugggcaucccuuauugcaauuacuccaaguauuguuaccugaaccacaccgucacagggaaaaccagccugccccggugcugucucgugucuaauggaagcuaccugaacgaaacacauuucuccgacgauaucgagcagcaggccgacaauaugauuaccgagcuucugcaaaaggaauauaucgaucgccagggcaaaacgccucucgggcugguggaccuguucgucuuuucuaccagcuucuaccuuauuuccaucuuucuccaccugguuaagauuccgacacauagacacaucaccggaaaacccugcccuaagccccaucggcugaaccacaugggcauuuguagcugcggccucuauaaucacccuggggugcccgugaaauggaagcgcugaggacuagucccuguucccagagcccacuuuuuuuucuuuuuuugaaauaaaauagccugucuuucagaucuaaaaaaaaaaaaaaaaaaaaaaaaaaaaaaaaaaaaaaaaaaaaaaaaaaaaaaaaaaaaaaaaaaaaaaaaaaaaaaaaaaaaaaaaaaaaaaaaaaaa

SEQ ID NO: 40817 - RNA, 1740 nt, Artificial Sequence
  mRNA product Design a-2 (A100) comprising derived and/or modified sequence from LASV(Lassa virus/H.sapiens-wt/NGA/2016/ISTH_0017;Clade II)__AVO03567__GPCmut12 (opt5)
aggagaguccgcucagccagguugcagaagcggcuuagcguguguccuaaucuucucucugcguguagguaggccugugccgcaaacaagcuuaccaugggccagaucauuaccuucuuucaagaggugccccacgucaucgaagagguuaugaacauugugcugaucgcccucagccugcuugcuauucugaaggggaucuacaauguggccacaugcggacucuucggccuggucuccuuucuucugcucugugggagaucuugcagcacgaccuauaaaggaguguacgaacugcagacacuggagcucgacauggcgucccugaacauguguaugccucuuucuugcaccaagaauaacagccaucacuauaucaugguuggcaaugaaacagggcuggagcucacccugacaaacaccuccauuaucaaucauaaauucuguaaccuuucugaugcucacaagaaaaaucuguacgaccaugcccucaugagcauuaucuccacguuucaccugagcauuccgaacuucaaucaguaugaggccaugucuugcgauuuuaacggaggcaagaucuccgugcaguacaaucugagccacaccuaugcuauugacgccgcuaaccauuguggcacaaucgccaaugggguccuccaaaccuucaugcggauggcguggggaggcucuuacaucgcccuggauuccgggaagggaagcugggacugcauuaugacaucuuaccaguaucuuaucauucagaacaccacgugggaagaucacugucaguuuucccgccccagcccuaucggcuaccuggggcuccugucccaaagaacacgggacauuuauaucucucgcagacuucugggaaccuucacauggacccucagcgauuccgagggcaacgaaacccccggcggguacugccugacacgguggaugcugaucgaggcugagcucaaauguuuuggaaauacggccguggcuaagugcaacgaaaaacaugacgaggaguucugcgauaugcugcgccuuuuugacuucuguaagcaggccauuagacggcugaaaaccgaagcgcagaugagcauccagcucauuaauaaggccguuaacgcucugaucaaugaucaacuuauuaugaagaaccaucugcgcgacaucaugggcaucccuuauugcaauuacucuaaauauuguuaccucaaccacacagugaccgggaagacaucccugcccagaugcugucuggucagcaauggaucuuaccucaacgaaacccacuucagcgacgauauugagcagcaggccgacaauaugaucacggagcugcuucaaaaagaauauauggaucggcagggcaagacaccucuggggcucguggaccuguuuguguucuccaccucuuuuuaccugauuagcaucuuccuucaccucguccgcauuccgacccauagacacguuaucggaaaacccugcccuaagccccaucggcugaaccacaugggcauuuguuccugcggccuguauaaacacccuggggugcccgugaaguggaagcgcugaggacuagucccuguucccagagcccacuuuuuuuucuuuuuuugaaauaaaauagccugucuuucagaucuaaaaaaaaaaaaaaaaaaaaaaaaaaaaaaaaaaaaaaaaaaaaaaaaaaaaaaaaaaaaaaaaaaaaaaaaaaaaaaaaaaaaaaaaaaaaaaaaaaaa

SEQ ID NO: 40818 - RNA, 1740 nt, Artificial Sequence
  mRNA product Design a-2 (A100) comprising derived and/or modified sequence from LASV(Lassa virus/H.sapiens-wt/NGA/2018/ISTH_0959;Clade II)__AVV65099__GPCmut12 (opt5)
aggagaguccgcucagccagguugcagaagcggcuuagcguguguccuaaucuucucucugcguguagguaggccugugccgcaaacaagcuuaccaugggccagaucauuaccuucuuucaagaggugccccacgucaucgaagagguuaugaacauugugcugaucgcccucagccugcuugcuauucugaaggggaucuacaauguggucacaugcggacucuucggccugguguccuuucuucugcucugugggagaucuugcagcacgaccuauaaaggaguuuacgaacugcagacacuggagcucgacauggccucccugaacauguguaugccucuuucuugcaccaagaauaacagccaucacuauaucauggugggcaaugaaacagggcuggagcucacccugacaaacaccuccauuaucaaucauaaauucuguaaccuuucugaugcgcacaagaaaaaucuguacgaccaugcucucaugagcauuaucuccacguuucaccugagcauuccgaacuucaaucaguaugaggccaugucuugcgauuuuaacggaggcaagaucuccguccaguacaaucugagccacgccuaugcuauugacgccgcuaaccauuguggcaccaucgccaauggggugcuccaaacauucaugcggauggcguggggaggcucuuacaucgcccuggauuccgggaagggaagcugggacugcauuaugaccucuuaccaguaucuuaucauucagaacacaaccugggaagaucacugucaguuuucccgccccagcccuaucggcuaccuggggcuccugucccaaagaacgcgggacauuuauaucucucgcagacuucugggaacauucaccuggacacucagcgauuccgagggcaacgaaacccccggcggguacugccugacccgguggaugcugaucgaggcugagcucaaauguuuuggaaauacagccguugcuaagugcaacgaaaaacaugacgaggaguucugcgauaugcugcgccuuuuugacuucuguaagcaggccauuagacggcugaaaacggaagcgcagaugagcauccagcucauuaauaaggccgugaacgcucugaucaaugaucaacuuauuaugaagaaccaucugcgcgacaucaugggcaucccuuauugcaauuacucuaaauauuguuaccucaaccacaccgucacagggaagaccucccugcccagaugcugucuggugagcaauggaucuuaccucaacgaaacacacuucagcgacgauauugagcagcaggccgacaauaugaucaccgagcugcuucaaaaagaauauauugaucggcagggcaagacgccucuggggcucguggaccuguuugucuucuccacaucuuuuuaccugaucagcauuuuccuucaccucguuaaaaucccgacccaucgccacgugauuggaaagcccugcccuaaaccccauagacugaaccacaugggcaucuguuccugcggccuguauaagcacccuggggugcccgucaaguggaaacggugaggacuagucccuguucccagagcccacuuuuuuuucuuuuuuugaaauaaaauagccugucuuucagaucuaaaaaaaaaaaaaaaaaaaaaaaaaaaaaaaaaaaaaaaaaaaaaaaaaaaaaaaaaaaaaaaaaaaaaaaaaaaaaaaaaaaaaaaaaaaaaaaaaaaa

SEQ ID NO: 40819 - RNA, 1740 nt, Artificial Sequence
  mRNA product Design a-2 (A100) comprising derived and/or modified sequence from LASV(LASV003-NIG-2008;Clade II)__AIT17580__GPCmut12 (opt5)
aggagaguccgcucagccagguugcagaagcggcuuagcguguguccuaaucuucucucugcguguagguaggccugugccgcaaacaagcuuaccaugggccagaucauuaccuucuuucaagaggugccccacgucaucgaagagguuaugaacauugugcugaucgcccucagccugcuugcuauucugaaggggaucuacaauguggccacaugcggacucuucggccuggucuccuuucuucugcucugugggagaucuugcagcacgaccuauaaaggaguguacgaacugcagacacuggagcucgacauggcgucccugaacauguguaugccucuuucuugcaccaagaauaacagccaucacuauaucaugguuggcaaugaaacagggcuggagcucacccugacaaacaccuccauuaucaaucauaaauucuguaaccuuucugaugcucacaagaaaaaucuguacgaccaugcccucaugagcauuaucuccacguuucaccugagcauuccgaacuucaaucaguaugaggccaugucuugcgauuuuaacggaggcaagaucuccgugcaguacaaucugagccacaccuaugcugucgacgccgcuaaccauuguggcacaauugccaauggggugcuccaaaccuucaugcggauggcguggggaggcucuuacaucgcccuggauuccgggaagggaagcugggacugcaucaugacaucuuaccaguaucuuauuauccagaacaccacgugggaagaucacugucaguuuucccgccccagcccuauuggcuaccuggggcuccugucccaaagaacacgggacaucuauauuucucgcagacuucugggaaccuucacauggacccucagcgauuccgagagcaacgaaacccccggcggcuacugccugacacgguggaugcugaucgaggcugagcucaaauguuuugggaauacggccguugcuaagugcaacgaaaaacaugacgaggaguucugcgauaugcugcgccuuuuugacuucuguaagcaggccaucagacggcugaaagcggaagcccagaugucuauucagcucaucaauaaggcugugaacgcccugauuaaugaucaacuuaucaugaagaaccaucugcgcgacauuaugggaaucccuuauugcaauuacuccaaauauuguuaccucaaccacaccgucacaggcagaaccagccugccccggugcugucuggugucuaaugggagcuaccucaacgaaacacacuucuccgacgauaucgagcagcaggcugacaauaugauuaccgagcugcuucaaaaggaauauauggaucgccagggaaaaacgccucugggccucguggaccuguuugucuucucuaccagcuuuuaccugaucuccauuuuccuucaccucguuaagaucccgacacauagacacgugauugggaaacccugcccuaagccccaucggcugaaccacaugggaaucuguagcugcggccuguauaaacacccuggcgugcccgucaaguggaagcgcugaggacuagucccuguucccagagcccacuuuuuuuucuuuuuuugaaauaaaauagccugucuuucagaucuaaaaaaaaaaaaaaaaaaaaaaaaaaaaaaaaaaaaaaaaaaaaaaaaaaaaaaaaaaaaaaaaaaaaaaaaaaaaaaaaaaaaaaaaaaaaaaaaaaaa

SEQ ID NO: 40820 - RNA, 1740 nt, Artificial Sequence
  mRNA product Design a-2 (A100) comprising derived and/or modified sequence from LASV(LASV035-NIG-2009;Clade II)__AIT17588__GPCmut12 (opt5)
aggagaguccgcucagccagguugcagaagcggcuuagcguguguccuaaucuucucucugcguguagguaggccugugccgcaaacaagcuuaccaugggccagaucauuaccuucuuucaagaggugccccacgucaucgaagagguuaugaacauugugcugaucgcccucagccugcuugcuauucugaaggggaucuacaauguggccacaugcggacucuucggccuggucuccuuucuucugcucugugggagaucuugcagcacgaccuauaaaggaguguacgaacugcagacacuggagcucgacauggcgucccugaacauguguaugccucuuucuugcaccaagaauaacagccaucacuauaucaugguuggcaaugaaacagggcuggagcucacccugacaaacaccuccauuaucaaucauaaauucuguaaccuuucugaugcucacaagaaaaaucuguacgaccaugcccucaugagcauuaucuccacguuucaccugagcauuccgaacuucaaucaguaugaggccaugucuugcgauuuuaacggaggcaagaucuccgugcaguacaaucugagccacgcuuaugccgucgacgcugccaaccauuguggcaccauugcgaauggggugcuccaaacauucaugcggauggccuggggaggcucuuacaucgcucuggauuccgggaagggaagcugggacugcaucaugaccucuuaccaguaucuuauuauccagaacacaaccugggaagaucacugucaguuuucccgccccagcccuauuggcuaccuggggcuccugucccaaagaacgcgggacaucuauauuucucgcagacuucugggaacauucaccuggacacucagcgauuccgagggcaacgaaacccccggcggguacugccugacccgguggaugcugaucgaggccgagcucaaauguuuuggaaauacagcuguugccaagugcaacgaaaaacaugacgaggaguucugcgauaugcugcgccuuuuugacuucuguaagcaggcgaucagacggcugaaagccgaagcucagaugagcauucagcucaucaauaaggccgugaacgcucugauuaaugaucaacuuaucaugaagaaccaucugcgcgacauuaugggcaucccuuauugcaauuacucuaaauauuguuaccucaaccacacggucaccgggaagacaucccugcccagaugcugucuggugagcaauggaucuuaccucaacgaaacccacuucagcgacgauaucgagcagcaggccgacaauaugauuacagagcugcuucaaaaagaauauaucgaucggcagggcaagaccccucuggggcucguggaccuguuugucuucuccacgucuuuuuaccugauuagcaucuuccuucaccucguuaaaauuccgacacaucgccacgugaucggaaagcccugcccuaaaccccauagacugaaccacaugggcauuuguuccugcggccuguauaagcacccuggggugcccgucaaguggaaacggugaggacuagucccuguucccagagcccacuuuuuuuucuuuuuuugaaauaaaauagccugucuuucagaucuaaaaaaaaaaaaaaaaaaaaaaaaaaaaaaaaaaaaaaaaaaaaaaaaaaaaaaaaaaaaaaaaaaaaaaaaaaaaaaaaaaaaaaaaaaaaaaaaaaaa

SEQ ID NO: 40821 - RNA, 1740 nt, Artificial Sequence
  mRNA product Design a-2 (A100) comprising derived and/or modified sequence from LASV(LASV1000-NIG-2009;Clade II)__AIT17782__GPCmut12 (opt5)
aggagaguccgcucagccagguugcagaagcggcuuagcguguguccuaaucuucucucugcguguagguaggccugugccgcaaacaagcuuaccaugggccagaucauuaccuucuuucaagaggugccccacgucaucgaagagguuaugaacauugugcugaucgcccucagccugcuugcuauucugaaggggaucuacaauguggccacaugcggacucuucggccuggucuccuuucuucugcucugugggagaucuugcagcacgaccuauaaaggaguguacgaacugcagacacuggagcucgacauggcgucccugaacauguguaugccucuuucuugcaccaagaauaacagccaucacuauaucaugguuggcaaugaaacagggcuggagcucacccugacaaacaccuccauuaucaaucauaaauucuguaaccuuucugaugcucacaagaaaaaucuguacgaccaugcccucaugagcauuaucuccacguuucaccugagcauuccgaacuucaaucaguaugaggccaugucuugcgauuuuaacggaggcaagaucuccgugcaguacaaucugagccacaccuaugcugucgacgccgcuaaccauuguggcacaauugccaauggggugcuccaaaccuucaugcggauggcguggggaggcucuuacaucgcccuggauuccgggaagggaagcugggacugcaucaugacaucuuaccaguaucuuauuauccagaacaccacgugggaagaucacugucaguuuucccgccccagcccuauuggcuaccuggggcuccugucccaaagaacacgggacaucuauauuucucgcagacuucugggaaccuucacauggacccucagcgauuccgagggcaacgaaacccccggcggguacugccugacacgguggaugcugaucgaggcugagcucaaauguuuuggaaauacggccguugcuaagugcaacgaaaaacaugacgaggaguucugcgauaugcugcgccuuuuugacuucuguaagcaggccaucaaaagacugaagaccgaagcgcagaugagcauucagcucaucaauaaggccgugaacgcucugauuaaugaucaacuuaucaugaaaaaccaucugcgggacauuaugggcaucccuuauugcaauuacucuaaguauuguuaccucaaccacacagucaccgggaaaacaucccugccccgcugcugucuggugagcaauggaucuuaccucaacgaaacccacuucagcgacgauaucgagcagcaggccgacaauaugauuacggagcugcuucaaaaggaauauaucgauagacagggcaaaacaccucuggggcucguggaccuguuugucuucuccaccucuuuuuaccugauuagcaucuuccuucaccucguuaagauuccgacccaucggcacguggugggaaaacccugcccuaagccccaucgccugaaccacaugggcaucuguuccugcggccuguauaagcacccugggguccccgugaaauggaagagaugaggacuagucccuguucccagagcccacuuuuuuuucuuuuuuugaaauaaaauagccugucuuucagaucuaaaaaaaaaaaaaaaaaaaaaaaaaaaaaaaaaaaaaaaaaaaaaaaaaaaaaaaaaaaaaaaaaaaaaaaaaaaaaaaaaaaaaaaaaaaaaaaaaaaa

SEQ ID NO: 40822 - RNA, 1740 nt, Artificial Sequence
  mRNA product Design a-2 (A100) comprising derived and/or modified sequence from LASV(LASV221-NIG-2010;Clade II)__AIT17624__GPCmut12 (opt5)
aggagaguccgcucagccagguugcagaagcggcuuagcguguguccuaaucuucucucugcguguagguaggccugugccgcaaacaagcuuaccaugggccagaucauuaccuucuuucaagaggugccccacgucaucgaagagguuaugaacauugugcugaucgcccucagccugcuugcuauucugaaggggaucuacaauguggccacaugcggacucuucggccuggucuccuuucuucugcucugugggagaucuugcagcacgaccuauaaaggaguguacgaacugcagacacuggagcucgacauggcgucccugaacauguguaugccucuuucuugcaccaagaauaacagccaucacuauaucaugguuggcaaugaaacagggcuggagcucacccugacaaacaccuccauuaucaaucauaaauucuguaaccuuucugaugcucacaagaaaaaucuguacgaccaugcccucaugagcauuaucuccacguuucaccugagcauuccgaacuucaaucaguaugaggccaugucuugcgauuuuaacggaggcaagaucuccgugcaguacaaucugagccacaccuaugcuauugacgccgcuaaccauuguggcacaaucgccaaugggguccuccaaaccuucaugcggauggcguggggaggcucuuacaucgcccuggauuccgggaagggaagcugggacugcauuaugacaucuuaccaguaucuuaucauucagaacaccacgugggaagaucacugucaguuuucccgccccagcccuaucggcuaccuggggcuccugucccaaagaacacgggacauuuauaucucucgcagacuucugggaaccuucacauggacccucagcgauuccgagggcaacgaaacccccggcggguacugccugacacgguggaugcugaucgaggcugagcucaaauguuuuggaaauacggccguggcuaagugcaacgaaaaacaugacgaggaguucugcgauaugcugcgccuuuuugacuucuguaagcaggccauuagacggcugaaaaccgaagcgcagaugagcauccagcucauuaauaaggccguuaacgcucugaucaaugaucaacuuauuaugaagaaccaucugcgcgacaucaugggcaucccuuauugcaauuacucuaaauauuguuaccucaaccacacagugaccgggaagacaucccugcccagaugcugucuggucagcaauggaucuuaccucaacgaaacccacuucagcgacgauauugagcagcaggccgacaauaugaucacggagaugcugcaaaaagaauauauggaucggcagggcaagacaccucuugggcugguggaccucuuuguguucuccaccucuuuuuaccugauuagcaucuuccugcaccuugucaaaauuccgacccaucgccacguuaucggaaagcccugcccuaaaccccauagacucaaccacaugggcauuuguuccugcggccuguauaagcacccuggggugcccgugaaguggaaacggugaggacuagucccuguucccagagcccacuuuuuuuucuuuuuuugaaauaaaauagccugucuuucagaucuaaaaaaaaaaaaaaaaaaaaaaaaaaaaaaaaaaaaaaaaaaaaaaaaaaaaaaaaaaaaaaaaaaaaaaaaaaaaaaaaaaaaaaaaaaaaaaaaaaaa

SEQ ID NO: 40823 - RNA, 1740 nt, Artificial Sequence
  mRNA product Design a-2 (A100) comprising derived and/or modified sequence from LASV(LASV237-NIG-2010;Clade II)__AIT17638__GPCmut12 (opt5)
aggagaguccgcucagccagguugcagaagcggcuuagcguguguccuaaucuucucucugcguguagguaggccugugccgcaaacaagcuuaccaugggccagaucauuaccuucuuucaagaggugccccacgucaucgaagagguuaugaacauugugcugaucgcccucagccugcuugcuauucugaaggggaucuacaauguggccacaugcggacucuucggccuggucuccuuucuucugcucugugggagaucuugcagcacgaccuauaaaggaguguacgaacugcagacacuggagcucgacauggcgucccugaacauguguaugccucuuucuugcaccaagaauaacagccaucacuauaucaugguuggcaaugaaacagggcuggagcucacccugacaaacaccuccauuaucaaucauaaauucuguaaccuuucugaugcucacaagaaagaccuguacgaucaugcccucaugagcauuaucuccacguuucaccugagcauuccgaauuucaaccaguaugaggccaugucuugcgacuuuaauggaggcaagaucuccgugcaguacaaccugagccacaccuaugcugucgaugccgcuaaucauuguggcacaauugccaacggggugcuccaaaccuucaugcggauggcguggggaggcucuuacaucgcccuggacuccgggaagggaagcugggauugcaucaugacaucuuaccaguaucuuauuauccagaauaccacgugggaagaccacugucaguuuucccgccccagcccuauuggcuaccuggggcuccugucccaaagaacacgggauaucuauauuucucgcagacuucugggaaccuucacauggacccucagcgacuccgagggcaacgaaacccccggcggguacugccugacacgguggaugcugaucgaggcugagcucaaauguuuuggaaacacggccguugcuaagugcaaugaaaaacaugaugaggaguucugcgacaugcugcgccuuuuugauuucuguaagcaggccaucagacggcugaaaaccgaagcgcagaugagcauucagcucaucaacaaggccgugaaugcucugauuaacgaccaacuuaucaugaagaaucaucugcgcgacauuaugggcaucccuuauugcaacuacucuaaauauuguuaccucaaucacacagucaccgggaagacaucccugcccagaugcugucuggugagcaacggaucuuaccucaaugaaacccacuucagcgaugacaucgagcagcaggccgauaacaugauuacggagcugcuucaaaaagaauauauggaccggcagggcaagacaccucuggggcucguggaucuguuugucuucuccaccucuuuuuaccugaucagcauuuuccuucaccucaucaaaauuccgacccaucgccacaucacaggaaagcccugcccuaaaccccauagacugaaucacaugggcauuuguuccugcggccuguauaagcacccugggguucccgugaaguggaaacggugaggacuagucccuguucccagagcccacuuuuuuuucuuuuuuugaaauaaaauagccugucuuucagaucuaaaaaaaaaaaaaaaaaaaaaaaaaaaaaaaaaaaaaaaaaaaaaaaaaaaaaaaaaaaaaaaaaaaaaaaaaaaaaaaaaaaaaaaaaaaaaaaaaaaa

SEQ ID NO: 40824 - RNA, 1740 nt, Artificial Sequence
  mRNA product Design a-2 (A100) comprising derived and/or modified sequence from LASV(LASV253-NIG-2011;Clade II)__AIT17670__GPCmut12 (opt5)
aggagaguccgcucagccagguugcagaagcggcuuagcguguguccuaaucuucucucugcguguagguaggccugugccgcaaacaagcuuaccaugggccagaucauuaccuucuuucaagaggugccccacgucaucgaagagguuaugaacauugugcugaucgcccucagccugcuugcuauucugaaggggaucuacaauguggccacaugcggacucuucggccuggucuccuuucuucugcucugugggagaucuugcagcacgaccuauaaaggaguguacgaacugcagacacuggagcucgacauggcgucccugaacauguguaugccucuuucuugcaccaagaauaacagccaucacuauaucaugguuggcaaugaaacagggcuggagcucacccugacaaacaccuccauuaucaaucauaaauucuguaaccuuucugaugcucacaagaaaaaucuguacgaccaugcccucaugagcauuaucuccacguuucaccugagcauuccgaacuucaaucaguaugaggccaugucuugcgauuuuaacggaggcaagaucuccgugcaguacaaucugagccacaccuaugcugucgacgccgcuaaccauuguggcacaauugccaauggggugcuccaaaccuucaugcggauggcguggggaggcucuuacaucgcccuggauuccgggaagggaagcugggacugcaucaugacaucuuaccaguaucuuauuauccagaacaccacgugggaagaucacugucaguuuucccgccccagcccuauuggcuaccuggggcuccugucccaaagaacacgggacaucuauauuucucgcagacuucugggaaccuucacauggacccucagcgauuccgagggcaacgaaacccccggcggguacugccugacacgguggaugcugaucgaggcugagcucaaauguuuuggaaauacggccguugcuaagugcaacgaaaaacaugacgaggaguucugcgauaugcugcgccuuuuugacuucuguaagcaggccaucagacggcugaaagcggaagcccagaugagcauucagcucaucaauaaggcugugaacgcccugauuaaugaucaacuuaucaugaagaaccaucugcgcgacauuaugggcaucccuuauugcaauuacucuaaauauuguuaccucaaccacaccgucacagggagaaccucccugccccggugcugucuggugagcaauggaucuuaccucaacgaaacacacuucagcgacgauaucgagcagcaggcugacaauaugauuaccgagcugcuucaaaaggaauauaucgaucgccagggcaaaacgccucuggggcucguggaccuguuugucuucuccacaucuuuuuaccugauuagcaucuuccuucaccucguuaagauuccgacccauagacacaucauuggaaaacccugcccuaagccccaucggcugaaccacaugggcaucuguuccugcggccuguauaaacacccuggggugcccgugaaguggaagcgcugaggacuagucccuguucccagagcccacuuuuuuuucuuuuuuugaaauaaaauagccugucuuucagaucuaaaaaaaaaaaaaaaaaaaaaaaaaaaaaaaaaaaaaaaaaaaaaaaaaaaaaaaaaaaaaaaaaaaaaaaaaaaaaaaaaaaaaaaaaaaaaaaaaaaa

SEQ ID NO: 40825 - RNA, 1740 nt, Artificial Sequence
  mRNA product Design a-2 (A100) comprising derived and/or modified sequence from LASV(LASV254-NIG-2011;Clade II)__AIT17674__GPCmut12 (opt5)
aggagaguccgcucagccagguugcagaagcggcuuagcguguguccuaaucuucucucugcguguagguaggccugugccgcaaacaagcuuaccaugggccagaucauuaccuucuuucaagaggugccccacgucaucgaagagguuaugaacauugugcugaucgcccucagccugcuugcuauucugaaggggaucuacaauguggccacaugcggacucuucggccuggucuccuuucuucugcucugugggagaucuugcagcacgaccuauaaaggaguguacgaacugcagacacuggagcucgacaugaccaaccugaauauguguaugccucuuuccugcacaaagaacaauucucaucacuauaucaugguuggcaacgaaaccgggcuggagcucacacugaccaauacgagcauuaucaaccauaaauucuguaaucuuuccgaugcgcacaagaaaaaccuguacaaucaugcucucaugucuauuaucagcaccuuucaccuguccauuccgaacuucaaucaguaugaggccaugagcugcgacuuuaacggaggcaagaucucugugcaguacaaucugucccacagcuaugccgucgaugcugccaaccauuguggcacaauugcuaacggggugcuccaaaccuucaugcggauggccuggggaggcucuuacaucgcgcuggacuccgggaagggaaauugggauugcaucaugacaagcuaccaguaucuuauuauccagaacaccacgugggaagaccacugucaguuuucucgccccuccccuauuggcuaccuggggcuccugagccaaagaacacgggauaucuauauuucccgcagacuucugggaaccuucacauggacccucucugacagcgagggcaaugaaacccccggcggguacugccugacacgguggaugcugaucgaggccgagcucaaauguuuuggaaacacggcuguugccaagugcaaugaaaaacaugaugaggaguucugcgacaugcugcgccuuuuugauuucuguaagcaggcuaucagacggcugaaaaccgaagcccaggcgaacauucagcucaucaauaaggccgugaacgcucugauuaaugaccaacuuaucaugaagaaccaucugcgcgauauuaugggcaucccuuauugcaauuacuccaaauauuguuaccucaaccacacagucaccgggaagacaagccugcccagaugcugucuggugucuaauggauccuaccucaacgaaacccacuucagcgacgacaucgagcagcaggccgauaauaugauuacggagcugcuucaaaaagaauauauggaccggcagggcaagacaccucuggggcucguggaucuguuugucuucucuaccagcuuuuaccugaucuccauuuuccuucaccucguuaaaaucccgacccaucgccacgugauuggaaagcccugcccuaaaccccauagacugaaccacaugggcaucuguucuugcggccuguauaagcacccuggggugcccgucaaguggaaacggugaggacuagucccuguucccagagcccacuuuuuuuucuuuuuuugaaauaaaauagccugucuuucagaucuaaaaaaaaaaaaaaaaaaaaaaaaaaaaaaaaaaaaaaaaaaaaaaaaaaaaaaaaaaaaaaaaaaaaaaaaaaaaaaaaaaaaaaaaaaaaaaaaaaaa

SEQ ID NO: 40826 - RNA, 1740 nt, Artificial Sequence
  mRNA product Design a-2 (A100) comprising derived and/or modified sequence from LASV(Nig08-A19;Clade III)__ADU56618__GPCmut12 (opt5)
aggagaguccgcucagccagguugcagaagcggcuuagcguguguccuaaucuucucucugcguguagguaggccugugccgcaaacaagcuuaccaugggccagaucgugaccuucuuucaagaggucccccacguuauugaagaggugaugaacaucgugcugauugcccucagcauccuggcuauucuuaaggggcuguacaauaucgccacaugcggacucaucggccuggucacguuccuucugcucuccgggagaucuuguagcaugaccuauaaaggaguguacgaacugcagacacuggagcucaacaugaauacccugaacaugugcaugccucuuuccuguacaaagaauaacucucaucacuauauuaugguuggcaaugaaaccgggcuggagcucacacugaccaacacgagccuucugcaucacaaauuuugcaaucucuccgacgcgcauaagaaaaaccuguacgaucacacccugaugucuaucauuagcacauuccaccucuccaucccgaauuuuaaccaguaugaggcuaugagcugugacuucaauggaggcaagauuaccgugcaguacaaccugucucauuccuaugccaucgaugccgcuaaucacugcggcacagucgccaacggggugcuucaaaccuuuaugcggauggcuuggggaggcagcuacauugcccuggacucugggcgcggaaagugggauuguaucaugacguccuaccaguaucucaucauucagaacacaaccugggaagaccauugccaguucagcagacccucuccuaucggcuaccuggggcuucugucccaacggacacgcgauauuuauaucagcagacggcuccugggaaccuuuaccuggacacuguccgacucugagggcaaugaaacgcccggcggguacugucucacccgcuggaugcugauugaggcggagcuuaaaugcuucggaaacacagccguugcuaaguguaaugaaaaacacgaugaggaauuuugcgacaugcugagacucuucgauuuuugcaagcaggccauccggcgccugaaagcugaggcccagaugagcauccagcuuauuaacaaggcggugaaugcccugaucaacgaccaacucauuaugaagaaucaccugagagauaucaugggcauuccuuauuguaacuacuccaaauauugcuaccugaaucauaccagcacagggcggaccucucucccccgcuguugccuggucuccaacggaagcuaccuuaaugaaacgcacuucucugacgacaucgagcagcaggcugauaacaugaucacagagaugcugcaaaaggaauaucucgacagacagggcaaaaccccucuggggcugguggaucuuuucguguuuagcaccuccuucuaccucauuucuaucuuucugcaucuggucaagauuccgacacaccggcauaucguuggaaaacccuguccuaagccccaccgccucaaucacaugggcauuugcagcuguggccuguauaaacagccuggggugcccgugagauggaagcggugaggacuagucccuguucccagagcccacuuuuuuuucuuuuuuugaaauaaaauagccugucuuucagaucuaaaaaaaaaaaaaaaaaaaaaaaaaaaaaaaaaaaaaaaaaaaaaaaaaaaaaaaaaaaaaaaaaaaaaaaaaaaaaaaaaaaaaaaaaaaaaaaaaaaa

SEQ ID NO: 40827 - RNA, 1743 nt, Artificial Sequence
  mRNA product Design a-2 (A100) comprising derived and/or modified sequence from LASV(G1180-SLE-2010;Clade IV)__AIT17168__GPCmut12 (opt5)
aggagaguccgcucagccagguugcagaagcggcuuagcguguguccuaaucuucucucugcguguagguaggccugugccgcaaacaagcuuaccaugggccagaucgugaccuucuuucaagaggucccccacguuauugaagaggugaugaacaucgugcugauugcccucagcauccuggcuguccuuaaggggcuguacaauuucgccacaugcggacucgugggccugcuuacguuucugcuccugugugggagauccugcaccgcgucucgguauaaaggaguuuacgaacugcagacacucgagcugaacauggaaacccuuaauauguguaugccucugagcugcacaaagaacaauucccaucacuauauuauggugggcaacgagaccgggcucgagcugacacuuaccaauacgucuaucaucaaccauaaauucuguaaucugagcgacgcucacaagaaaaaccucuacgaucaugcccugauguccauuaucucuaccuuucaccugagcauuccgaauuucaaccaguaugaagccauguccugcgacuuuaauggaggcaagaucagcguccaguacaaccucucucacuccuaugcuggcgaugccgcuaaucauugugggacaguggccaacggaguucugcaaaccuucaugcgcauggcguggggcgggagcuacauugcccuugacucuggacacggcuccugggauugcaucaugacaagcuaccaguaucugauuauccagaacaccacgugggaggaccauugucaguuuucuagacccuccccuaucggguaccucggacugcuuagccaacggacacgcgauauuuauaucuccagacggcugcucggcaccuucacauggacccugucugacagcgaaggcaaggauacccccgggggauacugccugacacgcuggaugcucauugaggcugagcugaaauguuuuggcaauacggccguggcuaagugcaacgaaaaacacgacgaggaguucugcgauaugcuuagacuguuugacuucuguaagcaggccauccagcggcucaaagcggaagcccagauguccauucaacugaucaauaaggcugucaacgcccuuaucaaugaucagcugauuaugaagaaccaccuccgcgacaucauggggauuccuuauugcaauuacagcaaauauuguuaccugaaccauaccacaaccggaaagacaucucugcccaaaugcugucucguguccaauggcagcuaccugaacgaaacccacuucucugacgauaucgagcagcaagcugacaauaugauuacggagaugcuucagaaggaauauauggagagacaggggaaaacaccucugggacucguggaucuguuugucuucagcaccuccuuuuaccugaucucuaucuuccuucaucucguuaagauuccgacccaccggcauaucgugggcaaaagcugccccaagccucaccgccugaaccacaugggcauuuguuccugcgggcuguauaagcagcccggagugccugucaaauggaagagaugaggacuagucccuguucccagagcccacuuuuuuuucuuuuuuugaaauaaaauagccugucuuucagaucuaaaaaaaaaaaaaaaaaaaaaaaaaaaaaaaaaaaaaaaaaaaaaaaaaaaaaaaaaaaaaaaaaaaaaaaaaaaaaaaaaaaaaaaaaaaaaaaaaaaa

SEQ ID NO: 40828 - RNA, 1743 nt, Artificial Sequence
  mRNA product Design a-2 (A100) comprising derived and/or modified sequence from LASV(G1442-SLE-2011;Clade IV)__AIT17180__GPCmut12 (opt5)
aggagaguccgcucagccagguugcagaagcggcuuagcguguguccuaaucuucucucugcguguagguaggccugugccgcaaacaagcuuaccaugggccagaucgugaccuucuuucaagaggucccccacguuauugaagaggugaugaacaucgugcugauugcccucagcauccuggcuguccuuaaggggcuguacaauguggccacaugcggacucauuggccugguuacguuccuucugcucugugggagauccugcaccacaacccuguauaaaggaguguacgaacugcagacacucgagcugaacauggaaacccuuaauauguguaugccucugucuugcacaaagaacaauagccaucacuauauccgggucggcaacgagaccgggcucgagcugacgcuuaccaauacauccaucauuaaccauaaauuuuguaaucugucugacgcgcacaagaaaaaccucuacgaucaugcucugaugagcaucauuuccaccuuccaccugucuaucccgaauuuuaaccaguaugaagccaugagcugcgacuucaauggaggcaagauuuccgugcaguacaaccucagccacucuuaugccggcgaugcugccaaucauugugggacaguugcuaacggagugcugcaaaccuuuaugcgcauggccuggggcggguccuacaucgcgcuugacagcggaagaggcaacugggauugcauuaugacgucuuaccaguaucugaucauccagaauacaaccugggacgaucacugucaguucucccggcccagcccuauuggguaccucggacugcuuucucaacgcacaagagacgucuauaucucccggcgccugcucggcaccuuuaccuggacacugagcgauuccgagggcaaggacacgcccgggggauacugccugaccagauggaugcucauugaagccgagcugaaauguuucggcaacacagcuguggccaagugcaaugagaaacaugaugaagaguuuugcgacaugcuucggcuguucgauuuuuguaagcaggcuauccagcgccucaaagccgaagcgcagaugucuauucaacugaucaacaaggccgugaaugcucuuaucaacgaccagcugauuaugaagaaucaccucagagacaucauggggauuccuuauugcaacuacagcaaauauuguuaccugaauaacaccgccacaggaaagaccucccugcccaaaugcugucucaucagcaauggcucuuaccugaacgagacgcacuucuccgaugacauugaacaggaggcugauaauaugaucacagagaugcuucaaaaggaauauauggagcggcaggggaaaaccccucugggacucgucgaccuguucguuuuuagcaccucuuucuaccugaucagcauuuuucuucaucucgugaagaucccgacacaccgccauauugugggcaaauccugccccaagccucacagacugaaccauaugggcaucuguucuugcgggcuguauaagcagcccggagucccugugcgguggaaacgcugaggacuagucccuguucccagagcccacuuuuuuuucuuuuuuugaaauaaaauagccugucuuucagaucuaaaaaaaaaaaaaaaaaaaaaaaaaaaaaaaaaaaaaaaaaaaaaaaaaaaaaaaaaaaaaaaaaaaaaaaaaaaaaaaaaaaaaaaaaaaaaaaaaaaa

SEQ ID NO: 40829 - RNA, 1743 nt, Artificial Sequence
  mRNA product Design a-2 (A100) comprising derived and/or modified sequence from LASV(G3010-SLE-2013;Clade IV)__AIT17344__GPCmut12 (opt5)
aggagaguccgcucagccagguugcagaagcggcuuagcguguguccuaaucuucucucugcguguagguaggccugugccgcaaacaagcuuaccaugggccagaucgugaccuucuuucaagaggucccccacguuauugaagaggugaugaacaucgugcugauugcccucagcauccuggcuguccuuaaggggcuguacaauuucgccacaugcggacucgugggccugguuacguuucuucugcucugugggagauccugcaccacaucucuguauaaaggaguguacgaacugcagacccucgagcugaacauggaaacacuuaauauguguaugccucugagcugcaccaagaacaauucccaucacuauauuauggucggcaacgagacagggcucgagcugacccuuacgaauaccucuaucaucaaccauaaauucuguaaucugagcgacgcgcacaagaaaaaccucuacaaucaugcucugauguccauuaucucuacauuucaccugagcauuccgaacuucaaucaguaugaagccauguccugcgauuuuaacggaggcaagaucagcgugcaguacaaucucucucacuccuaugccggcgacgcugccagccauugugggaccguugcuaacggagugcugcaaacauucaugcggauggccuggggcgggucuuacauugcgcuugauuccggauacggcaagugggacugcaucaugaccagcuaucaguaccugauuauccagaacacgacaugggaggaucacugucaguuuucucgccccuccccuaucggguaucucggacugcuuagccaaagaacccgggacauuuacaucucccgcagacugcucggcacauucaccuggacccugucugauagcgaaggcaaagacacacccgggggauauugccugacgcgguggaugcucauugaggccgagcugaaguguuuuggcaauaccgcugucgccaaaugcaacgaaaagcaugaugaggaguucugcgacaugcuucgccuguuugauuucuguaaacaggcuauccagagacucaagacagaagcccagauguccauucaacugaucaauaaggcggugaacgcccuuaucaaugaccagcugauuaugaaaaaccaccuccgggauaucauggggauuccuuacugcaauuauagcaaguacuguuaccugaaccacaccacaaccggaaaaacgucucugcccaagugcugucucguguccaauggcagcuaucugaacgaaacacauuucucugacgacaucgagcagcaagcugauaauaugauuaccgagaugcuucagaaagaauacauggagcgccaggggaagaccccucugggacucgucgaccuguuuguuuucagcacauccuuuuaucugaucucuaucuuccuucaccucgugaaaauuccgacccauagacacaucgugggcaagagcugccccaagccucaucggcugaaccacaugggcauuuguuccugcgggcuguacaaacagcccggagucccugugcgcuggaagagaugaggacuagucccuguucccagagcccacuuuuuuuucuuuuuuugaaauaaaauagccugucuuucagaucuaaaaaaaaaaaaaaaaaaaaaaaaaaaaaaaaaaaaaaaaaaaaaaaaaaaaaaaaaaaaaaaaaaaaaaaaaaaaaaaaaaaaaaaaaaaaaaaaaaaa

SEQ ID NO: 40830 - RNA, 1743 nt, Artificial Sequence
  mRNA product Design a-2 (A100) comprising derived and/or modified sequence from LASV(G502-SLE-2009;Clade IV)__AIT17126__GPCmut12 (opt5)
aggagaguccgcucagccagguugcagaagcggcuuagcguguguccuaaucuucucucugcguguagguaggccugugccgcaaacaagcuuaccaugggccagaucgugaccuucuuucaagaggucccccacguuauugaagaggugaugaacaucgugcugauugcccucagcauccuggcuguccuuaaggggcuguacaauuucgccacaugcggacucgugggccugcuuacguuucugcuccugugugggagauccugcaccacaggacuguauaaaggcguuuacgaacuccagacccuggagcuuaacauggaaacacugaauauguguaugccucucucuugcaccaagaacaauagccaucacuauauuaugguggggaacgagacaggacuggagcuuacccugacgaauaccuccaucaucaaccauaaauucuguaaucucucugacgcgcacaagaaaaaccuguacgaucaugcucugaugagcauuaucuccacauuucaccucucuauuccgaauuucaaccaguaugaagccaugagcugcgacuuuaauggcggcaagaucuccguccaguacaaccugagccacucuuaugccggggaugcugccgaccauuguggaaccguggcuaauggcguucuucaaacauucaugcggauggccuggggaggguccuacauugcgcuggauagcggccgcgggagaugggacugcaucaugaccucuuaccaguaucucauuauccagaacacgacaugggaggaucacugucaguuuucccggcccagcccuaucggauaccugggccuucugucucaacgcaccagagacauuuauaucucccggcgccuccugggcacauucaccuggacccugagcgauuccgaagggaaggacacacccggaggcuacugccucacgagauggaugcugauugaggccgagcuuaaauguuuugggaacaccgcuguggccaagugcaaugaaaaacaugaugaggaguucugcgacaugcugcggcucuuugauuucuguaagcaggcuauccagcgccugaaagccgaagcgcagaugucuauucaacuuaucaacaaggccgucaaugcucugaucaacgaccagcucgugaugaagaaucaccugagagacauuaugggaaucccuuauugcaacuacagccgguauuguuaccugaaucacacaaccacaggccgcaccucccuccccaaaugcugucuggugagcaacgggucuuaccuuaaugaaacgcauuucuccgaugacauugagcagcaagccgauaacaugaucacagagaugcugcagaaggaauauauggagagacagggaaaaaccccucucggccuggucgaccuguuuguuuucagcaccucuuuuuaccuuauuagcaucuuccuccaccuggugaagaucccgacacaucggcacauugugggcaaauccugccccaagccucaucgccugaaucacauggggaucuguucuugcggacucuauaaacagcccggcgucccugugaaguggaagagaugaggacuagucccuguucccagagcccacuuuuuuuucuuuuuuugaaauaaaauagccugucuuucagaucuaaaaaaaaaaaaaaaaaaaaaaaaaaaaaaaaaaaaaaaaaaaaaaaaaaaaaaaaaaaaaaaaaaaaaaaaaaaaaaaaaaaaaaaaaaaaaaaaaaaa

SEQ ID NO: 40831 - RNA, 1743 nt, Artificial Sequence
  mRNA product Design a-2 (A100) comprising derived and/or modified sequence from LASV(G733-SLE-2010;Clade IV)__AIT17154__GPCmut12 (opt5)
aggagaguccgcucagccagguugcagaagcggcuuagcguguguccuaaucuucucucugcguguagguaggccugugccgcaaacaagcuuaccaugggccagaucgugaccuucuuucaagaggucccccacguuauugaagaggugaugaacaucgugcugauugcccucagcauccuggcuguccuuaaggggcuguacaauuucgccacaugcggaauugugggccucguuuccuuucugcuucugugugggagaucuugcacgaccagccucuauaaaggaguguacgaacugcagacacuggagcucaacauggaaacccugaauauguguaugccucuuuccugcacaaagaacaauucucaucacuauaucauggucggcaacgagaccgggcuggagcucacacugaccaauacgagcaucauuaaccauaaauucuguaaucuuuccgacgcgcacaagaaaaaccuguacgaucaugcucucaugucuaucauuagcaccuuucaccuguccaucccgaauuucaaccaguaugaagccaugagcugcgacuuuaauggaggcaagauuucugugcaguacaaccugucccacagcuaugccggcgaugcugccaaucauugugggacaaucgcuaacggaguucuccaaaccuucaugcggauggccuggggcgggucuuacauugcgcuggacuccggacgcgauagaugggacugcaucaugacaagcuaccaguaucuuaucauucagaacaccacgugggaggaucacugucaguuuucucggcccuccccuaucggcuaccuggggcuccugagccaacgcacaagagacauuuauaucucccggcgccuucugggaaccuucacauggacccucucugauagcgaaggcaaggacacccccggcggguacugccugacaagauggaugcugauugaggccgagcucaaauguuuuggaaauacggcuguggccaagugcaacgaaaaacaugaugaggaguucugcgacaugcugcggcuuuuugauuucuguaagcaggcuauccagcgccugaaagccgaagcgcagauguccauccaacucauuaauaaggccgucaacgcucugaucaaugaccagcuuauuaugaagaaccaccugagagacaucaugggcauuccuuauugcaauuacagcaaauauuguuaccucaaccacaccacaaccgggaagacaucucugcccaaaugcugucugguguccaauggaagcuaccucaacgaaacccauuucucugaugacaucgagcagcaagccgauaauaugaucacggagaugcugcagaaggaauauauggagcggcagggcaaaacaccucuugggcugguggaccucuuugucuucagcaccuccuuuuaccugauuucuaucuuccugcaccuuguuaagauuccgacccaucgccacguggugggaaaaagcugccccaagccucauagacucaaccacaugggcaucuguuccugcggccuguaugggcagcccggagucccugugaaguggaaacggugaggacuagucccuguucccagagcccacuuuuuuuucuuuuuuugaaauaaaauagccugucuuucagaucuaaaaaaaaaaaaaaaaaaaaaaaaaaaaaaaaaaaaaaaaaaaaaaaaaaaaaaaaaaaaaaaaaaaaaaaaaaaaaaaaaaaaaaaaaaaaaaaaaaaa

SEQ ID NO: 40832 - RNA, 1743 nt, Artificial Sequence
  mRNA product Design a-2 (A100) comprising derived and/or modified sequence from MOPV/LASV reassortant(IGS-1;Clade IV)__AFY05576__GPCmut12 (opt5)
aggagaguccgcucagccagguugcagaagcggcuuagcguguguccuaaucuucucucugcguguagguaggccugugccgcaaacaagcuuaccaugggccagaucgugaccuucuuucaagaggucccccacguuauugaagaggugaugaacaucgugcugauugcccucagcguccuggcugugcuuaaggggcuguacaauuucgccacaugcggacucguuggccuggugacguuucuucugcucugugggagauccugcaccacaucucuguauaaaggagucuacgaacugcagacccucgagcugaacauggaaacacuuaauauguguaugccucugagcugcaccaagaacaauucccaucacuauaucauggugggcaacgagacagggcucgagcugacccuuacgaauaccucuauuaucaaccauaaauucuguaaucugagcgacgcgcacaagaaaaaccucuacgaucaugcucugauguccaucauuucuacauuucaccugagcaucccgaauuucaaccaguaugaagccauguccugcgacuuuaauggaggcaagauuagcguucaguacaaccucucucacuccuaugccggcgaugcugccaaucauugugggaccguggcuaacggaguccugcaaacauucaugcggauggccuggggcgggagcuacaucgcgcuugacucuggacgcggcaacugggauugcauuaugaccuccuaccaguaucugaucauucagaauacgacaugggaggaccacugucaguuuagcagacccucuccuaucggguaccucggacugcuuucccaacggacccgcgauaucuauauuagcagacggcugcucggcacauucaccuggacccuguccgacucugaaggcgaggauacacccgggggauacugccugacgcgcuggaugcucaucgaggccgaacugaaguguuuuggcaacaccgcuguggccaaaugcaaugagaagcaugacgaagaguucugcgauaugcuuagacuguuugacuucuguaaacaggcuauucagcggcucaaggccgaagcgcagaugagcauccaacugauuaacaaagccgugaaugcucuuaucaacgaucagcugaucaugaagaaucaccuccgcgacauuauggggaucccuuauugcaacuacuccaaguauuguuaccugaaucacacaaccacaggaagaaccagccugcccaaaugcugucucgucucuaacggcuccuaccugaaugagacgcauuucagcgacgauauugagcagcaagccgacaacaugaucacagaaaugcuucagaaggaguauauggaacggcaggggaaaaccccucugggacucguugaucuguuuguguucucuaccagcuuuuaccugauuuccaucuuccuucaccucgugaagaucccgacacaucgccacauugucggcaaaucuugccccaagccucauagacugaaucacaugggcaucuguagcugcgggcuguauaaacagcccggagugccuguuaaguggaagcggugaggacuagucccuguucccagagcccacuuuuuuuucuuuuuuugaaauaaaauagccugucuuucagaucuaaaaaaaaaaaaaaaaaaaaaaaaaaaaaaaaaaaaaaaaaaaaaaaaaaaaaaaaaaaaaaaaaaaaaaaaaaaaaaaaaaaaaaaaaaaaaaaaaaaa

SEQ ID NO: 40833 - RNA, 1743 nt, Artificial Sequence
  mRNA product Design a-2 (A100) comprising derived and/or modified sequence from LASV(LM765-SLE-2012;Clade IV)__AIT17814__GPCmut12 (opt5)
aggagaguccgcucagccagguugcagaagcggcuuagcguguguccuaaucuucucucugcguguagguaggccugugccgcaaacaagcuuaccaugggccagaucgugaccuucuuucaagaggucccccacguuauugaagaggugaugaacaucgugcugauugcccucagcauccuggcuguccuuaaggggcuguacaauuucgccacaugcggacucgugggccugguuacguuucuucugcucugugggagauccugcaccacaucucuguauaaaggaguguacgaacugcagacccucgagcugaacauggaaacacuuaauauguguaugccucugagcugcaccaagaacaauucccaucacuauauuauggucggcaacgagacagggcucgagcugacccuuacgaauaccucuaucaucgaccauaaauucuguaaccugagcgaugcgcaccggaagaaucucuacgaccaugcucugauguccauuaucucuacauuucaccugagcauuccgaacuucaaucaguaugaagccauguccugcgauuuuaacggaggcaaaaucagcgugcaguacaaucucucucacuccuaugccaaggacgcugccgaucauuguggcaccguugcuaacggggugcugcaaacauucaugcgcauggccuggggaggcagcuacauugcgcuugacucugggagaggacggugggauugcaucaugaccuccuaccaguaucugauuauccagaauacgacaugggaggaccacugucaguuuagccgccccucuccuaucggcuaccucgggcugcuuucccaaagaacccgggauauuuauaucagccgcagacugcucggaacauucaccuggacccuguccgacucugaaggcaaggauacacccggcggguacugccugacgcgguggaugcucauugaggccgagcugaaauguuuuggaaacaccgcugucgccaagugcaacgaaaaacaugacgaggaguucugcgauaugcuucgccuguuugacuucuguaagcaggcuauccagagacucaaagccgaagcgcagaugagcauucaacugaucaauaaggccgugaacgcucuuaucaaugaccagcugauuaugaagaaccaccuccgggauaucaugggcauuccuuauugcaauuacuccaaauauuguuaccugaaccacacaaccacagggaagaccagccugcccaaaugcugucucgugucuaauggauccuaccugaacgaaacgcauuucagcgacgauaucgagcagcaagccgacaauaugauuacagagaugcuucagaaggaauauauggagcgccagggcaaaaccccucuggggcucgucgaucuguuuguuuucucuaccagcuuuuaccugaucuccaucuuccuucaccucgugaagauuccgacacauagacacaucgugggaaaacccugcccuaagccccaucggcugaaccacaugggcauuuguucuugcggccuguauaagcagccugggguccccgugaaauggaagcgcugaggacuagucccuguucccagagcccacuuuuuuuucuuuuuuugaaauaaaauagccugucuuucagaucuaaaaaaaaaaaaaaaaaaaaaaaaaaaaaaaaaaaaaaaaaaaaaaaaaaaaaaaaaaaaaaaaaaaaaaaaaaaaaaaaaaaaaaaaaaaaaaaaaaaa

SEQ ID NO: 40834 - RNA, 1743 nt, Artificial Sequence
  mRNA product Design a-2 (A100) comprising derived and/or modified sequence from LASV(LM776-SLE-2012;Clade IV)__AIT17824__GPCmut12 (opt5)
aggagaguccgcucagccagguugcagaagcggcuuagcguguguccuaaucuucucucugcguguagguaggccugugccgcaaacaagcuuaccaugggccagaucgugaccuucuuucaagaggucccccacguuauugaagaggugaugaacaucgugcugauugcccucagcauccuggcuguccuuaaggggcuguacaauuucgccacaugcggacucgugggccugguuacguuucuucugcucugugggagauccugcaccacaucuguguauaaaggagucuacgaacugcagacccuggagcucaacauggaaacacugaauauguguaugccucuuagcugcaccaagaacaauucccaucacuauauuauggugggcaacgagacagggcuggagcucacccugacgaauaccucuaucaucaaccauaaauucuguaaucuuagcgacgcgcacaagaaaaaccuguacgaucaugcucucauguccauuaucucuacauuucaccugagcauuccgaauuucaaccaguaugaagccauguccugcgacuuuaauggaggcaagaucagcguucaguacaaccugucucacuccuaugccggcgaugcugccaaucauugugggaccguggcuaacggaguccuccaaacauucaugcggauggccuggggcgggagcuacauugcgcuggacucuggacacggcaagugggauugcaucaugaccuccuaccaguaucuuauuauccagaacacgacaugggaggaccauugucaguuuagccgccccucuccuaucggguaccugggacuccugucccaaagaacccgggauauuuauaucagccgcagacuucugggcacauucaccuggacccucuccgacucugaaggcaaagauacacccgggggauacugccugacgcgguggaugcugauugaggccgagcucaaguguuuuggcaauaccgcuguggccaaaugcaacgaaaagcacgacgaggaguucugcgauaugcugcgccuuuuugacuucuguaaacaggcuauccagagacugaaggccgaagcgcagaugagcauucaacucaucaauaaggccgugaacgcucugaucaaugaucagcuuauuaugaaaaaccaucugcgggacaucauggggauuccuuauugcaauuacuccaaguauuguuaccucaaccacacaaccacaggaaaaaccagccugcccaagugcugucuggucucuaauggcuccuaccucaacgaaacgcacuucagcgacgauaucgagcagcaagccgacaauaugauuacagagaugcugcagaaagaauauauggagcgccaggggaagaccccucuuggacugguugaucucuuuguguucucuaccagcuuuuaccugaucuccaucuuccugcaucuugugaaaauuccgacacacagacauaucgucggcaagucuugccccaagccucaccggcucaaccacaugggcauuuguagcugcgggcuguauaaacagcccggagugccuguucgcuggaagagaugaggacuagucccuguucccagagcccacuuuuuuuucuuuuuuugaaauaaaauagccugucuuucagaucuaaaaaaaaaaaaaaaaaaaaaaaaaaaaaaaaaaaaaaaaaaaaaaaaaaaaaaaaaaaaaaaaaaaaaaaaaaaaaaaaaaaaaaaaaaaaaaaaaaaa

SEQ ID NO: 40835 - RNA, 1743 nt, Artificial Sequence
  mRNA product Design a-2 (A100) comprising derived and/or modified sequence from LASV(Mad39;Clade IV)__ANH09722__GPCmut12 (opt5)
aggagaguccgcucagccagguugcagaagcggcuuagcguguguccuaaucuucucucugcguguagguaggccugugccgcaaacaagcuuaccaugggccagaucgugaccuucuuucaagaggucccccacguuauugaagaggugaugaacaucgugcugauugcccucagcauccuggcuguccuuaaggggcuguacaauguggccacaugcggacucauuggccugguuacguuccuucugcucugugggagauccugcaccacaacccuguauaaaggaguguacgaacugcaggcgcucgagcugaacauggaaacacuuaauauguguaugccucugucuugcaccaagaacaauagccaucacuauauccgggucggcaacgagacagggcucgagcugacccuuacgaauaccucccugaucaaccauaaauuuuguaaucucucugacgcucacaagaaaaaccuguacgaucaugcccugaugagcauuaucuccacauuccaccucucuauuccgaauuuuaaccaguaugaagccaugagcugcgacuucaaugauggaaagaucuccgugcaguacaaccugagccacaccuaugcuggcgacacagccaaucauuguggcaccguugcuaacggggugcuucaaacguuuaugcgcauggccuggggaggcucuuacauugcgcuggauuccgggagaggaggcugggacugcaucaugacaagcuaccaguaucucauuauccagaacaccacaugggaggaucacugucaguucucucggcccuccccuaucggguaccugggacuucugagccaacgcaccagagacauuuauaucucucggcgccuccugggcaccuuuacauggacgcuguccgauagcgaaggcaaggacacccccgggggauacugccucacaagauggaugcugauugaggccgagcuuaaauguuucggcaauaccgcugucgccaagugcaacgaaaaacaugaugaggaauuuugcgacaugcugcgccucuucgauuuuuguaagcaggcuauccagcggcugaaagccgaggcgcagauguccauucaacuuaucaauaaggccgugaacgcucugaucaaugaccagcucauuaugaagaaccaccugagagacaucauggggauuccuuauugcaauuacucuaaauauuguuaccugaaccacacagugaccggaaagacgagccuccccaaaugcugucuggucuccaauggcagcuaccuuaacgaaacacauuucucugaugacaucgagcagcaagccgauaauaugauuaccgagaugcugcagaaggaauauauggagcggcaggggaaaaccccucucggacugguugaccuguucguguuuuccaccagcuucuaccuuaucucuaucuuucuccaccuggugaagauuccgacacaucgccacgucgugggcaaacccugcccuaagccccauagacugaaccacaugggcaucuguagcugcggguucuauaagcagccuggaguucccgugcgguggaaacgcugaggacuagucccuguucccagagcccacuuuuuuuucuuuuuuugaaauaaaauagccugucuuucagaucuaaaaaaaaaaaaaaaaaaaaaaaaaaaaaaaaaaaaaaaaaaaaaaaaaaaaaaaaaaaaaaaaaaaaaaaaaaaaaaaaaaaaaaaaaaaaaaaaaaaa

SEQ ID NO: 40836 - RNA, 1743 nt, Artificial Sequence
  mRNA product Design a-2 (A100) comprising derived and/or modified sequence from LASV(Z0947-SLE-2011;Clade IV)__AIT17840__GPCmut12 (opt5)
aggagaguccgcucagccagguugcagaagcggcuuagcguguguccuaaucuucucucugcguguagguaggccugugccgcaaacaagcuuaccaugggccagaucgugaccuucuuucaagaggucccccacguuauugaagaggugaugaacaucgugcugauugcccucagcauccuggcuguccuuaaggggcuguacaauuucgccacaugcggacucgugggccugguuacguuucuucugcucugugggagauccugcaccauuucucuguauaaaggaguguacgaacugcagacacucgagcugaacauggaaacccuuaauauguguaugccucugagcugcacaaagaacaauucccaucacuauaucauggucggcaacgagaccgggcucgagcugacacuuaccaauacgucuaucauuaaccauaaauucuguaaucugagcgacgcgcacaagaaaaaccucuacgaucaugcucugauguccaucauuucuaccuuucaccugagcaucccgaauuucaaccaguaugaagccauguccugcgacuuuaauggaggcaagauuagcgugcaguacaaccucucucacuccuaugccggcgaugcugccaaucauugugggacaguugcuaacggagugcugcaaaccuucaugcggauggccuggggcgggagcuacaucgcgcuugacucuggacgcgauagaugggacugcauuaugacauccuaccaguaucugaucauccagaacaccacgugggaggaucacugucaguuuagccggcccucuccuauuggcuaccucgggcugcuuucccaacgcacaagagacaucuauauuagccggcgccugcucggaaccuucacauggacccuguccgauucugaaggcaaggacacccccggcggguacugccugacaagauggaugcucaucgaggccgagcugaaauguuuuggaaauacggcugucgccaagugcaacgaaaaacaugaugaggaguucugcgacaugcuucggcuguuugauuucuguaagcaggcuauucagcgccucaaagccgaagcgcagaugagcauccaacugaucaauaaggccgugaacgcucuuauuaaugaccagcugaucaugaagaaccaccucagagacauuaugggcaucccuuauugcaauuacuccaaauauuguuaccugaaccacaccacaaccgggaagacaagccugcccaaaugcugucucgugucuaauggauccuaccugaacgaaacccauuucagcgaugacauugagcagcaagccgauaauaugaucacggagaugcuucagaaggaauauauggagcggcagggcaaaacaccucuggggcucgucgaccuguuuguuuucucuaccagcuuuuaccugaucuccauuuuccuucaccucgugaagaucccgacccaucgccacauugugggaaaacccugcccuaagccccauagacugaaccacaugggcaucuguucuugcggccuguauaagcagccugggguccccgugaaauggaagcggugaggacuagucccuguucccagagcccacuuuuuuuucuuuuuuugaaauaaaauagccugucuuucagaucuaaaaaaaaaaaaaaaaaaaaaaaaaaaaaaaaaaaaaaaaaaaaaaaaaaaaaaaaaaaaaaaaaaaaaaaaaaaaaaaaaaaaaaaaaaaaaaaaaaaa

SEQ ID NO: 40837 - RNA, 1781 nt, Artificial Sequence
  mRNA product Design b-4 (hSL-A64-N5) comprising derived and/or modified sequence from LASV(Josiah;Clade IV)__NP_694870__GPCmut12 (opt1)
aggagagucccgcagucggcguccagcggcucugcuuguucgugugugugucguugcaggccuuauucaagcuuaccaugggccagaucgugaccuucuuccaggaggucccccacgugaucgaggaggugaugaacaucguccugaucgcccucagcgugcuggccgugcugaaggggcucuacaacuucgcgaccugcggccuggucgggcuggugacguuccuccugcugugcggccgcuccugcaccaccagccucuacaaggggguguacgagcugcagacccuggagcucaacauggagacgcugaacaugugcaugccgcuguccugcaccaagaacaacagccaccacuacaucauggucggcaacgagaccggccucgagcugacgcugaccaacaccuccaucaucaaccacaaguucugcaaccucagcgacgcccacaagaagaaccuguacgaccacgcccugauguccaucaucagcaccuuccaccucuccauccccaacuucaaccaguacgaggccaugagcugcgacuucaacgggggcaagaucuccgugcaguacaaccugagccacuccuacgccggggacgcggccaaccacugcggcacgguggccaacgggguccugcagaccuucaugcggauggccuggggcggcagcuacaucgcgcucgacuccgggcgcggcaacugggacugcaucaugaccagcuaccaguaccugaucauccagaacaccacgugggaggaccacugccaguucucccggcccagccccaucggguaccugggccuccugucccagcgcacccgggacaucuacaucagccgccggcugcucggcaccuucaccuggacgcugagcgacuccgaggggaaggacaccccgggcggguacugccugacccgcuggaugcucaucgaggccgagcugaagugcuucggcaacaccgccguggccaagugcaacgagaagcacgacgaggaguucugcgacaugcugcggcuguucgacuucugcaagcaggccauccagcgccugaaggcggaggcccagaugagcauccagcugaucaacaaggccgugaacgcccucaucaacgaccagcugaucaugaagaaccaccuccgggacaucauggggauccccuacugcaacuacuccaaguacugcuaccucaaccacacgaccaccggccgcaccagccugcccaagugcugccuggucuccaacggcagcuaccucaacgagacgcacuucuccgacgacaucgagcagcaggccgacaacaugaucaccgagaugcugcagaaggaguacauggagcggcaggggaagacgccccugggccucguggaccuguucguguucagcaccuccuucuaccugaucagcaucuuccugcaccucgucaagaucccgacccaccgccacaucguggggaaguccugccccaagccccaccggcugaaccacaugggcaucugcagcugcgggcuguacaagcagcccggcgugccggucaaguggaagcgcugaggacuaguaauaaggaaacuguaugaaugucugugggcaggaagugaagagauccuucuguaaagguuuuuggaauuaugucugcugaauaauaaacuuuuuugaaauaauaaaucugguagaaaaaugagaucucaaaggcucuuuucagagccaccaaaaaaaaaaaaaaaaaaaaaaaaaaaaaaaaaaaaaaaaaaaaaaaaaaaaaaaaaaaaaaaaagaauu

SEQ ID NO: 40838 - RNA, 1778 nt, Artificial Sequence
  mRNA product Design b-4 (hSL-A64-N5) comprising derived and/or modified sequence from LASV(LP;Clade I)__AAF86701__GPCmut12 (opt1)
aggagagucccgcagucggcguccagcggcucugcuuguucgugugugugucguugcaggccuuauucaagcuuaccaugggccagaucaucaccuucuuccaggaggugccccacgucaucgaggaggugaugaacaucgugcugaucgcccucagccugcuggccauccucaaggggcuguacaacaucgcgaccugcggcaucaucgggcuggucgccuuccucuuccugugcggcaaguccugcagccugacgcucaagggcggguacgagcugcagacccuggagcucaacauggagacccugaacaugugcaugccgcuguccugcacgaagaacagcucccaccacuacauccgcgugggcaacgagaccgggcucgagcugacccugaccaacacgagcaucaucaaccacaaguucugcaaccucuccgacgcccacaagaagaaccuguacgaccacgcccugaugagcaucaucuccaccuuccaccucagcauccccaacuucaaccaguacgaggccauguccugcgacuucaacggcgggaagaucagcgugcaguacaaccugucccacagcuacgcgggcgacgccgccgagcacugcgggaccgucgccaacggcgugcugcagaccuucaugcggauggcguggggcgggcgcuacaucgcccucgacuccggcaaggggaacugggacugcaucaugacgagcuaccaguaccugaucauccagaacaccaccugggaggaccacugccaguucucccggcccagccccaucggcuaccugggccuccugucccagcgcacccgggacaucuacaucagccgccggcugcucgggacguucaccuggacccugagcgacuccgagggcaacgagacccccgggggcuacugccugacgcgcuggaugcucaucgaggccgagcugaagugcuucgggaacaccgccguggccaagugcaacgagaagcacgacgaggaguucugcgacaugcugcggcuguucgacuucugcaagcaggcgauccgccggcugaaggccgaggcccagaugagcauccagcugaucaacaaggccgucaacgcccucaucaacgaccagcugaucaugaagaaccaccuccgcgacaucaugggcauccccuacugcaacuacuccaaguacugcuaccucaaccacaccagcuccggccggaccagccugcccaagugcugccugaucuccaacgggagcuaccucaacgagacgcaguucuccgacgacaucgagcagcaggcggacaacaugaucaccgagaugcugcagaaggaguacaucgagcgccagggcaagaccccgcuggggcucguggacaucuucaucuucagcaccuccuucuaccugaucagcaucuuccugcaccugaucaagaucccgacgcaccggcacaucgugggcaagcccugccccaagccccaccgccucaaccacaugggggucugcuccugcggccuguacaagcacccgggcgugcccaccaaguggaagcggugaggacuaguaauaaggaaacuguaugaaugucugugggcaggaagugaagagauccuucuguaaagguuuuuggaauuaugucugcugaauaauaaacuuuuuugaaauaauaaaucugguagaaaaaugagaucucaaaggcucuuuucagagccaccaaaaaaaaaaaaaaaaaaaaaaaaaaaaaaaaaaaaaaaaaaaaaaaaaaaaaaaaaaaaaaaaagaauu

SEQ ID NO: 40839 - RNA, 1778 nt, Artificial Sequence
  mRNA product Design b-4 (hSL-A64-N5) comprising derived and/or modified sequence from LASV(803213;Clade II)__AAF86703__GPCmut12 (opt1)
aggagagucccgcagucggcguccagcggcucugcuuguucgugugugugucguugcaggccuuauucaagcuuaccaugggccagaucaucaccuucuuccaggaggugccccacgucaucgaggaggugaugaacaucgugcugaucgcccucagccugcuggccauccucaaggggaucuacaacgucgcgaccugcggccuguucgggcugaucuccuuccuccugcugugcggccgcagcugcuccgugacguacaaggggguguacgagcuccagacccuggagcugaacauggccaaccucaacaugugcaugccgcugagcugcaccaagaacaacucccaccacuacaucauggucggcaacgagacgggccuggagcucacccugaccaacaccagcaucaucaaccacaaguucugcaaccuguccgacgcccacaagaagaaccucuacgaccacgcccugaugagcaucaucuccacguuccaccugagcauccccaacuucaaccaguacgaggccauguccugcgacuucaacgggggcaagaucagcgugcaguacaaccucucccacagcuucgcgguggacgccgccaaccacugcgggaccaucgccaacggcguccugcagaccuucaugcggauggcguggggcggguccuacaucgcccuggacagcggcaaggggaacugggacugcaucaugaccuccuaccaguaccucaucauccagaacacgaccugggaggaccacugccaguucagccgccccucccccaucggcuaccuggggcugcucagccagcggacccgcgacaucuacaucagccggcgccugcugggcaccuucacguggacccucuccgacagcgagggcaacgaggcccccgggggcuacugccugacccgguggaugcugaucgaggccgagcucaagugcuucgggaacaccgccguggcgaagugcaacgagaagcacgacgaggaguucugcgacaugcugcgccuguucgacuucugcaagcaggccaucaagcggcucaagacggaggcccagauguccauccagcugaucaacaaggccgugaacgcccugaucaacgaccagcucaucaugaagaaccaccuccgcgacaucaugggcauccccuacugcaacuacagccgguacugcuaccugaaccacaccgucaccgggaagaccucccugccccgcugcugccuggugagcaacggcuccuaccugaacgagacgcacuucagcgacgacaucgagcagcaggcggacaacaugaucaccgagaugcuccagaaggaguacauggaccggcagggcaagaccccgcuggggcugguggaccucuucgucuucuccaccagcuucuaccugaucuccaucuuccugcaccuggugaagaucccgacgcaccgccacaucgugggcaagcccugccccaagccccaccggcucaaccacauggggaucugcagcugcggccuguacaagcacccggggguccccgugaaguggaagcgcugaggacuaguaauaaggaaacuguaugaaugucugugggcaggaagugaagagauccuucuguaaagguuuuuggaauuaugucugcugaauaauaaacuuuuuugaaauaauaaaucugguagaaaaaugagaucucaaaggcucuuuucagagccaccaaaaaaaaaaaaaaaaaaaaaaaaaaaaaaaaaaaaaaaaaaaaaaaaaaaaaaaaaaaaaaaaagaauu

SEQ ID NO: 40840 - RNA, 1778 nt, Artificial Sequence
  mRNA product Design b-4 (hSL-A64-N5) comprising derived and/or modified sequence from LASV(GA391;Clade III)__CAA36645__GPCmut12 (opt1)
aggagagucccgcagucggcguccagcggcucugcuuguucgugugugugucguugcaggccuuauucaagcuuaccaugggccagaucgugaccuucuuccaggaggucccccacgugaucgaggaggugaugaacaucguccugaucgcccucagcauccuggccauccugaaggggcucuacaacguggcgaccugcggccugaucgggcuggugacguuccuccugcuguccggccgcagcugcucccucaucuacaaggggaccuacgagcugcagacccuggagcucaacauggagacccugaacaugugcaugccgcugagcugcaccaagaacaacucccaccacuacauccgggucggcaacgagaccggccucgagcugacccugacgaacaccagcauccucaaccacaaguucugcaaccuguccgacgcccacaagcgcaaccuguacgaccacagccucauguccaucaucagcaccuuccaccuguccauccccaacuucaaccaguacgaggccaugagcugcgacuucaacgggggcaagaucaccgugcaguacaaccugucccacagcuucgccguggacgccgcggggcacugcggcacgcucgccaacgggguccugcagaccuucaugcggauggccuggggcggcuccuacaucgcccuggacagcgggcgcggcaacugggacugcaucaugaccuccuaccaguaccucaucauccagaacaccacgugggacgaccacugccaguucagccggcccucccccaucggguaccugggccugcucagccagcgcacccgggacaucuacaucagccgccggcugcugggcaccuucaccuggacgcucuccgacagcgaggggaacgagaccccgggcggguacugccugacccgcuggaugcugaucgaggcggagcucaagugcuucggcaacaccgccguggccaagugcaacgagaagcacgacgaggaguucugcgacaugcugcggcuguucgacuucugcaagcaggccauccgccggcucaagacggaggcccagauguccauccagcugaucaacaaggcggugaacgcccugaucaacgaccagcucaucaugaagaaccaccuccgcgacaucauggggauccccuacugcaacuacagccgguacugcuaccugaaccacaccuccaccggcaagaccagccugccccgcugcugccugaucuccaacggcagcuaccugaacgagacgaaguucuccgacgacaucgagcagcaggccgacaacaugaucaccgagaugcuccagaaggaguacaucgaccggcaggggaagacgccccugggccuggucgaccuguucguguucagcaccuccuucuaccucaucagcaucuuccugcaccuggugaagaucccgacccaccgccacaucgucgggaagcccugccccaagccccaccggcucaaccacaugggcaucugcuccugcgggcuguacaagcagccgggcgugcccgugcgcuggaagcggugaggacuaguaauaaggaaacuguaugaaugucugugggcaggaagugaagagauccuucuguaaagguuuuuggaauuaugucugcugaauaauaaacuuuuuugaaauaauaaaucugguagaaaaaugagaucucaaaggcucuuuucagagccaccaaaaaaaaaaaaaaaaaaaaaaaaaaaaaaaaaaaaaaaaaaaaaaaaaaaaaaaaaaaaaaaaagaauu

SEQ ID NO: 40841 - RNA, 1781 nt, Artificial Sequence
  mRNA product Design b-4 (hSL-A64-N5) comprising derived and/or modified sequence from LASV(AV;Clade V)__CCA30314__GPCmut12 (opt1)
aggagagucccgcagucggcguccagcggcucugcuuguucgugugugugucguugcaggccuuauucaagcuuaccaugggccagaucgugaccuucuuccaggaggucccccacgugaucgaggaggugaugaacaucguccugaucgcccucagcauccuggccgugcugaaggggcucuacaacaucgcgaccugcggccugaucgggcugaucacguuccuccugcugugcggccgcuccugcagcuccaaccucuacaaggggguguacgagcugcagagccuggaccucaacauggagacccugaacaugugcaugccgcuguccugcaccaagaacaacagccaccacuacauccgggucggcaacgacacgggccucgagcugacccugaccaacaccuccauccucaaccacaaguucugcaaccugagcgacgcccacaagaaggaccuguacgaccacgcccucauguccaucaucagcacguuccaccuguccauccccaacuucaaccaguacgaggccaugagcugcgacuucaacgggggcaagaucuccgugcaguacaaccugagccacuccuacgccaucgacgcggccaaccacugcgggaccguggccaacggcauccuccagaccuucaugcgcauggccuggggcgggagcuacaucgcgcuggacuccggccgggggaacugggacugcaucaugaccagcuaccaguaccugaucauccagaacacgaccugggagaaccacugccaguucucccgccccagccccaucggcuaccucgggcugcugagccagcggacccgcgacaucuacaucucccggcgccuccugggcaccuucacguggacccugagcgacuccgagggcaacgccacccccgggggcuacugccucacccgguggaugcugaucgaggccgagcugaagugcuucgggaacacggccgucgccaagugcaacgagaagcacgacgaggaguucugcgacaugcuccgccuguucgacuucugcaagcaggcgaucagccggcugaaguccgaggcccagaugagcauccagcucaucaacaaggccgugaacgcccugaucaacgaccagcugaucaugaagaaccaccuccgcgacaucaugggcauccccuacugcaacuacuccaaguacugcuaccugaaccacaccaucaccgggaagaccagccugcccaagugcugccucguguccaacggcagcuaccugaacgagacgcacuucuccgacgacaucgagcagcaggccgacaacaugaucaccgagaugcugcagaaggaguacauggagcggcagggcaagaccccgcucgggcuggucgaccuguucguguucagcaccuccuucuaccugaucagcaucuuccuccgccuggugaagaucccgacgcaccggcacaucgucggcaagcccugccccaagccccaccgccugaaccacauggggaucugcuccugcggccucuacaagcagccgggggugcccgugcgguggaagcgcugaggacuaguaauaaggaaacuguaugaaugucugugggcaggaagugaagagauccuucuguaaagguuuuuggaauuaugucugcugaauaauaaacuuuuuugaaauaauaaaucugguagaaaaaugagaucucaaaggcucuuuucagagccaccaaaaaaaaaaaaaaaaaaaaaaaaaaaaaaaaaaaaaaaaaaaaaaaaaaaaaaaaaaaaaaaaagaauu

SEQ ID NO: 40842 - RNA, 1778 nt, Artificial Sequence
  mRNA product Design b-4 (hSL-A64-N5) comprising derived and/or modified sequence from LASV(Togo/2016/7082;Clade VI)__AMR44577__GPCmut12 (opt1)
aggagagucccgcagucggcguccagcggcucugcuuguucgugugugugucguugcaggccuuauucaagcuuaccaugggccagaucaucaccuucuuccaggaggugccccacgucaucgaggaggugaugaacaucgugcugaucgcccucagccugcuggccauccucaagggggucuacaacguggcgaccugcggcaucaucgggcuggugacguuccuguuccucugcggccgcuccugcagccugaucuacaagggguccuacgagcugcagacccucgagcugaacauggagacccugaacaugugcaugccgcucagcugcacgaagaacuccagccaccacuacauccgggucggcaacgagaccggccuggagcugacccucaccaacacguccaucaucaaccacaaguucugcaaccugagcgacgcccacaagcgcaaccuguacgaccacgcccucauguccauccugagcaccuuccaccuguccauccccaacuucaaccaguacgaggccaugagcugcgacuucaacgggggcaagaucuccgugcaguacaaccucagccacgccuacgcgguggacgccgccgagcacugcgggaccgucgccaacggcgugcugcagaccuucaugcggauggcguggggcggguccuacaucgcccuggacagcggccgcgggaacugggacugcaucaugacguccuaccaguaccucaucauccagaacaccaccugggaggaccacugccaguucagccggcccucccccaucggcuaccuggggcugcucagccagcgcacccgggacaucuacaucagccgccggcugcugggcacguucaccuggacccucuccgacagcgagggcaacgagacccccgggggcuacugccugacgcgcuggaugcugaucgaggccgagcucaagugcuucgggaacaccgccguggccaagugcaacgagaagcacgacgaggaguucugcgacaugcugcggcuguucgacuucugcaagcaggcgauccagcgccucaaguccgaggcccagaugagcauccagcugaucaacaaggccgucaacgcccugaucaacgaccagcucaucaugaagaaccaccuccgggacaugaugggcauccccuacugcaacuacuccaaguacugcuaccugaaccacaccagcuccgggcgcaccagccugcccaagugcugccugguguccaacggcagcuaccugaacgagacgcacuucuccgacgacaucgagcagcaggccgacaacaugaucaccgagaugcuccagaaggaguacaucgaccggcagggcaagaccccgcuggggcugguggaccucuucgucuucagcaccuccuucuaccugaucagcaucuuccugcaccugaucaagaucccgacgcaccgccacaucgugggcaagcccugccccaagccccaccggcucaaccacauggggaucugcuccugcggccuguacaagcagccgggggugcccacccgcuggaagcggugaggacuaguaauaaggaaacuguaugaaugucugugggcaggaagugaagagauccuucuguaaagguuuuuggaauuaugucugcugaauaauaaacuuuuuugaaauaauaaaucugguagaaaaaugagaucucaaaggcucuuuucagagccaccaaaaaaaaaaaaaaaaaaaaaaaaaaaaaaaaaaaaaaaaaaaaaaaaaaaaaaaaaaaaaaaaagaauu

SEQ ID NO: 40843 - RNA, 1778 nt, Artificial Sequence
  mRNA product Design b-4 (hSL-A64-N5) comprising derived and/or modified sequence from LASV(KAK-428;Clade n.d. (VII))__ANH09740__GPCmut12 (opt1)
aggagagucccgcagucggcguccagcggcucugcuuguucgugugugugucguugcaggccuuauucaagcuuaccaugggccagaucgugaccuucuuccaggaggucccccacgugaucgaggaggugaugaacaucguccugaucgcccucagccugcuggccauccucaaggggcuguacaacuucgcgaccugcggcgugaucgggcugaucacguuccuccugcugugcggccgcuccugcagcgccaccuacaaggggcaguacgagcuccagacccuggagcugaacauggagucccucaacaugugcaugccgcugagcugcacgaagaacaacucccaccacuacauccgggccggcaacaacaccggccuggagcucacccugaccaacacgagcaucaucucccacaaguucugcaaccugagcgacgcccacaagaagaaccucuacgaccacacccugauguccaucaucaccaccuuccaccugagcauccccaacuucaaccaguacgaggccauguccugcgacuucaacgggggcaagaucagcauccaguacaaccucucccacagcuacgcgggggacgccgcccagcacugcggcacgguggccaacgggguccugcagaccuucaugcgcauggcguggggcggcuccuaccuggcccucgacagcgggcggcgcggcugggacugcaucaucuccagcuaccaguaccugaucauccagaacaccaccugggacgaccacugccaguucucccggcccagccccaucggguaccugggcuucgugagccagaagacgcgcgacaucuacaucucccggcgccuccugggcaccuucaccuggacccugagcgacuccgaggggcacgacaugccgggcggguacugccucacgcgguggaugcugaucgaggccgaccugaagugcuucggcaacaccgccguggccaagugcaacgagaagcacgacgaggaguucugcgacauguggcgccucuucgacuucugcaagcaggcgauccagcggcugaaggccgaggcccagaugaacauccagcugaucaacaaggccgucaacgcccucaucaacgaccagcugaugaugaagaaccaccuccgcgacaucauggggauccccuacugcaacuacagcaaguucugcuaccugaacaacaccaccacgggccggaccucccugccccgcugcugccugaucagcaacggcuccuaccucaacgagacccacuucagcgacgacaucgagcagcaggcggacaacaugaucaccgagaugcugcagaaggaguacauggaccggcaggggaagacgccccugggccucguggaccuguucguguucuccaccagcuucuaccugaucaccaucuuccuccaccuggucaagaucccgacccaccgccacaucguggggaagcccugccccaagccccaccggcugaaccacaugggcaucugcuccugcgggcuguacaagcagccgggcgugcccguccgcuggaagcggugaggacuaguaauaaggaaacuguaugaaugucugugggcaggaagugaagagauccuucuguaaagguuuuuggaauuaugucugcugaauaauaaacuuuuuugaaauaauaaaucugguagaaaaaugagaucucaaaggcucuuuucagagccaccaaaaaaaaaaaaaaaaaaaaaaaaaaaaaaaaaaaaaaaaaaaaaaaaaaaaaaaaaaaaaaaaagaauu

SEQ ID NO: 40844 - RNA, 1778 nt, Artificial Sequence; identical to SEQ ID NO: 40838
  mRNA product Design b-4 (hSL-A64-N5) comprising derived and/or modified sequence from LASV(Pinneo-NIG-1969;Clade I)__AIT17836__GPCmut12 (opt1)

SEQ ID NO: 40845 - RNA, 1778 nt, Artificial Sequence
  mRNA product Design b-4 (hSL-A64-N5) comprising derived and/or modified sequence from LASV(ISTH0009-NIG-2011;Clade II)__AIT17404__GPCmut12 (opt1)
aggagagucccgcagucggcguccagcggcucugcuuguucgugugugugucguugcaggccuuauucaagcuuaccaugggccagaucaucaccuucuuccaggaggugccccacgucaucgaggaggugaugaacaucgugcugaucgcccucagccugcuggccauccucaaggggaucuacaacgucgcgaccugcggccuguucgggcugguguccuuccuccugcugugcggccgcagcugcuccacgaccuacaaggggguguacgagcuccagacccuggagcuggacauggccagccucaacaugugcaugccgcuguccugcacgaagaacaacagccaccacuacaucauggucggcaacgagaccggccuggagcucacccugaccaacacguccaucaucaaccacaaguucugcaaccugagcgacgcccacaagaagaaccucuacgaccacgcccugauguccaucaucagcaccuuccaccuguccauccccaacuucaaccaguacgaggccaugagcugcgacuucaacgggggcaagaucuccgugcaguacaaccucagccacgcguacgccguggacgccgccaaccacugcgggaccaucgcgaacggcguccugcagaccuucaugcggauggccuggggcggguccuacaucgcccuggacagcggcaagggguccugggacugcaucaugacgagcuaccaguaccucaucauccagaacaccaccugggaggaccacugccaguucucccgccccagccccaucggcuaccuggggcugcucagccagcggacccgcgacaucuacaucucccggcgccugcugggcacguucaccuggacccucagcgacuccgagggcaacgagacccccgggggcuacugccugacgcgguggaugcugaucgaggccgagcucaagugcuucgggaacaccgccguggcgaagugcaacgagaagcacgacgaggaguucugcgacaugcugcgccuguucgacuucugcaagcaggccauccggcgccucaagaccgaggcccagaugagcauccagcugaucaacaaggccgugaacgcccugaucaacgaccagcucaucaugaagaaccaccuccgggacaucaugggcaucccguacugcaacuacuccaaguacugcuaccugaaccacaccgucacggggaagaccagccugccccgcugcugccugguguccaacggcagcuaccugaacgagacccacuucuccgacgacaucgagcagcaggcggacaacaugaucaccgagcuccugcagaaggaguacauggaccggcagggcaagacgccccuggggcucguggaccuguucgucuucagcaccuccuucuaccugaucagcaucuuccugcaccucaucaagaucccgacccaccgccacaucaccggcaagcccugccccaagccccaccggcugaaccacauggggaucugcuccugcggccuguacaagcacccgggggugcccgugaaguggaagcgcugaggacuaguaauaaggaaacuguaugaaugucugugggcaggaagugaagagauccuucuguaaagguuuuuggaauuaugucugcugaauaauaaacuuuuuugaaauaauaaaucugguagaaaaaugagaucucaaaggcucuuuucagagccaccaaaaaaaaaaaaaaaaaaaaaaaaaaaaaaaaaaaaaaaaaaaaaaaaaaaaaaaaaaaaaaaaagaauu

SEQ ID NO: 40846 - RNA, 1778 nt, Artificial Sequence
  mRNA product Design b-4 (hSL-A64-N5) comprising derived and/or modified sequence from LASV(ISTH2010-NIG-2012;Clade II)__AIT17482__GPCmut12 (opt1)
aggagagucccgcagucggcguccagcggcucugcuuguucgugugugugucguugcaggccuuauucaagcuuaccaugggccagaucaucaccuucuuccaggaggugccccacgucaucgaggaggugaugaacaucgugcugaucgcccucagccugcuggccauccucaaggggaucuacaacgucgcgaccugcggccuguucgggcugguguccuuccuccugcugugcggccgcagcugcuccacgaccuacaaggggguguacgagcuccagacccuggagcuggacauggccagccucaacaugugcaugccgcuguccugcacgaagaacaacagccaccacuacaucauggucggcaacgagaccggccuggagcucacccugaccaacacguccaucaucaaccacaaguucugcaaccugagcgacgcccacaagaagaaccucuacgaccacgcccugauguccaucaucagcaccuuccaccuguccauccccaacuucaaccaguacgaggccaugagcugcgacuucaacgggggcaagaucuccgugcaguacaaccucagccacgcguacgccguggacgccgccaaccacugcgggaccaucgcgaacggcguccugcagaccuucaugcggauggccuggggcggguccuacaucgcccuggacagcggcaagggguccugggacugcaucaugacgagcuaccaguaccucaucauccagaacaucaccugggaggaccacugccaguucucccgccccagccccaucggcuaccuggggcugcucagccagcggacccgcgacaucuacaucucccggcgccugcugggcaccuucacguggacccucagcgacuccgagggcaacgagacccccgggggcuacugccugacccgguggaugcugaucgaggccgagcucaagugcuucgggaacacggccguggcgaagugcaacgagaagcacgacgaggaguucugcgacaugcugcgccuguucgacuucugcaagcaggccauccggcgccucaagaccgaggcccagaugagcauccagcugaucaacaaggccgugaacgcccugaucaacgaccagcucaucaugaagaaccaccuccgggacaucaugggcauccccuacugcaacuacuccaaguacugcuaccugaaccacaccgucaccgggaagacgagccugccccgcugcugccugguguccaacggcagcuaccugaacgagacccacuucuccgacgacaucgagcagcaggcggacaacaugaucaccgagcuccugcagaaggaguacaucgaccggcagggcaagaccccgcuggggcucguggaccuguucgucuucagcacguccuucuaccugaucagcaucuuccugcaccucgugaagaucccgacccaccgccacguggucggcaagcccugccccaagccccaccggcugaaccacauggggaucugcuccugcggccuguacaagcacccgggggugcccgugaaguggaagcgcugaggacuaguaauaaggaaacuguaugaaugucugugggcaggaagugaagagauccuucuguaaagguuuuuggaauuaugucugcugaauaauaaacuuuuuugaaauaauaaaucugguagaaaaaugagaucucaaaggcucuuuucagagccaccaaaaaaaaaaaaaaaaaaaaaaaaaaaaaaaaaaaaaaaaaaaaaaaaaaaaaaaaaaaaaaaaagaauu

SEQ ID NO: 40847 - RNA, 1778 nt, Artificial Sequence
  mRNA product Design b-4 (hSL-A64-N5) comprising derived and/or modified sequence from LASV(Lassa virus/H.sapiens-wt/NGA/2015/ISTH_0543;Clade II)__AVO03639__GPCmut12 (opt1)
aggagagucccgcagucggcguccagcggcucugcuuguucgugugugugucguugcaggccuuauucaagcuuaccaugggccagaucaucaccuucuuccaggaggugccccacgucaucgaggaggugaugaacaucgugcugaucgcccucagccugcuggccauccucaaggggaucuacaacgucgcgaccugcggccuguucgggcugguguccuuccuccugcugugcggccgcagcugcuccacgaccuacaaggggguguacgagcuccagacccuggagcuggacauggccaaccucaacaugugcaugccgcugagcugcacgaagaacaacucccaccacuacaucauggucggcaacgagaccggccuggagcucacccugaccaacacgagcaucaucaaccacaaguucugcaaccuguccgacgcccacaagaagaaccucuacgaccacgcccugaugagcaucaucuccaccuuccaccugagcauccccaacuucaaccaguacgaggccauguccugcgacuucaacgggggcaagaucagcgugcaguacaaccucucccacaccuacgcgguggacgccgccaaccacugcgggaccaucgccaacggcguccugcagacguucaugcggauggcguggggcgggagcuacaucgcccuggacuccggcaaggggagcugggacugcaucaugaccuccuaccaguaccucgugauccagaacaccaccugggaggaccacugccaguucagccgccccucccccaucggcuaccuggggcugcucagccagcggacgcgcgacaucuacaucagccggcgccugcugggcaccuucaccuggacccucuccgacagcgagggcaacgagacgcccgggggcuacugccugacccgguggaugcugaucgaggccgagcucaagugcuucgggaacaccgccguggccaagugcaacgagaagcacgacgaggaguucugcgacaugcugcgccuguucgacuucugcaagcaggcgauccggcgccucaagaccgaggcccagauguccauccagcugaucaacaaggccgucaacgcccugaucaacgaccagcucaucaugaagaaccaccuccgggacaucaugggcauccccuacugcaacuacagcaaguacugcuaccugaaccacacggugaccgggaagaccucccugccccgcugcugccuggugagcaacggcuccuaccugaacgagacccacuucagcgacgacaucgagcagcaggccgacaacaugaucacggagcuccugcagaaggaguacaucgaccggcagggcaagaccccgcuggggcucgucgaccuguucguguucuccaccagcuucuaccugaucuccaucuuccugcaccucgugaagaucccgacccaccgccacaucacgggcaagcccugccccaagccccaccggcugaaccacauggggaucugcagcugcggccuguacaagcacccggggguccccgugaaguggaagcgcugaggacuaguaauaaggaaacuguaugaaugucugugggcaggaagugaagagauccuucuguaaagguuuuuggaauuaugucugcugaauaauaaacuuuuuugaaauaauaaaucugguagaaaaaugagaucucaaaggcucuuuucagagccaccaaaaaaaaaaaaaaaaaaaaaaaaaaaaaaaaaaaaaaaaaaaaaaaaaaaaaaaaaaaaaaaaagaauu

SEQ ID NO: 40848 - RNA, 1778 nt, Artificial Sequence
  mRNA product Design b-4 (hSL-A64-N5) comprising derived and/or modified sequence from LASV(Lassa virus/H.sapiens-wt/NGA/2016/ISTH_0009;Clade II)__AVO03571__GPCmut12 (opt1)
aggagagucccgcagucggcguccagcggcucugcuuguucgugugugugucguugcaggccuuauucaagcuuaccaugggccagaucaucaccuucuuccaggaggugccccacgucaucgaggaggugaugaacaucgugcugaucgcccucagccugcuggccauccucaaggggaucuacaacgucgcgaccugcggccugcuggggcucguguccuuccugcugcucugcggccgcagcugcuccacgaccuacaaggggguguacgagcugcagacccuggagcucgacauggccagccugaacaugugcaugccgcuguccugcacgaagaacaacagccaccacuacaucauggucggcaacgagaccggccucgagcugacccugaccaacacguccaucaucaaccacaaguucugcaaccucagcgacgcccacaagaagaaccuguacgaccacgcccugauguccaucaucagcaccuuccaccucuccauccccaacuucaaccaguacgaggccaugagcugcgacuucaacgggggccggaucuccgugcaguacaaccugagccacuccuacgcgguggacgccgccaaccacugcgggaccaucgccaacggcguccugcagaccuucaugcgcauggcguggggcgggagcuacaucgcccucgacuccggcaaggggagcugggacugcaucaugacguccuaccaguaccugaucauccagaacaccaccugggaggaccacugccaguucagccggcccagccccaucggcuaccuggggcuccugucccagcgcacccgggacaucuacaucagccgccggcugcucggcacguucaccuggacccuguccgacagcgagggcaacgagacccccgggggcuacugccugacgcgcuggaugcucaucgaggccgagcugaagugcuucgggaacaccgccguggccaagugcaacgagaagcacgacgaggaguucugcgacaugcugcggcuguucgacuucugcaagcaggcgauccgccggcugaagaccgaggcccagauguccauccagcugaucaacaaggccgugaacgcccucaucaacgaccagcugaucaugaagaaccaccuccgcgacaucaugggcaucccguacugcaacuacagcaaguacugcuaccucaaccacaccgucacggggaagaccucccugccccggugcugccuggugagcaacggcuccuaccucaacgagacccacuucagcgacgacaucgagcagcaggccgacaacaugaucaccgagcugcugcagaaggaguacaucgaccgccagggcaagacgccccucgggcugguggaccuguucgucuucuccaccagcuucuaccugaucuccaucuuccuccaccuggugaagaucccgacccaccggcacaucaccggcaagcccugccccaagccccaccgccugaaccacauggggaucugcagcugcggccucuacaaccacccgggggugcccgucaaguggaagcggugaggacuaguaauaaggaaacuguaugaaugucugugggcaggaagugaagagauccuucuguaaagguuuuuggaauuaugucugcugaauaauaaacuuuuuugaaauaauaaaucugguagaaaaaugagaucucaaaggcucuuuucagagccaccaaaaaaaaaaaaaaaaaaaaaaaaaaaaaaaaaaaaaaaaaaaaaaaaaaaaaaaaaaaaaaaaagaauu

SEQ ID NO: 40849 - RNA, 1778 nt, Artificial Sequence
  mRNA product Design b-4 (hSL-A64-N5) comprising derived and/or modified sequence from LASV(Lassa virus/H.sapiens-wt/NGA/2016/ISTH_0017;Clade II)__AVO03567__GPCmut12 (opt1)
aggagagucccgcagucggcguccagcggcucugcuuguucgugugugugucguugcaggccuuauucaagcuuaccaugggccagaucaucaccuucuuccaggaggugccccacgucaucgaggaggugaugaacaucgugcugaucgcccucagccugcuggccauccucaaggggaucuacaacgucgcgaccugcggccuguucgggcugguguccuuccuccugcugugcggccgcagcugcuccacgaccuacaaggggguguacgagcuccagacccuggagcuggacauggccagccucaacaugugcaugccgcuguccugcacgaagaacaacagccaccacuacaucauggucggcaacgagaccggccuggagcucacccugaccaacacguccaucaucaaccacaaguucugcaaccugagcgacgcccacaagaagaaccucuacgaccacgcccugauguccaucaucagcaccuuccaccuguccauccccaacuucaaccaguacgaggccaugagcugcgacuucaacgggggcaagaucuccgugcaguacaaccucagccacaccuacgcgaucgacgccgccaaccacugcgggaccaucgccaacggcgugcugcagacguucaugcggauggcguggggcggguccuacaucgcccuggacagcggcaagggguccugggacugcaucaugaccagcuaccaguaccucaucauccagaacaccaccugggaggaccacugccaguucucccgccccagccccaucggcuaccuggggcugcucagccagcggacgcgcgacaucuacaucucccggcgccugcugggcaccuucaccuggacccucagcgacuccgagggcaacgagacgcccgggggcuacugccugacccgguggaugcugaucgaggccgagcucaagugcuucgggaacaccgccgucgccaagugcaacgagaagcacgacgaggaguucugcgacaugcugcgccuguucgacuucugcaagcaggcgauccggcgccucaagaccgaggcccagaugagcauccagcugaucaacaaggccgugaacgcccugaucaacgaccagcucaucaugaagaaccaccuccgggacaucaugggcauccccuacugcaacuacuccaaguacugcuaccugaaccacacggugaccgggaagaccagccugccccgcugcugccuggucuccaacggcagcuaccugaacgagacccacuucuccgacgacaucgagcagcaggccgacaacaugaucacggagcuccugcagaaggaguacauggaccggcagggcaagaccccgcuggggcucguggaccuguucguguucagcaccuccuucuaccugaucagcaucuuccugcaccucguccgcaucccgacccaccggcacgugaucggcaagcccugccccaagccccaccgccugaaccacauggggaucugcuccugcggccuguacaagcacccgggggugcccgucaaguggaagcggugaggacuaguaauaaggaaacuguaugaaugucugugggcaggaagugaagagauccuucuguaaagguuuuuggaauuaugucugcugaauaauaaacuuuuuugaaauaauaaaucugguagaaaaaugagaucucaaaggcucuuuucagagccaccaaaaaaaaaaaaaaaaaaaaaaaaaaaaaaaaaaaaaaaaaaaaaaaaaaaaaaaaaaaaaaaaagaauu

SEQ ID NO: 40850 - RNA, 1778 nt, Artificial Sequence
  mRNA product Design b-4 (hSL-A64-N5) comprising derived and/or modified sequence from LASV(Lassa virus/H.sapiens-wt/NGA/2018/ISTH_0959;Clade II)__AVV65099__GPCmut12 (opt1)
aggagagucccgcagucggcguccagcggcucugcuuguucgugugugugucguugcaggccuuauucaagcuuaccaugggccagaucaucaccuucuuccaggaggugccccacgucaucgaggaggugaugaacaucgugcugaucgcccucagccugcuggccauccucaaggggaucuacaacgucgugaccugcggccuguucgggcugguguccuuccuccugcugugcggccgcagcugcuccacgaccuacaagggggucuacgagcuccagacccuggagcuggacauggcgagccucaacaugugcaugccgcuguccugcacgaagaacaacagccaccacuacaucauggugggcaacgagaccggccuggagcucacccugaccaacacguccaucaucaaccacaaguucugcaaccugagcgacgcccacaagaagaaccucuacgaccacgcccugauguccaucaucagcaccuuccaccuguccauccccaacuucaaccaguacgaggccaugagcugcgacuucaacgggggcaagaucuccgugcaguacaaccucagccacgccuacgcgaucgacgccgccaaccacugcgggaccaucgccaacggcguccugcagaccuucaugcggauggcguggggcggguccuacaucgcccuggacagcggcaagggguccugggacugcaucaugacgagcuaccaguaccucaucauccagaacaccaccugggaggaccacugccaguucucccgccccagccccaucggcuaccuggggcugcucagccagcggacccgcgacaucuacaucucccggcgccugcugggcacguucaccuggacccucagcgacuccgagggcaacgagacccccgggggcuacugccugacgcgguggaugcugaucgaggccgagcucaagugcuucgggaacaccgccguggccaagugcaacgagaagcacgacgaggaguucugcgacaugcugcgccuguucgacuucugcaagcaggcgauccggcgccucaagaccgaggcccagaugagcauccagcugaucaacaaggccgugaacgcccugaucaacgaccagcucaucaugaagaaccaccuccgggacaucaugggcaucccguacugcaacuacuccaaguacugcuaccugaaccacaccgucacggggaagaccagccugccccgcugcugccugguguccaacggcagcuaccugaacgagacccacuucuccgacgacaucgagcagcaggccgacaacaugaucaccgagcuccugcagaaggaguacaucgaccggcagggcaagacgccccuggggcucguggaccuguucgucuucagcaccuccuucuaccugaucagcaucuuccugcaccucgugaagaucccgacccaccgccacgugaucggcaagcccugccccaagccccaccggcugaaccacauggggaucugcuccugcggccuguacaagcacccggggguccccgugaaguggaagcgcugaggacuaguaauaaggaaacuguaugaaugucugugggcaggaagugaagagauccuucuguaaagguuuuuggaauuaugucugcugaauaauaaacuuuuuugaaauaauaaaucugguagaaaaaugagaucucaaaggcucuuuucagagccaccaaaaaaaaaaaaaaaaaaaaaaaaaaaaaaaaaaaaaaaaaaaaaaaaaaaaaaaaaaaaaaaaagaauu

SEQ ID NO: 40851 - RNA, 1778 nt, Artificial Sequence
  mRNA product Design b-4 (hSL-A64-N5) comprising derived and/or modified sequence from LASV(LASV003-NIG-2008;Clade II)__AIT17580__GPCmut12 (opt1)
aggagagucccgcagucggcguccagcggcucugcuuguucgugugugugucguugcaggccuuauucaagcuuaccaugggccagaucaucaccuucuuccaggaggugccccacgucaucgaggaggugaugaacaucgugcugaucgcccucagccugcuggccauccucaaggggaucuacaacgucgcgaccugcggccuguucgggcugguguccuuccuccugcugugcggccgcagcugcuccacgaccuacaaggggguguacgagcuccagacccuggagcuggacauggccagccucaacaugugcaugccgcuguccugcacgaagaacaacagccaccacuacaucauggucggcaacgagaccggccuggagcucacccugaccaacacguccaucaucaaccacaaguucugcaaccugagcgacgcccacaagaagaaccucuacgaccacgcccugauguccaucaucagcaccuuccaccuguccauccccaacuucaaccaguacgaggccaugagcugcgacuucaacgggggcaagaucuccgugcaguacaaccucagccacaccuacgcgguggacgccgccaaccacugcgggaccaucgccaacggcguccugcagacguucaugcggauggcguggggcggguccuacaucgcccuggacagcggcaagggguccugggacugcaucaugaccagcuaccaguaccucaucauccagaacaccaccugggaggaccacugccaguucucccgccccagccccaucggcuaccuggggcugcucagccagcggacgcgcgacaucuacaucucccggcgccugcugggcaccuucaccuggacccucagcgacuccgagagcaacgagacgccgggcggguacugccugacccgguggaugcugaucgaggccgagcucaagugcuucggcaacaccgccguggccaagugcaacgagaagcacgacgaggaguucugcgacaugcugcgccuguucgacuucugcaagcaggcgauccggcgccucaaggccgaggcccagauguccauccagcugaucaacaaggccgugaacgcccugaucaacgaccagcucaucaugaagaaccaccuccgggacaucauggggauccccuacugcaacuacagcaaguacugcuaccugaaccacaccgucacgggccgcaccucccugccccggugcugccuggugagcaacggguccuaccugaacgagacccacuucagcgacgacaucgagcagcaggcggacaacaugaucaccgagcuccugcagaaggaguacauggaccgccagggcaagacgccccugggccucguggaccuguucgucuucuccaccagcuucuaccugaucuccaucuuccugcaccucgugaagaucccgacccaccggcacgugaucgggaagcccugccccaagccccaccgccugaaccacaugggcaucugcagcugcgggcuguacaagcacccgggcguccccgugaaguggaagcggugaggacuaguaauaaggaaacuguaugaaugucugugggcaggaagugaagagauccuucuguaaagguuuuuggaauuaugucugcugaauaauaaacuuuuuugaaauaauaaaucugguagaaaaaugagaucucaaaggcucuuuucagagccaccaaaaaaaaaaaaaaaaaaaaaaaaaaaaaaaaaaaaaaaaaaaaaaaaaaaaaaaaaaaaaaaaagaauu

SEQ ID NO: 40852 - RNA, 1778 nt, Artificial Sequence
  mRNA product Design b-4 (hSL-A64-N5) comprising derived and/or modified sequence from LASV(LASV035-NIG-2009;Clade II)__AIT17588__GPCmut12 (opt1)
aggagagucccgcagucggcguccagcggcucugcuuguucgugugugugucguugcaggccuuauucaagcuuaccaugggccagaucaucaccuucuuccaggaggugccccacgucaucgaggaggugaugaacaucgugcugaucgcccucagccugcuggccauccucaaggggaucuacaacgucgcgaccugcggccuguucgggcugguguccuuccuccugcugugcggccgcagcugcuccacgaccuacaaggggguguacgagcuccagacccuggagcuggacauggccagccucaacaugugcaugccgcuguccugcacgaagaacaacagccaccacuacaucauggucggcaacgagaccggccuggagcucacccugaccaacacguccaucaucaaccacaaguucugcaaccugagcgacgcccacaagaagaaccucuacgaccacgcccugauguccaucaucagcaccuuccaccuguccauccccaacuucaaccaguacgaggccaugagcugcgacuucaacgggggcaagaucuccgugcaguacaaccucagccacgcguacgccguggacgccgccaaccacugcgggaccaucgcgaacggcguccugcagaccuucaugcggauggccuggggcggguccuacaucgcccuggacagcggcaagggguccugggacugcaucaugacgagcuaccaguaccucaucauccagaacaccaccugggaggaccacugccaguucucccgccccagccccaucggcuaccuggggcugcucagccagcggacccgcgacaucuacaucucccggcgccugcugggcacguucaccuggacccucagcgacuccgagggcaacgagacccccgggggcuacugccugacgcgguggaugcugaucgaggccgagcucaagugcuucgggaacaccgccguggcgaagugcaacgagaagcacgacgaggaguucugcgacaugcugcgccuguucgacuucugcaagcaggccauccggcgccucaaggccgaggcccagaugagcauccagcugaucaacaaggccgugaacgcgcugaucaacgaccagcucaucaugaagaaccaccuccgggacaucaugggcauccccuacugcaacuacuccaaguacugcuaccugaaccacaccgucaccgggaagacgagccugccccgcugcugccugguguccaacggcagcuaccugaacgagacccacuucuccgacgacaucgagcagcaggccgacaacaugaucaccgagcuccugcagaaggaguacaucgaccggcagggcaagaccccgcuggggcucguggaccuguucgucuucagcacguccuucuaccugaucagcaucuuccugcaccucgugaagaucccgacccaccgccacgugaucggcaagcccugccccaagccccaccggcugaaccacauggggaucugcuccugcggccuguacaagcacccggggguccccgugaaguggaagcgcugaggacuaguaauaaggaaacuguaugaaugucugugggcaggaagugaagagauccuucuguaaagguuuuuggaauuaugucugcugaauaauaaacuuuuuugaaauaauaaaucugguagaaaaaugagaucucaaaggcucuuuucagagccaccaaaaaaaaaaaaaaaaaaaaaaaaaaaaaaaaaaaaaaaaaaaaaaaaaaaaaaaaaaaaaaaaagaauu

SEQ ID NO: 40853 - RNA, 1778 nt, Artificial Sequence
  mRNA product Design b-4 (hSL-A64-N5) comprising derived and/or modified sequence from LASV(LASV1000-NIG-2009;Clade II)__AIT17782__GPCmut12 (opt1)
aggagagucccgcagucggcguccagcggcucugcuuguucgugugugugucguugcaggccuuauucaagcuuaccaugggccagaucaucaccuucuuccaggaggugccccacgucaucgaggaggugaugaacaucgugcugaucgcccucagccugcuggccauccucaaggggaucuacaacgucgcgaccugcggccuguucgggcugguguccuuccuccugcugugcggccgcagcugcuccacgaccuacaaggggguguacgagcuccagacccuggagcuggacauggccagccucaacaugugcaugccgcuguccugcacgaagaacaacagccaccacuacaucauggucggcaacgagaccggccuggagcucacccugaccaacacguccaucaucaaccacaaguucugcaaccugagcgacgcccacaagaagaaccucuacgaccacgcccugauguccaucaucagcaccuuccaccuguccauccccaacuucaaccaguacgaggccaugagcugcgacuucaacgggggcaagaucuccgugcaguacaaccucagccacaccuacgcgguggacgccgccaaccacugcgggaccaucgccaacggcguccugcagacguucaugcggauggcguggggcggguccuacaucgcccuggacagcggcaagggguccugggacugcaucaugaccagcuaccaguaccucaucauccagaacaccaccugggaggaccacugccaguucucccgccccagccccaucggcuaccuggggcugcucagccagcggacgcgcgacaucuacaucucccggcgccugcugggcaccuucaccuggacccucagcgacuccgagggcaacgagacgcccgggggcuacugccugacccgguggaugcugaucgaggccgagcucaagugcuucgggaacaccgccguggccaagugcaacgagaagcacgacgaggaguucugcgacaugcugcgccuguucgacuucugcaagcaggcgaucaagcggcucaagaccgaggcccagaugagcauccagcugaucaacaaggccgugaacgcccugaucaacgaccagcucaucaugaagaaccaccuccgcgacaucaugggcauccccuacugcaacuacuccaaguacugcuaccugaaccacacggucaccgggaagaccagccugccccggugcugccugguguccaacggcagcuaccugaacgagacccacuucuccgacgacaucgagcagcaggccgacaacaugaucacggagcuccugcagaaggaguacaucgaccgccagggcaagaccccgcuggggcucguggaccuguucgucuucagcaccuccuucuaccugaucagcaucuuccugcaccucgugaagaucccgacccaccggcacguggucggcaagcccugccccaagccccaccgccugaaccacauggggaucugcuccugcggccuguacaagcacccgggggugcccgugaaguggaagcggugaggacuaguaauaaggaaacuguaugaaugucugugggcaggaagugaagagauccuucuguaaagguuuuuggaauuaugucugcugaauaauaaacuuuuuugaaauaauaaaucugguagaaaaaugagaucucaaaggcucuuuucagagccaccaaaaaaaaaaaaaaaaaaaaaaaaaaaaaaaaaaaaaaaaaaaaaaaaaaaaaaaaaaaaaaaaagaauu

SEQ ID NO: 40854 - RNA, 1778 nt, Artificial Sequence
  mRNA product Design b-4 (hSL-A64-N5) comprising derived and/or modified sequence from LASV(LASV221-NIG-2010;Clade II)__AIT17624__GPCmut12 (opt1)
aggagagucccgcagucggcguccagcggcucugcuuguucgugugugugucguugcaggccuuauucaagcuuaccaugggccagaucaucaccuucuuccaggaggugccccacgucaucgaggaggugaugaacaucgugcugaucgcccucagccugcuggccauccucaaggggaucuacaacgucgcgaccugcggccuguucgggcugguguccuuccuccugcugugcggccgcagcugcuccacgaccuacaaggggguguacgagcuccagacccuggagcuggacauggccagccucaacaugugcaugccgcuguccugcacgaagaacaacagccaccacuacaucauggucggcaacgagaccggccuggagcucacccugaccaacacguccaucaucaaccacaaguucugcaaccugagcgacgcccacaagaagaaccucuacgaccacgcccugauguccaucaucagcaccuuccaccuguccauccccaacuucaaccaguacgaggccaugagcugcgacuucaacgggggcaagaucuccgugcaguacaaccucagccacaccuacgcgaucgacgccgccaaccacugcgggaccaucgccaacggcgugcugcagacguucaugcggauggcguggggcggguccuacaucgcccuggacagcggcaagggguccugggacugcaucaugaccagcuaccaguaccucaucauccagaacaccaccugggaggaccacugccaguucucccgccccagccccaucggcuaccuggggcugcucagccagcggacgcgcgacaucuacaucucccggcgccugcugggcaccuucaccuggacccucagcgacuccgagggcaacgagacgcccgggggcuacugccugacccgguggaugcugaucgaggccgagcucaagugcuucgggaacaccgccgucgccaagugcaacgagaagcacgacgaggaguucugcgacaugcugcgccuguucgacuucugcaagcaggcgauccggcgccucaagaccgaggcccagaugagcauccagcugaucaacaaggccgugaacgcccugaucaacgaccagcucaucaugaagaaccaccuccgggacaucaugggcauccccuacugcaacuacuccaaguacugcuaccugaaccacacggugaccgggaagaccagccugccccgcugcugccuggucuccaacggcagcuaccugaacgagacccacuucuccgacgacaucgagcagcaggccgacaacaugaucacggagaugcuccagaaggaguacauggaccggcagggcaagaccccgcuggggcugguggaccucuucguguucagcaccuccuucuaccugaucagcaucuuccugcaccuggucaagaucccgacccaccgccacgugaucggcaagcccugccccaagccccaccggcucaaccacauggggaucugcuccugcggccuguacaagcacccgggggugcccgucaaguggaagcgcugaggacuaguaauaaggaaacuguaugaaugucugugggcaggaagugaagagauccuucuguaaagguuuuuggaauuaugucugcugaauaauaaacuuuuuugaaauaauaaaucugguagaaaaaugagaucucaaaggcucuuuucagagccaccaaaaaaaaaaaaaaaaaaaaaaaaaaaaaaaaaaaaaaaaaaaaaaaaaaaaaaaaaaaaaaaaagaauu

SEQ ID NO: 40855 - RNA, 1778 nt, Artificial Sequence
  mRNA product Design b-4 (hSL-A64-N5) comprising derived and/or modified sequence from LASV(LASV237-NIG-2010;Clade II)__AIT17638__GPCmut12 (opt1)
aggagagucccgcagucggcguccagcggcucugcuuguucgugugugugucguugcaggccuuauucaagcuuaccaugggccagaucaucaccuucuuccaggaggugccccacgucaucgaggaggugaugaacaucgugcugaucgcccucagccugcuggccauccucaaggggaucuacaacgucgcgaccugcggccuguucgggcugguguccuuccuccugcugugcggccgcagcugcuccacgaccuacaaggggguguacgagcuccagacccuggagcuggacauggccagccucaacaugugcaugccgcuguccugcacgaagaacaacagccaccacuacaucauggucggcaacgagaccggccuggagcucacccugaccaacacguccaucaucaaccacaaguucugcaaccugagcgacgcccacaagaaggaccucuacgaccacgcccugauguccaucaucagcaccuuccaccuguccauccccaacuucaaccaguacgaggccaugagcugcgacuucaacgggggcaagaucuccgugcaguacaaccucagccacaccuacgcgguggacgccgccaaccacugcgggaccaucgccaacggcguccugcagacguucaugcggauggcguggggcggguccuacaucgcccuggacagcggcaagggguccugggacugcaucaugaccagcuaccaguaccucaucauccagaacaccaccugggaggaccacugccaguucucccgccccagccccaucggcuaccuggggcugcucagccagcggacgcgcgacaucuacaucucccggcgccugcugggcaccuucaccuggacccucagcgacuccgagggcaacgagacgcccgggggcuacugccugacccgguggaugcugaucgaggccgagcucaagugcuucgggaacaccgccguggccaagugcaacgagaagcacgacgaggaguucugcgacaugcugcgccuguucgacuucugcaagcaggcgauccggcgccucaagaccgaggcccagaugagcauccagcugaucaacaaggccgugaacgcccugaucaacgaccagcucaucaugaagaaccaccuccgggacaucaugggcauccccuacugcaacuacuccaaguacugcuaccugaaccacacggucaccgggaagaccagccugccccgcugcugccugguguccaacggcagcuaccugaacgagacccacuucuccgacgacaucgagcagcaggccgacaacaugaucacggagcuccugcagaaggaguacauggaccggcagggcaagaccccgcuggggcucguggaccuguucgucuucagcaccuccuucuaccugaucagcaucuuccugcaccucaucaagaucccgacccaccgccacaucacgggcaagcccugccccaagccccaccggcugaaccacauggggaucugcuccugcggccuguacaagcacccgggggugcccgugaaguggaagcgcugaggacuaguaauaaggaaacuguaugaaugucugugggcaggaagugaagagauccuucuguaaagguuuuuggaauuaugucugcugaauaauaaacuuuuuugaaauaauaaaucugguagaaaaaugagaucucaaaggcucuuuucagagccaccaaaaaaaaaaaaaaaaaaaaaaaaaaaaaaaaaaaaaaaaaaaaaaaaaaaaaaaaaaaaaaaaagaauu

SEQ ID NO: 40856 - RNA, 1778 nt, Artificial Sequence
  mRNA product Design b-4 (hSL-A64-N5) comprising derived and/or modified sequence from LASV(LASV253-NIG-2011;Clade II)__AIT17670__GPCmut12 (opt1)
aggagagucccgcagucggcguccagcggcucugcuuguucgugugugugucguugcaggccuuauucaagcuuaccaugggccagaucaucaccuucuuccaggaggugccccacgucaucgaggaggugaugaacaucgugcugaucgcccucagccugcuggccauccucaaggggaucuacaacgucgcgaccugcggccuguucgggcugguguccuuccuccugcugugcggccgcagcugcuccacgaccuacaaggggguguacgagcuccagacccuggagcuggacauggccagccucaacaugugcaugccgcuguccugcacgaagaacaacagccaccacuacaucauggucggcaacgagaccggccuggagcucacccugaccaacacguccaucaucaaccacaaguucugcaaccugagcgacgcccacaagaagaaccucuacgaccacgcccugauguccaucaucagcaccuuccaccuguccauccccaacuucaaccaguacgaggccaugagcugcgacuucaacgggggcaagaucuccgugcaguacaaccucagccacaccuacgcgguggacgccgccaaccacugcgggaccaucgccaacggcguccugcagacguucaugcggauggcguggggcggguccuacaucgcccuggacagcggcaagggguccugggacugcaucaugaccagcuaccaguaccucaucauccagaacaccaccugggaggaccacugccaguucucccgccccagccccaucggcuaccuggggcugcucagccagcggacgcgcgacaucuacaucucccggcgccugcugggcaccuucaccuggacccucagcgacuccgagggcaacgagacgcccgggggcuacugccugacccgguggaugcugaucgaggccgagcucaagugcuucgggaacaccgccguggccaagugcaacgagaagcacgacgaggaguucugcgacaugcugcgccuguucgacuucugcaagcaggcgauccggcgccucaaggccgaggcccagaugagcauccagcugaucaacaaggccgugaacgcccugaucaacgaccagcucaucaugaagaaccaccuccgggacaucaugggcaucccguacugcaacuacuccaaguacugcuaccugaaccacaccgucacggggcgcaccagccugccccggugcugccugguguccaacggcagcuaccugaacgagacccacuucuccgacgacaucgagcagcaggcggacaacaugaucaccgagcuccugcagaaggaguacaucgaccgccagggcaagacgccccuggggcucguggaccuguucgucuucagcaccuccuucuaccugaucagcaucuuccugcaccucgugaagaucccgacccaccggcacaucaucggcaagcccugccccaagccccaccgccugaaccacauggggaucugcuccugcggccuguacaagcacccgggggugcccgucaaguggaagcggugaggacuaguaauaaggaaacuguaugaaugucugugggcaggaagugaagagauccuucuguaaagguuuuuggaauuaugucugcugaauaauaaacuuuuuugaaauaauaaaucugguagaaaaaugagaucucaaaggcucuuuucagagccaccaaaaaaaaaaaaaaaaaaaaaaaaaaaaaaaaaaaaaaaaaaaaaaaaaaaaaaaaaaaaaaaaagaauu

SEQ ID NO: 40857 - RNA, 1778 nt, Artificial Sequence
  mRNA product Design b-4 (hSL-A64-N5) comprising derived and/or modified sequence from LASV(LASV254-NIG-2011;Clade II)__AIT17674__GPCmut12 (opt1)
aggagagucccgcagucggcguccagcggcucugcuuguucgugugugugucguugcaggccuuauucaagcuuaccaugggccagaucaucaccuucuuccaggaggugccccacgucaucgaggaggugaugaacaucgugcugaucgcccucagccugcuggccauccucaaggggaucuacaacgucgcgaccugcggccuguucgggcugguguccuuccuccugcugugcggccgcagcugcuccacgaccuacaaggggguguacgagcuccagacccuggagcuggacaugaccaaccucaacaugugcaugccgcugagcugcaccaagaacaacucccaccacuacaucauggucggcaacgagaccggccuggagcucacccugacgaacaccagcaucaucaaccacaaguucugcaaccuguccgacgcccacaagaagaaccucuacaaccacgcccugaugagcaucaucuccaccuuccaccugagcauccccaacuucaaccaguacgaggccauguccugcgacuucaacgggggcaagaucagcgugcaguacaaccucucccacagcuacgccguggacgcggccaaccacugcgggaccaucgccaacggcguccugcagacguucaugcggauggccuggggcggguccuacaucgcgcuggacagcggcaaggggaacugggacugcaucaugaccuccuaccaguaccucaucauccagaacaccaccugggaggaccacugccaguucagccgccccucccccaucggcuaccuggggcugcucagccagcggacgcgcgacaucuacaucagccggcgccugcugggcaccuucaccuggacccucuccgacagcgagggcaacgagacgcccgggggcuacugccugacccgguggaugcugaucgaggccgagcucaagugcuucgggaacaccgccguggccaagugcaacgagaagcacgacgaggaguucugcgacaugcugcgccuguucgacuucugcaagcaggccauccggcgccucaagaccgaggcgcaggccaacauccagcugaucaacaaggccgugaacgcccugaucaacgaccagcucaucaugaagaaccaccuccgggacaucaugggcauccccuacugcaacuacuccaaguacugcuaccugaaccacacggucaccgggaagaccagccugccccgcugcugccugguguccaacggcagcuaccugaacgagacccacuucuccgacgacaucgagcagcaggccgacaacaugaucacggagcuccugcagaaggaguacauggaccggcagggcaagaccccgcuggggcucguggaccuguucgucuucagcaccuccuucuaccugaucagcaucuuccugcaccucgugaagaucccgacccaccgccacgugaucggcaagcccugccccaagccccaccggcugaaccacauggggaucugcuccugcggccuguacaagcacccggggguccccgugaaguggaagcgcugaggacuaguaauaaggaaacuguaugaaugucugugggcaggaagugaagagauccuucuguaaagguuuuuggaauuaugucugcugaauaauaaacuuuuuugaaauaauaaaucugguagaaaaaugagaucucaaaggcucuuuucagagccaccaaaaaaaaaaaaaaaaaaaaaaaaaaaaaaaaaaaaaaaaaaaaaaaaaaaaaaaaaaaaaaaaagaauu

SEQ ID NO: 40858 - RNA, 1778 nt, Artificial Sequence
  mRNA product Design b-4 (hSL-A64-N5) comprising derived and/or modified sequence from LASV(Nig08-A19;Clade III)__ADU56618__GPCmut12 (opt1)
aggagagucccgcagucggcguccagcggcucugcuuguucgugugugugucguugcaggccuuauucaagcuuaccaugggccagaucgugaccuucuuccaggaggucccccacgugaucgaggaggugaugaacaucguccugaucgcccucagcauccuggccauccugaaggggcucuacaacaucgcgaccugcggccugaucgggcuggugacguuccuccugcuguccggccgcagcugcuccaugaccuacaaggggguguacgagcuccagacccuggagcugaacaugaacacccucaacaugugcaugccgcugagcugcaccaagaacaacucccaccacuacaucauggucggcaacgagaccggccuggagcucacccugacgaacaccagccugcuccaccacaaguucugcaaccuguccgacgcccacaagaagaaccuguacgaccacacccucaugagcaucaucuccaccuuccaccugagcauccccaacuucaaccaguacgaggccauguccugcgacuucaacgggggcaagaucacggugcaguacaaccugagccacuccuacgccaucgacgccgcgaaccacugcgggaccguggccaacggcguccuccagaccuucaugcggauggccuggggcgggagcuacaucgcccuggacuccggccgcgggaagugggacugcaucaugaccagcuaccaguaccugaucauccagaacacgaccugggaggaccacugccaguucucccggcccagccccaucggcuaccucgggcugcugucccagcgcacccgggacaucuacaucagccgccggcuccugggcaccuucacguggacccugagcgacuccgagggcaacgagacccccgggggcuacugccucacccgcuggaugcugaucgaggcggagcugaagugcuucgggaacacggccguggccaagugcaacgagaagcacgacgaggaguucugcgacaugcuccggcuguucgacuucugcaagcaggccauccgccggcugaaggccgaggcgcagaugagcauccagcucaucaacaaggccgugaacgcccugaucaacgaccagcugaucaugaagaaccaccuccgcgacaucaugggcauccccuacugcaacuacuccaaguacugcuaccugaaccacaccagcaccgggcggaccucccugccccgcugcugccucgucagcaacggcuccuaccugaacgagacgcacuucagcgacgacaucgagcagcaggccgacaacaugaucaccgagaugcugcagaaggaguaccucgaccggcagggcaagaccccgcuggggcugguggaccuguucguguucuccaccagcuucuaccucaucuccaucuuccugcaccuggucaagaucccgacgcaccgccacaucgugggcaagcccugccccaagccccaccggcucaaccacauggggaucugcagcugcggccuguacaagcagccgggggugcccguccgcuggaagcggugaggacuaguaauaaggaaacuguaugaaugucugugggcaggaagugaagagauccuucuguaaagguuuuuggaauuaugucugcugaauaauaaacuuuuuugaaauaauaaaucugguagaaaaaugagaucucaaaggcucuuuucagagccaccaaaaaaaaaaaaaaaaaaaaaaaaaaaaaaaaaaaaaaaaaaaaaaaaaaaaaaaaaaaaaaaaagaauu

SEQ ID NO: 40859 - RNA, 1781 nt, Artificial Sequence
  mRNA product Design b-4 (hSL-A64-N5) comprising derived and/or modified sequence from LASV(G1180-SLE-2010;Clade IV)__AIT17168__GPCmut12 (opt1)
aggagagucccgcagucggcguccagcggcucugcuuguucgugugugugucguugcaggccuuauucaagcuuaccaugggccagaucgugaccuucuuccaggaggucccccacgugaucgaggaggugaugaacaucguccugaucgcccucagcauccuggccgugcugaaggggcucuacaacuucgcgaccugcggccugguggggcugcucaccuuccugcugcucugcggccgcuccugcaccgccagccgguacaagggggucuacgagcugcagacccuggagcucaacauggagacccugaacaugugcaugccgcuguccugcaccaagaacaacagccaccacuacaucauggugggcaacgagaccggccucgagcugacccugacgaacaccuccaucaucaaccacaaguucugcaaccucagcgacgcccacaagaagaaccuguacgaccacgcccugauguccaucaucagcaccuuccaccucuccauccccaacuucaaccaguacgaggccaugagcugcgacuucaacgggggcaagaucuccgugcaguacaaccugagccacuccuacgcgggggacgccgccaaccacugcggcaccgucgccaacggggugcugcagacguucaugcgcauggcguggggcggcagcuacaucgcccucgacuccgggcacggcagcugggacugcaucaugaccuccuaccaguaccugaucauccagaacaccaccugggaggaccacugccaguucagccggcccucccccaucggguaccugggccuccugagccagcgcacgcgggacaucuacaucagccgccggcugcucggcaccuucaccuggacccuguccgacagcgaggggaaggacacgccgggcggguacugccugacccgcuggaugcucaucgaggccgagcugaagugcuucggcaacaccgccguggccaagugcaacgagaagcacgacgaggaguucugcgacaugcugcggcuguucgacuucugcaagcaggcgauccagcgccugaaggccgaggcccagauguccauccagcugaucaacaaggccgucaacgcccucaucaacgaccagcugaucaugaagaaccaccuccgggacaucauggggauccccuacugcaacuacagcaaguacugcuaccucaaccacaccacgaccggcaagaccucccugcccaagugcugccuggugagcaacggcuccuaccucaacgagacccacuucagcgacgacaucgagcagcaggcggacaacaugaucacggagaugcugcagaaggaguacauggagcgccaggggaagacgccccugggccucguggaccuguucgucuucuccaccagcuucuaccugaucuccaucuuccugcaccucgugaagaucccgacccaccggcacaucgugggcaagagcugccccaagccccaccgccugaaccacauggggaucugcuccugcgggcuguacaagcagcccggcgucccggugaaguggaagcggugaggacuaguaauaaggaaacuguaugaaugucugugggcaggaagugaagagauccuucuguaaagguuuuuggaauuaugucugcugaauaauaaacuuuuuugaaauaauaaaucugguagaaaaaugagaucucaaaggcucuuuucagagccaccaaaaaaaaaaaaaaaaaaaaaaaaaaaaaaaaaaaaaaaaaaaaaaaaaaaaaaaaaaaaaaaaagaauu

SEQ ID NO: 40860 - RNA, 1781 nt, Artificial Sequence
  mRNA product Design b-4 (hSL-A64-N5) comprising derived and/or modified sequence from LASV(G1442-SLE-2011;Clade IV)__AIT17180__GPCmut12 (opt1)
aggagagucccgcagucggcguccagcggcucugcuuguucgugugugugucguugcaggccuuauucaagcuuaccaugggccagaucgugaccuucuuccaggaggucccccacgugaucgaggaggugaugaacaucguccugaucgcccucagcauccuggccgugcugaaggggcucuacaacguggcgaccugcggccugaucgggcuggucacguuccuccugcugugcggccgcuccugcaccaccacccucuacaaggggguguacgagcugcagacgcuggagcucaacauggagacccugaacaugugcaugccgcugagcugcaccaagaacaacucccaccacuacauccgggugggcaacgagacgggccucgagcugacccugaccaacaccagcaucaucaaccacaaguucugcaaccucuccgacgcccacaagaagaaccuguacgaccacgcccugaugagcaucaucuccacguuccaccucagcauccccaacuucaaccaguacgaggccauguccugcgacuucaacgggggcaagaucagcguccaguacaaccugucccacagcuacgccggggacgcggccaaccacugcggcaccguggccaacggggugcugcagaccuucaugcgcauggccuggggcggcuccuacaucgcgcucgacagcgggcggggcaacugggacugcaucaugaccuccuaccaguaccugaucauccagaacacgaccugggacgaccacugccaguucagccgccccucccccaucggguaccugggccuccugagccagcggacccgcgacgucuacaucucccggcgccugcucggcaccuucacguggacccugagcgacagcgaggggaaggacaccccgggcggguacugccugacccgguggaugcucaucgaggccgagcugaagugcuucggcaacacggccguggccaagugcaacgagaagcacgacgaggaguucugcgacaugcugcgccucuucgacuucugcaagcaggccauccagcggcugaaggcggaggcccagauguccauccagcugaucaacaaggccgugaacgcccucaucaacgaccagcugaucaugaagaaccaccuccgcgacaucauggggauccccuacugcaacuacagcaaguacugcuaccugaacaacaccgccaccggcaagaccucccugcccaagugcugccugaucagcaacggcuccuaccucaacgagacgcacuucagcgacgacaucgagcaggaggcggacaacaugaucaccgagaugcugcagaaggaguacauggagcggcaggggaagacgccccugggccucgucgaccuguucguguucuccaccagcuucuaccugaucuccaucuuccugcaccucgugaagaucccgacccaccgccacaucgucggcaagagcugccccaagccccaccggcugaaccacauggggaucugcuccugcgggcuguacaagcagcccggcgugccggugcgcuggaagcggugaggacuaguaauaaggaaacuguaugaaugucugugggcaggaagugaagagauccuucuguaaagguuuuuggaauuaugucugcugaauaauaaacuuuuuugaaauaauaaaucugguagaaaaaugagaucucaaaggcucuuuucagagccaccaaaaaaaaaaaaaaaaaaaaaaaaaaaaaaaaaaaaaaaaaaaaaaaaaaaaaaaaaaaaaaaaagaauu

SEQ ID NO: 40861 - RNA, 1781 nt, Artificial Sequence
  mRNA product Design b-4 (hSL-A64-N5) comprising derived and/or modified sequence from LASV(G3010-SLE-2013;Clade IV)__AIT17344__GPCmut12 (opt1)
aggagagucccgcagucggcguccagcggcucugcuuguucgugugugugucguugcaggccuuauucaagcuuaccaugggccagaucgugaccuucuuccaggaggucccccacgugaucgaggaggugaugaacaucguccugaucgcccucagcauccuggccgugcugaaggggcucuacaacuucgcgaccugcggccugguggggcuggucacguuccuccugcugugcggccgcuccugcaccaccagccucuacaaggggguguacgagcugcagacccuggagcucaacauggagacgcugaacaugugcaugccgcuguccugcaccaagaacaacagccaccacuacaucauggugggcaacgagaccggccucgagcugacgcugaccaacaccuccaucaucaaccacaaguucugcaaccucagcgacgcccacaagaagaaccuguacaaccacgcccugauguccaucaucagcaccuuccaccucuccauccccaacuucaaccaguacgaggccaugagcugcgacuucaacgggggcaagaucuccguccaguacaaccugagccacuccuacgccggggacgcggccagccacugcggcacgguggccaacggggugcugcagaccuucaugcggauggccuggggcggcuccuacaucgcgcucgacagcggguacggcaagugggacugcaucaugaccuccuaccaguaccugaucauccagaacaccacgugggaggaccacugccaguucagccgccccucccccaucggguaccugggccuccugagccagcggacccgcgacaucuacaucagccggcgccugcucggcaccuucaccuggacgcuguccgacagcgaggggaaggacaccccgggcggguacugccugacccgguggaugcucaucgaggccgagcugaagugcuucggcaacaccgccgucgccaagugcaacgagaagcacgacgaggaguucugcgacaugcugcgccucuucgacuucugcaagcaggccauccagcggcugaagacggaggcgcagauguccauccagcugaucaacaaggccgugaacgcccucaucaacgaccagcugaucaugaagaaccaccuccgcgacaucauggggauccccuacugcaacuacagcaaguacugcuaccugaaccacaccaccaccggcaagacgucccugcccaagugcugccuggugagcaacggcuccuaccucaacgagacccacuucagcgacgacaucgagcagcaggccgacaacaugaucaccgagaugcugcagaaggaguacauggagcggcaggggaagacgccccugggccucgucgaccuguucguguucuccaccagcuucuaccugaucuccaucuuccugcaccucgugaagaucccgacccaccgccacaucgucggcaagagcugccccaagccccaccggcugaaccacauggggaucugcuccugcgggcuguacaagcagcccggcgugccggugcgcuggaagcggugaggacuaguaauaaggaaacuguaugaaugucugugggcaggaagugaagagauccuucuguaaagguuuuuggaauuaugucugcugaauaauaaacuuuuuugaaauaauaaaucugguagaaaaaugagaucucaaaggcucuuuucagagccaccaaaaaaaaaaaaaaaaaaaaaaaaaaaaaaaaaaaaaaaaaaaaaaaaaaaaaaaaaaaaaaaaagaauu

SEQ ID NO: 40862 - RNA, 1781 nt, Artificial Sequence
  mRNA product Design b-4 (hSL-A64-N5) comprising derived and/or modified sequence from LASV(G502-SLE-2009;Clade IV)__AIT17126__GPCmut12 (opt1)
aggagagucccgcagucggcguccagcggcucugcuuguucgugugugugucguugcaggccuuauucaagcuuaccaugggccagaucgugaccuucuuccaggaggucccccacgugaucgaggaggugaugaacaucguccugaucgcccucagcauccuggccgugcugaaggggcucuacaacuucgcgaccugcggccugguggggcugcucacguuccugcugcucugcggccgcuccugcaccaccgggcuguacaagggcgucuacgagcugcagacccucgagcugaacauggagacgcugaacaugugcaugccgcucagcugcaccaagaacaacucccaccacuacaucauggugggcaacgagaccgggcuggagcugacgcucaccaacaccagcaucaucaaccacaaguucugcaaccuguccgacgcccacaagaagaaccuguacgaccacgcccucaugagcaucaucuccaccuuccaccugagcauccccaacuucaaccaguacgaggccauguccugcgacuucaacggcgggaagaucagcgugcaguacaaccugucccacagcuacgccggcgacgcggccgaccacugcgggacggucgccaacggcgugcuccagaccuucaugcggauggccuggggcggguccuacaucgcgcuggacagcggccgcgggcggugggacugcaucaugaccuccuaccaguaccugaucauccagaacaccacgugggaggaccacugccaguucagccgccccucccccaucggcuaccucggccugcugagccagcggacccgcgacaucuacaucucccggcgccuccuggggaccuucaccuggacgcugagcgacagcgagggcaaggacacccccgggggcuacugccucacccgguggaugcugaucgaggccgagcugaagugcuucgggaacaccgccguggccaagugcaacgagaagcacgacgaggaguucugcgacaugcuccgccuguucgacuucugcaagcaggccauccagcggcugaaggcggaggcccagauguccauccagcucaucaacaaggccgucaacgcccugaucaacgaccagcuggugaugaagaaccaccuccgcgacaucaugggcauccccuacugcaacuacagccgguacugcuaccugaaccacacgaccaccggccgcaccucccugcccaagugcugccucgugagcaacggguccuaccugaacgagacgcacuucagcgacgacaucgagcagcaggccgacaacaugaucaccgagaugcugcagaaggaguacauggagcggcagggcaagaccccgcucgggcuggucgaccuguucguguucuccaccagcuucuaccugaucuccaucuuccuccaccuggugaagaucccgacgcaccgccacaucgucggcaagagcugccccaagccccaccggcugaaccacauggggaucugcuccugcggccucuacaagcagcccggcgugccggugaaguggaagcgcugaggacuaguaauaaggaaacuguaugaaugucugugggcaggaagugaagagauccuucuguaaagguuuuuggaauuaugucugcugaauaauaaacuuuuuugaaauaauaaaucugguagaaaaaugagaucucaaaggcucuuuucagagccaccaaaaaaaaaaaaaaaaaaaaaaaaaaaaaaaaaaaaaaaaaaaaaaaaaaaaaaaaaaaaaaaaagaauu

SEQ ID NO: 40863 - RNA, 1781 nt, Artificial Sequence
  mRNA product Design b-4 (hSL-A64-N5) comprising derived and/or modified sequence from LASV(G733-SLE-2010;Clade IV)__AIT17154__GPCmut12 (opt1)
aggagagucccgcagucggcguccagcggcucugcuuguucgugugugugucguugcaggccuuauucaagcuuaccaugggccagaucgugaccuucuuccaggaggucccccacgugaucgaggaggugaugaacaucguccugaucgcccucagcauccuggccgugcugaaggggcucuacaacuucgcgaccugcggcaucguggggcuggucuccuuccugcuccugugcggccgcagcugcacgaccucccuguacaaggggguguacgagcuccagacccuggagcugaacauggagacccucaacaugugcaugccgcugagcugcaccaagaacaacucccaccacuacaucauggugggcaacgagaccggccuggagcucacccugacgaacaccagcaucaucaaccacaaguucugcaaccuguccgacgcccacaagaagaaccucuacgaccacgcccugaugagcaucaucuccaccuuccaccugagcauccccaacuucaaccaguacgaggccauguccugcgacuucaacgggggcaagaucagcguccaguacaaccucucccacagcuacgccggggacgcggccaaccacugcggcaccaucgccaacggggugcugcagacguucaugcggauggccuggggcggcuccuacaucgcgcuggacagcgggcgcgaccggugggacugcaucaugaccuccuaccaguaccucaucauccagaacaccaccugggaggaccacugccaguucagccgccccucccccaucggcuaccuggggcugcucagccagcggacgcgcgacaucuacaucagccggcgccugcugggcaccuucaccuggacccucuccgacagcgagggcaaggacacgcccgggggcuacugccugacccgguggaugcugaucgaggccgagcucaagugcuucgggaacaccgccguggccaagugcaacgagaagcacgacgaggaguucugcgacaugcugcgccuguucgacuucugcaagcaggccauccagcggcucaaggcggaggcccagauguccauccagcugaucaacaaggccgucaacgcccugaucaacgaccagcucaucaugaagaaccaccuccgcgacaucaugggcauccccuacugcaacuacagcaaguacugcuaccugaaccacaccacgaccgggaagaccucccugcccaagugcugccuggugagcaacggcuccuaccugaacgagacccacuucagcgacgacaucgagcagcaggccgacaacaugaucacggagaugcuccagaaggaguacauggagcggcagggcaagaccccgcuggggcugguggaccucuucgucuucuccaccagcuucuaccugaucuccaucuuccugcaccuggugaagaucccgacccaccgccacguggucggcaagagcugccccaagccccaccggcucaaccacauggggaucugcuccugcggccuguacgggcagcccggcgugccggugaaguggaagcgcugaggacuaguaauaaggaaacuguaugaaugucugugggcaggaagugaagagauccuucuguaaagguuuuuggaauuaugucugcugaauaauaaacuuuuuugaaauaauaaaucugguagaaaaaugagaucucaaaggcucuuuucagagccaccaaaaaaaaaaaaaaaaaaaaaaaaaaaaaaaaaaaaaaaaaaaaaaaaaaaaaaaaaaaaaaaaagaauu

SEQ ID NO: 40864 - RNA, 1781 nt, Artificial Sequence
  mRNA product Design b-4 (hSL-A64-N5) comprising derived and/or modified sequence from MOPV/LASV reassortant(IGS-1;Clade IV)__AFY05576__GPCmut12 (opt1)
aggagagucccgcagucggcguccagcggcucugcuuguucgugugugugucguugcaggccuuauucaagcuuaccaugggccagaucgugaccuucuuccaggaggucccccacgugaucgaggaggugaugaacaucguccugaucgcccucagcgugcuggccgugcugaaggggcucuacaacuucgcgaccugcggccuggucgggcuggugacguuccuccugcugugcggccgcuccugcaccaccagccucuacaaggggguguacgagcugcagacccuggagcucaacauggagacgcugaacaugugcaugccgcuguccugcaccaagaacaacagccaccacuacaucauggucggcaacgagaccggccucgagcugacgcugaccaacaccuccaucaucaaccacaaguucugcaaccucagcgacgcccacaagaagaaccuguacgaccacgcccugauguccaucaucagcaccuuccaccucuccauccccaacuucaaccaguacgaggccaugagcugcgacuucaacgggggcaagaucuccgugcaguacaaccugagccacuccuacgccggggacgcggccaaccacugcggcacgguggccaacgggguccugcagaccuucaugcggauggccuggggcggcagcuacaucgcgcucgacuccgggcgcggcaacugggacugcaucaugaccagcuaccaguaccugaucauccagaacaccacgugggaggaccacugccaguucucccggcccagccccaucggguaccugggccuccugucccagcgcacccgggacaucuacaucagccgccggcugcucggcaccuucaccuggacgcugagcgacuccgagggggaggacaccccgggcggguacugccugacccgcuggaugcucaucgaggccgagcugaagugcuucggcaacaccgccguggccaagugcaacgagaagcacgacgaggaguucugcgacaugcugcggcuguucgacuucugcaagcaggccauccagcgccugaaggcggaggcccagaugagcauccagcugaucaacaaggccgugaacgcccucaucaacgaccagcugaucaugaagaaccaccuccgggacaucauggggauccccuacugcaacuacuccaaguacugcuaccucaaccacacgaccaccggccgcaccagccugcccaagugcugccuggucuccaacggcagcuaccucaacgagacgcacuucuccgacgacaucgagcagcaggccgacaacaugaucaccgagaugcugcagaaggaguacauggagcggcaggggaagacgccccugggccucguggaccuguucguguucagcaccuccuucuaccugaucagcaucuuccugcaccucgucaagaucccgacccaccgccacaucguggggaaguccugccccaagccccaccggcugaaccacaugggcaucugcagcugcgggcuguacaagcagcccggcgugccggucaaguggaagcgcugaggacuaguaauaaggaaacuguaugaaugucugugggcaggaagugaagagauccuucuguaaagguuuuuggaauuaugucugcugaauaauaaacuuuuuugaaauaauaaaucugguagaaaaaugagaucucaaaggcucuuuucagagccaccaaaaaaaaaaaaaaaaaaaaaaaaaaaaaaaaaaaaaaaaaaaaaaaaaaaaaaaaaaaaaaaaagaauu

SEQ ID NO: 40865 - RNA, 1781 nt, Artificial Sequence
  mRNA product Design b-4 (hSL-A64-N5) comprising derived and/or modified sequence from LASV(LM765-SLE-2012;Clade IV)__AIT17814__GPCmut12 (opt1)
aggagagucccgcagucggcguccagcggcucugcuuguucgugugugugucguugcaggccuuauucaagcuuaccaugggccagaucgugaccuucuuccaggaggucccccacgugaucgaggaggugaugaacaucguccugaucgcccucagcauccuggccgugcugaaggggcucuacaacuucgcgaccugcggccugguggggcuggucacguuccuccugcugugcggccgcuccugcaccaccagccucuacaaggggguguacgagcugcagacccuggagcucaacauggagacgcugaacaugugcaugccgcuguccugcaccaagaacaacagccaccacuacaucauggugggcaacgagaccggccucgagcugacgcugaccaacaccuccaucaucgaccacaaguucugcaaccucagcgacgcccaccggaagaaccuguacgaccacgcccugauguccaucaucagcaccuuccaccucuccauccccaacuucaaccaguacgaggccaugagcugcgacuucaacgggggcaagaucuccguccaguacaaccugagccacuccuacgccaaggacgcggccgaccacugcgggacgguggccaacggcgugcugcagaccuucaugcgcauggccuggggcgggagcuacaucgcgcucgacuccggccgggggcgcugggacugcaucaugaccagcuaccaguaccugaucauccagaacaccacgugggaggaccacugccaguucucccggcccagccccaucggcuaccuggggcuccugucccagcgcacccgggacaucuacaucagccgccggcugcucggcaccuucaccuggacgcugagcgacuccgagggcaaggacacccccgggggcuacugccugacccgcuggaugcucaucgaggccgagcugaagugcuucgggaacaccgccgucgccaagugcaacgagaagcacgacgaggaguucugcgacaugcugcggcuguucgacuucugcaagcaggccauccagcgccugaaggcggaggcccagaugagcauccagcugaucaacaaggccgugaacgcccucaucaacgaccagcugaucaugaagaaccaccuccgggacaucaugggcauccccuacugcaacuacuccaaguacugcuaccucaaccacacgaccaccgggaagaccagccugcccaagugcugccugguguccaacggcagcuaccucaacgagacgcacuucuccgacgacaucgagcagcaggccgacaacaugaucaccgagaugcugcagaaggaguacauggagcgccagggcaagaccccgcuggggcucgucgaccuguucguguucagcaccuccuucuaccugaucagcaucuuccugcaccucgugaagaucccgacgcaccggcacaucgucggcaagcccugccccaagccccaccgccugaaccacauggggaucugcuccugcggccuguacaagcagccgggggugcccgugaaguggaagcggugaggacuaguaauaaggaaacuguaugaaugucugugggcaggaagugaagagauccuucuguaaagguuuuuggaauuaugucugcugaauaauaaacuuuuuugaaauaauaaaucugguagaaaaaugagaucucaaaggcucuuuucagagccaccaaaaaaaaaaaaaaaaaaaaaaaaaaaaaaaaaaaaaaaaaaaaaaaaaaaaaaaaaaaaaaaaagaauu

SEQ ID NO: 40866 - RNA, 1781 nt, Artificial Sequence
  mRNA product Design b-4 (hSL-A64-N5) comprising derived and/or modified sequence from LASV(LM776-SLE-2012;Clade IV)__AIT17824__GPCmut12 (opt1)
aggagagucccgcagucggcguccagcggcucugcuuguucgugugugugucguugcaggccuuauucaagcuuaccaugggccagaucgugaccuucuuccaggaggucccccacgugaucgaggaggugaugaacaucguccugaucgcccucagcauccuggccgugcugaaggggcucuacaacuucgcgaccugcggccugguggggcuggucacguuccuccugcugugcggccgcuccugcaccaccagcguguacaaggggguguacgagcuccagacccuggagcugaacauggagacgcucaacaugugcaugccgcuguccugcaccaagaacaacagccaccacuacaucauggucggcaacgagaccggccuggagcucacgcugaccaacaccuccaucaucaaccacaaguucugcaaccugagcgacgcccacaagaagaaccucuacgaccacgcccugauguccaucaucagcaccuuccaccuguccauccccaacuucaaccaguacgaggccaugagcugcgacuucaacgggggcaagaucuccgugcaguacaaccucagccacuccuacgccggggacgcggccaaccacugcggcacgguggccaacgggguccugcagaccuucaugcggauggccuggggcggcagcuacaucgcgcuggacuccgggcacggcaagugggacugcaucaugaccagcuaccaguaccucaucauccagaacaccacgugggaggaccacugccaguucucccgccccagccccaucggguaccugggccugcucucccagcggacccgcgacaucuacaucagccggcgccugcugggcaccuucaccuggacgcucagcgacuccgaggggaaggacaccccgggcggguacugccugacccgguggaugcugaucgaggccgagcucaagugcuucggcaacaccgccguggccaagugcaacgagaagcacgacgaggaguucugcgacaugcugcgccuguucgacuucugcaagcaggccauccagcggcucaaggcggaggcccagaugagcauccagcugaucaacaaggccgugaacgcccugaucaacgaccagcucaucaugaagaaccaccuccgcgacaucauggggauccccuacugcaacuacuccaaguacugcuaccugaaccacacgaccaccggcaagaccagccugcccaagugcugccuggucuccaacggcagcuaccugaacgagacgcacuucuccgacgacaucgagcagcaggccgacaacaugaucaccgagaugcuccagaaggaguacauggagcggcaggggaagacgccccugggccugguggaccucuucguguucagcaccuccuucuaccugaucagcaucuuccugcaccuggucaagaucccgacccaccgccacaucguggggaaguccugccccaagccccaccggcucaaccacaugggcaucugcagcugcgggcuguacaagcagcccggcgugccgguccgcuggaagcggugaggacuaguaauaaggaaacuguaugaaugucugugggcaggaagugaagagauccuucuguaaagguuuuuggaauuaugucugcugaauaauaaacuuuuuugaaauaauaaaucugguagaaaaaugagaucucaaaggcucuuuucagagccaccaaaaaaaaaaaaaaaaaaaaaaaaaaaaaaaaaaaaaaaaaaaaaaaaaaaaaaaaaaaaaaaaagaauu

SEQ ID NO: 40867 - RNA, 1781 nt, Artificial Sequence
  mRNA product Design b-4 (hSL-A64-N5) comprising derived and/or modified sequence from LASV(Mad39;Clade IV)__ANH09722__GPCmut12 (opt1)
aggagagucccgcagucggcguccagcggcucugcuuguucgugugugugucguugcaggccuuauucaagcuuaccaugggccagaucgugaccuucuuccaggaggucccccacgugaucgaggaggugaugaacaucguccugaucgcccucagcauccuggccgugcugaaggggcucuacaacguggcgaccugcggccugaucgggcuggucacguuccuccugcugugcggccgcuccugcaccaccacccucuacaaggggguguacgagcugcaggcccuggagcucaacauggagacgcugaacaugugcaugccgcugagcugcaccaagaacaacucccaccacuacauccgggugggcaacgagaccggccucgagcugacgcugaccaacaccagccucaucaaccacaaguucugcaaccuguccgacgcccacaagaagaaccuguacgaccacgcccucaugagcaucaucuccaccuuccaccugagcauccccaacuucaaccaguacgaggccauguccugcgacuucaacgacgggaagaucagcguccaguacaaccugucccacacguacgcgggcgacaccgccaaccacugcgggaccguggccaacggcgugcuccagaccuucaugcgcauggccuggggcgggagcuacaucgcgcuggacuccggccgcgggggcugggacugcaucaugacgagcuaccaguaccugaucauccagaacaccaccugggaggaccacugccaguucucccggcccagccccaucggguaccucggccugcugucccagcggacccgcgacaucuacaucagccggcgccuccugggcacguucaccuggacccuguccgacagcgaggggaaggacaccccgggcggguacugccucacgcgguggaugcugaucgaggccgagcugaagugcuucggcaacaccgccgucgccaagugcaacgagaagcacgacgaggaguucugcgacaugcuccgccuguucgacuucugcaagcaggccauccagcggcugaaggcggaggcccagaugagcauccagcucaucaacaaggccgugaacgcccugaucaacgaccagcugaucaugaagaaccaccuccgcgacaucauggggauccccuacugcaacuacuccaaguacugcuaccugaaccacaccgugaccggcaagacgagccugcccaagugcugccucgucuccaacggcagcuaccugaacgagacccacuucuccgacgacaucgagcagcaggccgacaacaugaucaccgagaugcugcagaaggaguacauggagcggcaggggaagacgccccucggccugguggaccuguucguguucagcaccuccuucuaccugaucagcaucuuccuccaccuggucaagaucccgacccaccgccacgugguggggaagcccugccccaagccccaccggcugaaccacaugggcaucugcuccugcggguucuacaagcagccgggcguccccgugcgcuggaagcggugaggacuaguaauaaggaaacuguaugaaugucugugggcaggaagugaagagauccuucuguaaagguuuuuggaauuaugucugcugaauaauaaacuuuuuugaaauaauaaaucugguagaaaaaugagaucucaaaggcucuuuucagagccaccaaaaaaaaaaaaaaaaaaaaaaaaaaaaaaaaaaaaaaaaaaaaaaaaaaaaaaaaaaaaaaaaagaauu

SEQ ID NO: 40868 - RNA, 1781 nt, Artificial Sequence
  mRNA product Design b-4 (hSL-A64-N5) comprising derived and/or modified sequence from LASV(Z0947-SLE-2011;Clade IV)__AIT17840__GPCmut12 (opt1)
aggagagucccgcagucggcguccagcggcucugcuuguucgugugugugucguugcaggccuuauucaagcuuaccaugggccagaucgugaccuucuuccaggaggucccccacgugaucgaggaggugaugaacaucguccugaucgcccucagcauccuggccgugcugaaggggcucuacaacuucgcgaccugcggccugguggggcuggucacguuccuccugcugugcggccgcuccugcaccaucagccucuacaaggggguguacgagcugcagacccuggagcucaacauggagacccugaacaugugcaugccgcuguccugcaccaagaacaacagccaccacuacaucauggugggcaacgagaccggccucgagcugacccugacgaacaccuccaucaucaaccacaaguucugcaaccucagcgacgcccacaagaagaaccuguacgaccacgcccugauguccaucaucagcaccuuccaccucuccauccccaacuucaaccaguacgaggccaugagcugcgacuucaacgggggcaagaucuccguccaguacaaccugagccacuccuacgccggggacgcggccaaccacugcggcaccguggccaacggggugcugcagacguucaugcggauggccuggggcggcagcuacaucgcgcucgacuccgggcgcgaccggugggacugcaucaugaccagcuaccaguaccugaucauccagaacaccaccugggaggaccacugccaguucucccgccccagccccaucggcuaccuggggcuccugucccagcggacgcgcgacaucuacaucagccggcgccugcucggcaccuucaccuggacccugagcgacuccgagggcaaggacacgcccgggggcuacugccugacccgguggaugcucaucgaggccgagcugaagugcuucgggaacaccgccgucgccaagugcaacgagaagcacgacgaggaguucugcgacaugcugcgccucuucgacuucugcaagcaggccauccagcggcugaaggcggaggcccagaugagcauccagcugaucaacaaggccgugaacgcccucaucaacgaccagcugaucaugaagaaccaccuccgcgacaucaugggcauccccuacugcaacuacuccaaguacugcuaccugaaccacaccacgaccgggaagaccagccugcccaagugcugccugguguccaacggcagcuaccucaacgagacccacuucuccgacgacaucgagcagcaggccgacaacaugaucacggagaugcugcagaaggaguacauggagcggcagggcaagaccccgcuggggcucgucgaccuguucguguucagcaccuccuucuaccugaucagcaucuuccugcaccucgugaagaucccgacccaccgccacaucgucggcaagcccugccccaagccccaccggcugaaccacauggggaucugcuccugcggccuguacaagcagccgggggugcccgugaaguggaagcgcugaggacuaguaauaaggaaacuguaugaaugucugugggcaggaagugaagagauccuucuguaaagguuuuuggaauuaugucugcugaauaauaaacuuuuuugaaauaauaaaucugguagaaaaaugagaucucaaaggcucuuuucagagccaccaaaaaaaaaaaaaaaaaaaaaaaaaaaaaaaaaaaaaaaaaaaaaaaaaaaaaaaaaaaaaaaaagaauu

SEQ ID NO: 40869 - RNA, 1781 nt, Artificial Sequence
  mRNA product Design b-4 (hSL-A64-N5) comprising derived and/or modified sequence from LASV(Josiah;Clade IV)__NP_694870__GPCmut12 (opt1)
aggagagucccgcagucggcguccagcggcucugcuuguucgugugugugucguugcaggccuuauucaagcuuaccaugggccagaucgugaccuucuuccaggaggucccccacgugaucgaggaggugaugaacaucguccugaucgcccucagcgugcuggccgugcugaaggggcucuacaacuucgcgaccugcggccuggucgggcuggugaccuuccuccugcugugcggccgcuccugcaccaccagccucuacaaggggguguacgagcugcagacccuggagcucaacauggagacgcugaacaugugcaugccgcuguccugcaccaagaacaacagccaccacuacaucauggucggcaacgagaccggccucgagcugacccugacgaacaccuccaucaucaaccacaaguucugcaaccucagcgacgcccacaagaagaaccuguacgaccacgcccugauguccaucaucagcaccuuccaccucuccauccccaacuucaaccaguacgaggccaugagcugcgacuucaacgggggcaagaucuccgugcaguacaaccugagccacuccuacgccggggacgcggccaaccacugcggcaccguggccaacgggguccugcagacguucaugcggauggccuggggcggcagcuacaucgcgcucgacuccgggcgcggcaacugggacugcaucaugaccagcuaccaguaccugaucauccagaacaccaccugggaggaccacugccaguucucccggcccagccccaucggguaccugggccuccugucccagcgcacgcgggacaucuacaucagccgccggcugcucggcaccuucaccuggacccugagcgacuccgaggggaaggacacgccgggcggguacugccugacccgcuggaugcucaucgaggccgagcugaagugcuucggcaacaccgccguggccaagugcaacgagaagcacgacgaggaguucugcgacaugcugcggcuguucgacuucugcaagcaggccauccagcgccugaaggcggaggcccagaugagcauccagcugaucaacaaggccgugaacgcccucaucaacgaccagcugaucaugaagaaccaccuccgggacaucauggggauccccuacugcaacuacuccaaguacugcuaccucaaccacaccacgaccggccgcaccagccugcccaagugcugccuggucuccaacggcagcuaccucaacgagacccacuucuccgacgacaucgagcagcaggccgacaacaugaucacggagaugcugcagaaggaguacauggagcggcaggggaagacgccccugggccugguggaccucuucguguucagcaccuccuucuaccugaucagcaucuuccugcaccucgucaagaucccgacccaccgccacaucguggggaaguccugccccaagccccaccggcugaaccacaugggcaucugcagcugcgggcuguacaagcagcccggcgugccggucaaguggaagcgcugaggacuaguaauaaggaaacuguaugaaugucugugggcaggaagugaagagauccuucuguaaagguuuuuggaauuaugucugcugaauaauaaacuuuuuugaaauaauaaaucugguagaaaaaugagaucucaaaggcucuuuucagagccaccaaaaaaaaaaaaaaaaaaaaaaaaaaaaaaaaaaaaaaaaaaaaaaaaaaaaaaaaaaaaaaaaagaauu

SEQ ID NO: 40870 - RNA, 1778 nt, Artificial Sequence
  mRNA product Design b-4 (hSL-A64-N5) comprising derived and/or modified sequence from LASV(LP;Clade I)__AAF86701__GPCmut12 (opt1)
aggagagucccgcagucggcguccagcggcucugcuuguucgugugugugucguugcaggccuuauucaagcuuaccaugggccagaucaucaccuucuuccaggaggugccccacgucaucgaggaggugaugaacaucgugcugaucgcccucagccugcuggccauccucaaggggcuguacaacaucgcgaccugcggcaucaucgggcuggucgccuuccucuuccugugcggcaaguccugcagccugacgcucaagggcggguacgagcugcagacccuggagcucaacauggagacccugaacaugugcaugccgcuguccugcaccaagaacagcucccaccacuacauccgcgugggcaacgagacggggcucgagcugacccugaccaacaccagcaucaucaaccacaaguucugcaaccucuccgacgcccacaagaagaaccuguacgaccacgcccugaugagcaucaucuccacguuccaccucagcauccccaacuucaaccaguacgaggccauguccugcgacuucaacggcgggaagaucagcgugcaguacaaccugucccacagcuacgcgggcgacgccgccgagcacugcgggaccgucgccaacggcgugcugcagaccuucaugcggauggcguggggcgggcgcuacaucgcccucgacuccggcaaggggaacugggacugcaucaugaccagcuaccaguaccugaucauccagaacacgaccugggaggaccacugccaguucucccggcccagccccaucggcuaccugggccuccugucccagcgcacccgggacaucuacaucagccgccggcugcucgggaccuucacguggacccugagcgacuccgagggcaacgagacccccgggggcuacugccugacccgcuggaugcucaucgaggccgagcugaagugcuucgggaacacggccguggccaagugcaacgagaagcacgacgaggaguucugcgacaugcugcggcuguucgacuucugcaagcaggcgauccgccggcugaaggccgaggcccagaugagcauccagcugaucaacaaggccgucaacgcccucaucaacgaccagcugaucaugaagaaccaccuccgcgacaucaugggcauccccuacugcaacuacuccaaguacugcuaccucaaccacaccagcuccggccggaccagccugcccaagugcugccugaucuccaacgggagcuaccucaacgagacccaguucuccgacgacaucgagcagcaggcggacaacaugaucacggagaugcugcagaaggaguacaucgagcgccagggcaagaccccgcuggggcugguggacaucuucaucuucagcaccuccuucuaccucaucagcaucuuccugcaccugaucaagaucccgacccaccggcacaucgugggcaagcccugccccaagccccaccgccucaaccacaugggggucugcuccugcggccuguacaagcacccgggcgugcccacgaaguggaagcggugaggacuaguaauaaggaaacuguaugaaugucugugggcaggaagugaagagauccuucuguaaagguuuuuggaauuaugucugcugaauaauaaacuuuuuugaaauaauaaaucugguagaaaaaugagaucucaaaggcucuuuucagagccaccaaaaaaaaaaaaaaaaaaaaaaaaaaaaaaaaaaaaaaaaaaaaaaaaaaaaaaaaaaaaaaaaagaauu

SEQ ID NO: 40871 - RNA, 1778 nt, Artificial Sequence
  mRNA product Design b-4 (hSL-A64-N5) comprising derived and/or modified sequence from LASV(803213;Clade II)__AAF86703__GPCmut12 (opt1)
aggagagucccgcagucggcguccagcggcucugcuuguucgugugugugucguugcaggccuuauucaagcuuaccaugggccagaucaucaccuucuuccaggaggugccccacgucaucgaggaggugaugaacaucgugcugaucgcccucagccugcuggccauccucaaggggaucuacaacgucgcgaccugcggccuguucgggcugaucuccuuccuccugcugugcggccgcagcugcuccgugacguacaaggggguguacgagcuccagacccuggagcugaacauggccaaccucaacaugugcaugccgcugagcugcaccaagaacaacucccaccacuacaucauggucggcaacgagaccggccuggagcucacgcugaccaacaccagcaucaucaaccacaaguucugcaaccuguccgacgcccacaagaagaaccucuacgaccacgcccugaugagcaucaucuccaccuuccaccugagcauccccaacuucaaccaguacgaggccauguccugcgacuucaacgggggcaagaucagcgugcaguacaaccucucccacagcuucgcgguggacgccgccaaccacugcgggacgaucgccaacggcguccugcagaccuucaugcggauggcguggggcggguccuacaucgcccuggacagcggcaaggggaacugggacugcaucaugaccuccuaccaguaccucaucauccagaacaccacgugggaggaccacugccaguucagccgccccucccccaucggcuaccuggggcugcucagccagcggacccgcgacaucuacaucagccggcgccugcugggcaccuucaccuggacgcucuccgacagcgagggcaacgaggcccccgggggcuacugccugacccgguggaugcugaucgaggccgagcucaagugcuucgggaacaccgccguggcgaagugcaacgagaagcacgacgaggaguucugcgacaugcugcgccuguucgacuucugcaagcaggccaucaagcggcucaagaccgaggcccagauguccauccagcugaucaacaaggccgugaacgcccugaucaacgaccagcucaucaugaagaaccaccuccgcgacaucaugggcauccccuacugcaacuacagccgguacugcuaccugaaccacacggucaccgggaagaccucccugccccgcugcugccuggugagcaacggcuccuaccugaacgagacccacuucagcgacgacaucgagcagcaggcggacaacaugaucacggagaugcuccagaaggaguacauggaccggcagggcaagaccccgcuggggcugguggaccuguucgucuucuccaccagcuucuaccucaucuccaucuuccugcaccuggugaagaucccgacccaccgccacaucgugggcaagcccugccccaagccccaccggcucaaccacauggggaucugcagcugcggccuguacaagcacccggggguccccgugaaguggaagcgcugaggacuaguaauaaggaaacuguaugaaugucugugggcaggaagugaagagauccuucuguaaagguuuuuggaauuaugucugcugaauaauaaacuuuuuugaaauaauaaaucugguagaaaaaugagaucucaaaggcucuuuucagagccaccaaaaaaaaaaaaaaaaaaaaaaaaaaaaaaaaaaaaaaaaaaaaaaaaaaaaaaaaaaaaaaaaagaauu

SEQ ID NO: 40872 - RNA, 1778 nt, Artificial Sequence
  mRNA product Design b-4 (hSL-A64-N5) comprising derived and/or modified sequence from LASV(GA391;Clade III)__CAA36645__GPCmut12 (opt1)
aggagagucccgcagucggcguccagcggcucugcuuguucgugugugugucguugcaggccuuauucaagcuuaccaugggccagaucgugaccuucuuccaggaggucccccacgugaucgaggaggugaugaacaucguccugaucgcccucagcauccuggccauccugaaggggcucuacaacguggcgaccugcggccugaucgggcuggugaccuuccuccugcuguccggccgcagcugcucccucaucuacaaggggaccuacgagcugcagacccuggagcucaacauggagacccugaacaugugcaugccgcugagcugcacgaagaacaacucccaccacuacauccgggucggcaacgagaccggccucgagcugacccugaccaacacgagcauccucaaccacaaguucugcaaccuguccgacgcccacaagcgcaaccuguacgaccacagccucauguccaucaucagcaccuuccaccuguccauccccaacuucaaccaguacgaggccaugagcugcgacuucaacgggggcaagaucaccgugcaguacaaccugucccacagcuucgccguggacgccgcggggcacugcggcacccucgccaacgggguccugcagacguucaugcggauggccuggggcggcuccuacaucgcccuggacagcgggcgcggcaacugggacugcaucaugaccuccuaccaguaccucaucauccagaacaccaccugggacgaccacugccaguucagccggcccucccccaucggguaccugggccugcucagccagcgcacgcgggacaucuacaucagccgccggcugcugggcaccuucaccuggacccucuccgacagcgaggggaacgagacgccgggcggguacugccugacccgcuggaugcugaucgaggcggagcucaagugcuucggcaacaccgccguggccaagugcaacgagaagcacgacgaggaguucugcgacaugcugcggcuguucgacuucugcaagcaggccauccgccggcucaagaccgaggcccagauguccauccagcugaucaacaaggcggugaacgcccugaucaacgaccagcucaucaugaagaaccaccuccgcgacaucauggggauccccuacugcaacuacagccgguacugcuaccugaaccacacguccaccggcaagaccagccugccccgcugcugccugaucuccaacggcagcuaccugaacgagaccaaguucuccgacgacaucgagcagcaggccgacaacaugaucacggagaugcugcagaaggaguacaucgaccggcaggggaagacgccccucggccuggucgaccuguucguguucagcaccuccuucuaccucaucagcaucuuccugcaccuggugaagaucccgacccaccgccacaucgucgggaagcccugccccaagccccaccggcucaaccacaugggcaucugcuccugcgggcuguacaagcagccgggcgugcccgugcgcuggaagcggugaggacuaguaauaaggaaacuguaugaaugucugugggcaggaagugaagagauccuucuguaaagguuuuuggaauuaugucugcugaauaauaaacuuuuuugaaauaauaaaucugguagaaaaaugagaucucaaaggcucuuuucagagccaccaaaaaaaaaaaaaaaaaaaaaaaaaaaaaaaaaaaaaaaaaaaaaaaaaaaaaaaaaaaaaaaaagaauu

SEQ ID NO: 40873 - RNA, 1781 nt, Artificial Sequence
  mRNA product Design b-4 (hSL-A64-N5) comprising derived and/or modified sequence from LASV(AV;Clade V)__CCA30314__GPCmut12 (opt1)
aggagagucccgcagucggcguccagcggcucugcuuguucgugugugugucguugcaggccuuauucaagcuuaccaugggccagaucgugaccuucuuccaggaggucccccacgugaucgaggaggugaugaacaucguccugaucgcccucagcauccuggccgugcugaaggggcucuacaacaucgcgaccugcggccugaucgggcugaucacguuccuccugcugugcggccgcuccugcagcuccaaccucuacaaggggguguacgagcugcagagccuggaccucaacauggagacccugaacaugugcaugccgcuguccugcaccaagaacaacagccaccacuacauccgggucggcaacgacaccggccucgagcugacgcugaccaacaccuccauccucaaccacaaguucugcaaccugagcgacgcccacaagaaggaccuguacgaccacgcccucauguccaucaucagcaccuuccaccuguccauccccaacuucaaccaguacgaggccaugagcugcgacuucaacgggggcaagaucuccgugcaguacaaccugagccacuccuacgccaucgacgcggccaaccacugcgggacgguggccaacggcauccuccagaccuucaugcgcauggccuggggcgggagcuacaucgcgcuggacuccggccgggggaacugggacugcaucaugaccagcuaccaguaccugaucauccagaacaccacgugggagaaccacugccaguucucccgccccagccccaucggcuaccucgggcugcugagccagcggacccgcgacaucuacaucucccggcgccuccugggcaccuucaccuggacgcugagcgacuccgagggcaacgccacccccgggggcuacugccucacccgguggaugcugaucgaggccgagcugaagugcuucgggaacaccgccgucgccaagugcaacgagaagcacgacgaggaguucugcgacaugcuccgccuguucgacuucugcaagcaggcgaucagccggcugaaguccgaggcccagaugagcauccagcucaucaacaaggccgugaacgcccugaucaacgaccagcugaucaugaagaaccaccuccgcgacaucaugggcauccccuacugcaacuacuccaaguacugcuaccugaaccacacgaucaccgggaagaccagccugcccaagugcugccucguguccaacggcagcuaccugaacgagacccacuucuccgacgacaucgagcagcaggccgacaacaugaucacggagaugcugcagaaggaguacauggagcggcagggcaagaccccgcuggggcucgucgaccuguucguguucagcaccuccuucuaccugaucagcaucuuccuccgccuggugaagaucccgacccaccggcacaucgucggcaagcccugccccaagccccaccgccugaaccacauggggaucugcuccugcggccucuacaagcagccgggggugcccgugcgguggaagcgcugaggacuaguaauaaggaaacuguaugaaugucugugggcaggaagugaagagauccuucuguaaagguuuuuggaauuaugucugcugaauaauaaacuuuuuugaaauaauaaaucugguagaaaaaugagaucucaaaggcucuuuucagagccaccaaaaaaaaaaaaaaaaaaaaaaaaaaaaaaaaaaaaaaaaaaaaaaaaaaaaaaaaaaaaaaaaagaauu

SEQ ID NO: 40874 - RNA, 1778 nt, Artificial Sequence
  mRNA product Design b-4 (hSL-A64-N5) comprising derived and/or modified sequence from LASV(Togo/2016/7082;Clade VI)__AMR44577__GPCmut12 (opt1)
aggagagucccgcagucggcguccagcggcucugcuuguucgugugugugucguugcaggccuuauucaagcuuaccaugggccagaucaucaccuucuuccaggaggugccccacgucaucgaggaggugaugaacaucgugcugaucgcccucagccugcuggccauccucaagggggucuacaacguggcgaccugcggcaucaucgggcuggugacguuccuguuccucugcggccgcuccugcagccugaucuacaagggguccuacgagcugcagacccucgagcugaacauggagacccugaacaugugcaugccgcucagcugcaccaagaacuccagccaccacuacauccgggucggcaacgagacgggccuggagcugacccucaccaacaccuccaucaucaaccacaaguucugcaaccugagcgacgcccacaagcgcaaccuguacgaccacgcccucauguccauccugagcacguuccaccuguccauccccaacuucaaccaguacgaggccaugagcugcgacuucaacgggggcaagaucuccgugcaguacaaccucagccacgccuacgcgguggacgccgccgagcacugcgggaccgucgccaacggcgugcugcagaccuucaugcggauggcguggggcggguccuacaucgcccuggacagcggccgcgggaacugggacugcaucaugaccuccuaccaguaccucaucauccagaacacgaccugggaggaccacugccaguucagccggcccucccccaucggcuaccuggggcugcucagccagcgcacccgggacaucuacaucagccgccggcugcugggcaccuucacguggacccucuccgacagcgagggcaacgagacccccgggggcuacugccugacccgcuggaugcugaucgaggccgagcucaagugcuucgggaacacggccguggccaagugcaacgagaagcacgacgaggaguucugcgacaugcugcggcuguucgacuucugcaagcaggcgauccagcgccucaaguccgaggcccagaugagcauccagcugaucaacaaggccgucaacgcccugaucaacgaccagcucaucaugaagaaccaccuccgggacaugaugggcauccccuacugcaacuacuccaaguacugcuaccugaaccacaccagcuccgggcgcaccagccugcccaagugcugccugguguccaacggcagcuaccugaacgagacccacuucuccgacgacaucgagcagcaggccgacaacaugaucacggagaugcuccagaaggaguacaucgaccggcagggcaagaccccgcuggggcugguggaccuguucgucuucagcaccuccuucuaccucaucagcaucuuccugcaccugaucaagaucccgacccaccgccacaucgugggcaagcccugccccaagccccaccggcucaaccacauggggaucugcuccugcggccuguacaagcagccgggggugcccacgcgcuggaagcggugaggacuaguaauaaggaaacuguaugaaugucugugggcaggaagugaagagauccuucuguaaagguuuuuggaauuaugucugcugaauaauaaacuuuuuugaaauaauaaaucugguagaaaaaugagaucucaaaggcucuuuucagagccaccaaaaaaaaaaaaaaaaaaaaaaaaaaaaaaaaaaaaaaaaaaaaaaaaaaaaaaaaaaaaaaaaagaauu

SEQ ID NO: 40875 - RNA, 1778 nt, Artificial Sequence
  mRNA product Design b-4 (hSL-A64-N5) comprising derived and/or modified sequence from LASV(KAK-428;Clade n.d. (VII))__ANH09740__GPCmut12 (opt1)
aggagagucccgcagucggcguccagcggcucugcuuguucgugugugugucguugcaggccuuauucaagcuuaccaugggccagaucgugaccuucuuccaggaggucccccacgugaucgaggaggugaugaacaucguccugaucgcccucagccugcuggccauccucaaggggcuguacaacuucgcgaccugcggcgugaucgggcugaucacguuccuccugcugugcggccgcuccugcagcgccaccuacaaggggcaguacgagcuccagacccuggagcugaacauggagucccucaacaugugcaugccgcugagcugcaccaagaacaacucccaccacuacauccgggccggcaacaacacgggccuggagcucacccugaccaacaccagcaucaucucccacaaguucugcaaccugagcgacgcccacaagaagaaccucuacgaccacacgcugauguccaucaucaccaccuuccaccugagcauccccaacuucaaccaguacgaggccauguccugcgacuucaacgggggcaagaucagcauccaguacaaccucucccacagcuacgcgggggacgccgcccagcacugcggcaccguggccaacgggguccugcagacguucaugcgcauggcguggggcggcuccuaccuggcccucgacagcgggcggcgcggcugggacugcaucaucuccagcuaccaguaccugaucauccagaacaccaccugggacgaccacugccaguucucccggcccagccccaucggguaccugggcuucgugagccagaagacccgcgacaucuacaucucccggcgccuccugggcacguucaccuggacccugagcgacuccgaggggcacgacaugccgggcggguacugccucacccgguggaugcugaucgaggccgaccugaagugcuucggcaacacggccguggccaagugcaacgagaagcacgacgaggaguucugcgacauguggcgccucuucgacuucugcaagcaggcgauccagcggcugaaggccgaggcccagaugaacauccagcugaucaacaaggccgucaacgcccucaucaacgaccagcugaugaugaagaaccaccuccgcgacaucauggggauccccuacugcaacuacagcaaguucugcuaccugaacaacaccaccaccggccggacgucccugccccgcugcugccugaucagcaacggcuccuaccucaacgagacccacuucagcgacgacaucgagcagcaggcggacaacaugaucaccgagaugcugcagaaggaguacauggaccggcaggggaagacgccccugggccucguggaccuguucguguucuccaccagcuucuaccugaucaccaucuuccugcaccucgucaagaucccgacccaccgccacaucguggggaagcccugccccaagccccaccggcugaaccacaugggcaucugcuccugcgggcuguacaagcagccgggcgugcccguccgcuggaagcggugaggacuaguaauaaggaaacuguaugaaugucugugggcaggaagugaagagauccuucuguaaagguuuuuggaauuaugucugcugaauaauaaacuuuuuugaaauaauaaaucugguagaaaaaugagaucucaaaggcucuuuucagagccaccaaaaaaaaaaaaaaaaaaaaaaaaaaaaaaaaaaaaaaaaaaaaaaaaaaaaaaaaaaaaaaaaagaauu

SEQ ID NO: 40876 - RNA, 1778 nt, Artificial Sequence; identical to SEQ ID NO: 40870
  mRNA product Design b-4 (hSL-A64-N5) comprising derived and/or modified sequence from LASV(Pinneo-NIG-1969;Clade I)__AIT17836__GPCmut12 (opt1)

SEQ ID NO: 40877 - RNA, 1778 nt, Artificial Sequence
  mRNA product Design b-4 (hSL-A64-N5) comprising derived and/or modified sequence from LASV(ISTH0009-NIG-2011;Clade II)__AIT17404__GPCmut12 (opt1)
aggagagucccgcagucggcguccagcggcucugcuuguucgugugugugucguugcaggccuuauucaagcuuaccaugggccagaucaucaccuucuuccaggaggugccccacgucaucgaggaggugaugaacaucgugcugaucgcccucagccugcuggccauccucaaggggaucuacaacgucgcgaccugcggccuguucgggcugguguccuuccuccugcugugcggccgcagcugcuccacgaccuacaaggggguguacgagcuccagacccuggagcuggacauggccagccucaacaugugcaugccgcuguccugcaccaagaacaacagccaccacuacaucauggucggcaacgagacgggccuggagcucacccugaccaacaccuccaucaucaaccacaaguucugcaaccugagcgacgcccacaagaagaaccucuacgaccacgcccugauguccaucaucagcacguuccaccuguccauccccaacuucaaccaguacgaggccaugagcugcgacuucaacgggggcaagaucuccgugcaguacaaccucagccacgcguacgccguggacgccgccaaccacugcgggaccaucgcgaacggcguccugcagaccuucaugcggauggccuggggcggguccuacaucgcccuggacagcggcaagggguccugggacugcaucaugaccagcuaccaguaccucaucauccagaacacgaccugggaggaccacugccaguucucccgccccagccccaucggcuaccuggggcugcucagccagcggacccgcgacaucuacaucucccggcgccugcugggcaccuucacguggacccucagcgacuccgagggcaacgagacccccgggggcuacugccugacccgguggaugcugaucgaggccgagcucaagugcuucgggaacacggccguggcgaagugcaacgagaagcacgacgaggaguucugcgacaugcugcgccuguucgacuucugcaagcaggccauccggcgccucaagaccgaggcccagaugagcauccagcugaucaacaaggccgugaacgcccugaucaacgaccagcucaucaugaagaaccaccuccgggacaucaugggcauccccuacugcaacuacuccaaguacugcuaccugaaccacaccgucaccgggaagacgagccugccccgcugcugccugguguccaacggcagcuaccugaacgagacccacuucuccgacgacaucgagcagcaggcggacaacaugaucaccgagcuccugcagaaggaguacauggaccggcagggcaagaccccgcuggggcugguggaccucuucgucuucagcacguccuucuaccugaucagcaucuuccugcaccucaucaagaucccgacccaccgccacaucaccggcaagcccugccccaagccccaccggcugaaccacauggggaucugcuccugcggccuguacaagcacccgggggugcccgugaaguggaagcgcugaggacuaguaauaaggaaacuguaugaaugucugugggcaggaagugaagagauccuucuguaaagguuuuuggaauuaugucugcugaauaauaaacuuuuuugaaauaauaaaucugguagaaaaaugagaucucaaaggcucuuuucagagccaccaaaaaaaaaaaaaaaaaaaaaaaaaaaaaaaaaaaaaaaaaaaaaaaaaaaaaaaaaaaaaaaaagaauu

SEQ ID NO: 40878 - RNA, 1778 nt, Artificial Sequence
  mRNA product Design b-4 (hSL-A64-N5) comprising derived and/or modified sequence from LASV(ISTH2010-NIG-2012;Clade II)__AIT17482__GPCmut12 (opt1)
aggagagucccgcagucggcguccagcggcucugcuuguucgugugugugucguugcaggccuuauucaagcuuaccaugggccagaucaucaccuucuuccaggaggugccccacgucaucgaggaggugaugaacaucgugcugaucgcccucagccugcuggccauccucaaggggaucuacaacgucgcgaccugcggccuguucgggcugguguccuuccuccugcugugcggccgcagcugcuccacgaccuacaaggggguguacgagcuccagacccuggagcuggacauggccagccucaacaugugcaugccgcuguccugcaccaagaacaacagccaccacuacaucauggucggcaacgagacgggccuggagcucacccugaccaacaccuccaucaucaaccacaaguucugcaaccugagcgacgcccacaagaagaaccucuacgaccacgcccugauguccaucaucagcacguuccaccuguccauccccaacuucaaccaguacgaggccaugagcugcgacuucaacgggggcaagaucuccgugcaguacaaccucagccacgcguacgccguggacgccgccaaccacugcgggaccaucgcgaacggcguccugcagaccuucaugcggauggccuggggcggguccuacaucgcccuggacagcggcaagggguccugggacugcaucaugaccagcuaccaguaccucaucauccagaacaucacgugggaggaccacugccaguucucccgccccagccccaucggcuaccuggggcugcucagccagcggacccgcgacaucuacaucucccggcgccugcugggcaccuucaccuggacgcucagcgacuccgagggcaacgagacccccgggggcuacugccugacccgguggaugcugaucgaggccgagcucaagugcuucgggaacaccgccguggcgaagugcaacgagaagcacgacgaggaguucugcgacaugcugcgccuguucgacuucugcaagcaggccauccggcgccucaagacggaggcccagaugagcauccagcugaucaacaaggccgugaacgcccugaucaacgaccagcucaucaugaagaaccaccuccgggacaucaugggcauccccuacugcaacuacuccaaguacugcuaccugaaccacaccgucaccgggaagaccagccugccccgcugcugccugguguccaacggcagcuaccugaacgagacgcacuucuccgacgacaucgagcagcaggcggacaacaugaucaccgagcuccugcagaaggaguacaucgaccggcagggcaagaccccgcuggggcugguggaccucuucgucuucagcaccuccuucuaccugaucagcaucuuccugcaccucgugaagaucccgacgcaccgccacguggucggcaagcccugccccaagccccaccggcugaaccacauggggaucugcuccugcggccuguacaagcacccgggggugcccgugaaguggaagcgcugaggacuaguaauaaggaaacuguaugaaugucugugggcaggaagugaagagauccuucuguaaagguuuuuggaauuaugucugcugaauaauaaacuuuuuugaaauaauaaaucugguagaaaaaugagaucucaaaggcucuuuucagagccaccaaaaaaaaaaaaaaaaaaaaaaaaaaaaaaaaaaaaaaaaaaaaaaaaaaaaaaaaaaaaaaaaagaauu

SEQ ID NO: 40879 - RNA, 1778 nt, Artificial Sequence
  mRNA product Design b-4 (hSL-A64-N5) comprising derived and/or modified sequence from LASV(Lassa virus/H.sapiens-wt/NGA/2015/ISTH_0543;Clade II)__AVO03639__GPCmut12 (opt1)
aggagagucccgcagucggcguccagcggcucugcuuguucgugugugugucguugcaggccuuauucaagcuuaccaugggccagaucaucaccuucuuccaggaggugccccacgucaucgaggaggugaugaacaucgugcugaucgcccucagccugcuggccauccucaaggggaucuacaacgucgcgaccugcggccuguucgggcugguguccuuccuccugcugugcggccgcagcugcuccacgaccuacaaggggguguacgagcuccagacccuggagcuggacauggccaaccucaacaugugcaugccgcugagcugcaccaagaacaacucccaccacuacaucauggucggcaacgagacgggccuggagcucacccugaccaacaccagcaucaucaaccacaaguucugcaaccuguccgacgcccacaagaagaaccucuacgaccacgcccugaugagcaucaucuccacguuccaccugagcauccccaacuucaaccaguacgaggccauguccugcgacuucaacgggggcaagaucagcgugcaguacaaccucucccacaccuacgcgguggacgccgccaaccacugcgggaccaucgccaacggcguccugcagaccuucaugcggauggcguggggcgggagcuacaucgcccuggacuccggcaaggggagcugggacugcaucaugacguccuaccaguaccucgugauccagaacaccaccugggaggaccacugccaguucagccgccccucccccaucggcuaccuggggcugcucagccagcggacccgcgacaucuacaucagccggcgccugcugggcacguucaccuggacccucuccgacagcgagggcaacgagacccccgggggcuacugccugacgcgguggaugcugaucgaggccgagcucaagugcuucgggaacaccgccguggccaagugcaacgagaagcacgacgaggaguucugcgacaugcugcgccuguucgacuucugcaagcaggcgauccggcgccucaagaccgaggcccagauguccauccagcugaucaacaaggccgucaacgcccugaucaacgaccagcucaucaugaagaaccaccuccgggacaucaugggcaucccguacugcaacuacagcaaguacugcuaccugaaccacaccgugacggggaagaccucccugccccgcugcugccuggugagcaacggcuccuaccugaacgagacccacuucagcgacgacaucgagcagcaggccgacaacaugaucaccgagcuccugcagaaggaguacaucgaccggcagggcaagacgccccuggggcuggucgaccucuucguguucuccaccagcuucuaccugaucuccaucuuccugcaccucgugaagaucccgacccaccgccacaucaccggcaagcccugccccaagccccaccggcugaaccacauggggaucugcagcugcggccuguacaagcacccggggguccccgugaaguggaagcgcugaggacuaguaauaaggaaacuguaugaaugucugugggcaggaagugaagagauccuucuguaaagguuuuuggaauuaugucugcugaauaauaaacuuuuuugaaauaauaaaucugguagaaaaaugagaucucaaaggcucuuuucagagccaccaaaaaaaaaaaaaaaaaaaaaaaaaaaaaaaaaaaaaaaaaaaaaaaaaaaaaaaaaaaaaaaaagaauu

SEQ ID NO: 40880 - RNA, 1778 nt, Artificial Sequence
  mRNA product Design b-4 (hSL-A64-N5) comprising derived and/or modified sequence from LASV(Lassa virus/H.sapiens-wt/NGA/2016/ISTH_0009;Clade II)__AVO03571__GPCmut12 (opt1)
aggagagucccgcagucggcguccagcggcucugcuuguucgugugugugucguugcaggccuuauucaagcuuaccaugggccagaucaucaccuucuuccaggaggugccccacgucaucgaggaggugaugaacaucgugcugaucgcccucagccugcuggccauccucaaggggaucuacaacgucgcgaccugcggccugcuggggcucguguccuuccugcugcucugcggccgcagcugcuccacgaccuacaaggggguguacgagcugcagacccuggagcucgacauggccagccugaacaugugcaugccgcuguccugcaccaagaacaacagccaccacuacaucauggucggcaacgagacgggccucgagcugacccugaccaacaccuccaucaucaaccacaaguucugcaaccucagcgacgcccacaagaagaaccuguacgaccacgcccugauguccaucaucagcacguuccaccucuccauccccaacuucaaccaguacgaggccaugagcugcgacuucaacgggggccggaucuccgugcaguacaaccugagccacuccuacgcgguggacgccgccaaccacugcgggaccaucgccaacggcguccugcagaccuucaugcgcauggcguggggcgggagcuacaucgcccucgacuccggcaaggggagcugggacugcaucaugaccuccuaccaguaccugaucauccagaacacgaccugggaggaccacugccaguucagccggcccagccccaucggcuaccuggggcuccugucccagcgcacccgggacaucuacaucagccgccggcugcucggcaccuucacguggacccuguccgacagcgagggcaacgagacccccgggggcuacugccugacccgcuggaugcucaucgaggccgagcugaagugcuucgggaacacggccguggccaagugcaacgagaagcacgacgaggaguucugcgacaugcugcggcuguucgacuucugcaagcaggcgauccgccggcugaagaccgaggcccagauguccauccagcugaucaacaaggccgugaacgcccucaucaacgaccagcugaucaugaagaaccaccuccgcgacaucaugggcauccccuacugcaacuacagcaaguacugcuaccucaaccacaccgucaccgggaagacgucccugccccggugcugccuggugagcaacggcuccuaccucaacgagacccacuucagcgacgacaucgagcagcaggccgacaacaugaucaccgagcugcugcagaaggaguacaucgaccgccagggcaagaccccgcuggggcucguggaccuguucgucuucuccacgagcuucuaccugaucuccaucuuccuccaccuggugaagaucccgacccaccggcacaucaccggcaagcccugccccaagccccaccgccugaaccacauggggaucugcagcugcggccucuacaaccacccgggggugcccgucaaguggaagcggugaggacuaguaauaaggaaacuguaugaaugucugugggcaggaagugaagagauccuucuguaaagguuuuuggaauuaugucugcugaauaauaaacuuuuuugaaauaauaaaucugguagaaaaaugagaucucaaaggcucuuuucagagccaccaaaaaaaaaaaaaaaaaaaaaaaaaaaaaaaaaaaaaaaaaaaaaaaaaaaaaaaaaaaaaaaaagaauu

SEQ ID NO: 40881 - RNA, 1778 nt, Artificial Sequence
  mRNA product Design b-4 (hSL-A64-N5) comprising derived and/or modified sequence from LASV(Lassa virus/H.sapiens-wt/NGA/2016/ISTH_0017;Clade II)__AVO03567__GPCmut12 (opt1)
aggagagucccgcagucggcguccagcggcucugcuuguucgugugugugucguugcaggccuuauucaagcuuaccaugggccagaucaucaccuucuuccaggaggugccccacgucaucgaggaggugaugaacaucgugcugaucgcccucagccugcuggccauccucaaggggaucuacaacgucgcgaccugcggccuguucgggcugguguccuuccuccugcugugcggccgcagcugcuccacgaccuacaaggggguguacgagcuccagacccuggagcuggacauggccagccucaacaugugcaugccgcuguccugcaccaagaacaacagccaccacuacaucauggucggcaacgagacgggccuggagcucacccugaccaacaccuccaucaucaaccacaaguucugcaaccugagcgacgcccacaagaagaaccucuacgaccacgcccugauguccaucaucagcacguuccaccuguccauccccaacuucaaccaguacgaggccaugagcugcgacuucaacgggggcaagaucuccgugcaguacaaccucagccacaccuacgcgaucgacgccgccaaccacugcgggaccaucgccaacggcgugcugcagaccuucaugcggauggcguggggcggguccuacaucgcccuggacagcggcaagggguccugggacugcaucaugacgagcuaccaguaccucaucauccagaacaccaccugggaggaccacugccaguucucccgccccagccccaucggcuaccuggggcugcucagccagcggacccgcgacaucuacaucucccggcgccugcugggcacguucaccuggacccucagcgacuccgagggcaacgagacccccgggggcuacugccugacgcgguggaugcugaucgaggccgagcucaagugcuucgggaacaccgccgucgccaagugcaacgagaagcacgacgaggaguucugcgacaugcugcgccuguucgacuucugcaagcaggcgauccggcgccucaagaccgaggcccagaugagcauccagcugaucaacaaggccgugaacgcccugaucaacgaccagcucaucaugaagaaccaccuccgggacaucaugggcaucccguacugcaacuacuccaaguacugcuaccugaaccacaccgugacggggaagaccagccugccccgcugcugccuggucuccaacggcagcuaccugaacgagacccacuucuccgacgacaucgagcagcaggccgacaacaugaucaccgagcuccugcagaaggaguacauggaccggcagggcaagacgccccuggggcugguggaccucuucguguucagcaccuccuucuaccugaucagcaucuuccugcaccucguccgcaucccgacccaccggcacgugaucggcaagcccugccccaagccccaccgccugaaccacauggggaucugcuccugcggccuguacaagcacccgggggugcccgucaaguggaagcggugaggacuaguaauaaggaaacuguaugaaugucugugggcaggaagugaagagauccuucuguaaagguuuuuggaauuaugucugcugaauaauaaacuuuuuugaaauaauaaaucugguagaaaaaugagaucucaaaggcucuuuucagagccaccaaaaaaaaaaaaaaaaaaaaaaaaaaaaaaaaaaaaaaaaaaaaaaaaaaaaaaaaaaaaaaaaagaauu

SEQ ID NO: 40882 - RNA, 1778 nt, Artificial Sequence
  mRNA product Design b-4 (hSL-A64-N5) comprising derived and/or modified sequence from LASV(Lassa virus/H.sapiens-wt/NGA/2018/ISTH_0959;Clade II)__AVV65099__GPCmut12 (opt1)
aggagagucccgcagucggcguccagcggcucugcuuguucgugugugugucguugcaggccuuauucaagcuuaccaugggccagaucaucaccuucuuccaggaggugccccacgucaucgaggaggugaugaacaucgugcugaucgcccucagccugcuggccauccucaaggggaucuacaacgucgugaccugcggccuguucgggcugguguccuuccuccugcugugcggccgcagcugcuccacgaccuacaagggggucuacgagcuccagacccuggagcuggacauggcgagccucaacaugugcaugccgcuguccugcaccaagaacaacagccaccacuacaucauggugggcaacgagacgggccuggagcucacccugaccaacaccuccaucaucaaccacaaguucugcaaccugagcgacgcccacaagaagaaccucuacgaccacgcccugauguccaucaucagcacguuccaccuguccauccccaacuucaaccaguacgaggccaugagcugcgacuucaacgggggcaagaucuccgugcaguacaaccucagccacgccuacgcgaucgacgccgccaaccacugcgggaccaucgccaacggcguccugcagaccuucaugcggauggcguggggcggguccuacaucgcccuggacagcggcaagggguccugggacugcaucaugaccagcuaccaguaccucaucauccagaacacgaccugggaggaccacugccaguucucccgccccagccccaucggcuaccuggggcugcucagccagcggacccgcgacaucuacaucucccggcgccugcugggcaccuucacguggacccucagcgacuccgagggcaacgagacccccgggggcuacugccugacccgguggaugcugaucgaggccgagcucaagugcuucgggaacacggccguggccaagugcaacgagaagcacgacgaggaguucugcgacaugcugcgccuguucgacuucugcaagcaggcgauccggcgccucaagaccgaggcccagaugagcauccagcugaucaacaaggccgugaacgcccugaucaacgaccagcucaucaugaagaaccaccuccgggacaucaugggcauccccuacugcaacuacuccaaguacugcuaccugaaccacaccgucaccgggaagacgagccugccccgcugcugccugguguccaacggcagcuaccugaacgagacccacuucuccgacgacaucgagcagcaggccgacaacaugaucaccgagcuccugcagaaggaguacaucgaccggcagggcaagaccccgcuggggcugguggaccucuucgucuucagcacguccuucuaccugaucagcaucuuccugcaccucgugaagaucccgacccaccgccacgugaucggcaagcccugccccaagccccaccggcugaaccacauggggaucugcuccugcggccuguacaagcacccggggguccccgugaaguggaagcgcugaggacuaguaauaaggaaacuguaugaaugucugugggcaggaagugaagagauccuucuguaaagguuuuuggaauuaugucugcugaauaauaaacuuuuuugaaauaauaaaucugguagaaaaaugagaucucaaaggcucuuuucagagccaccaaaaaaaaaaaaaaaaaaaaaaaaaaaaaaaaaaaaaaaaaaaaaaaaaaaaaaaaaaaaaaaaagaauu

SEQ ID NO: 40883 - RNA, 1778 nt, Artificial Sequence
  mRNA product Design b-4 (hSL-A64-N5) comprising derived and/or modified sequence from LASV(LASV003-NIG-2008;Clade II)__AIT17580__GPCmut12 (opt1)
aggagagucccgcagucggcguccagcggcucugcuuguucgugugugugucguugcaggccuuauucaagcuuaccaugggccagaucaucaccuucuuccaggaggugccccacgucaucgaggaggugaugaacaucgugcugaucgcccucagccugcuggccauccucaaggggaucuacaacgucgcgaccugcggccuguucgggcugguguccuuccuccugcugugcggccgcagcugcuccacgaccuacaaggggguguacgagcuccagacccuggagcuggacauggccagccucaacaugugcaugccgcuguccugcaccaagaacaacagccaccacuacaucauggucggcaacgagacgggccuggagcucacccugaccaacaccuccaucaucaaccacaaguucugcaaccugagcgacgcccacaagaagaaccucuacgaccacgcccugauguccaucaucagcacguuccaccuguccauccccaacuucaaccaguacgaggccaugagcugcgacuucaacgggggcaagaucuccgugcaguacaaccucagccacaccuacgcgguggacgccgccaaccacugcgggaccaucgccaacggcguccugcagaccuucaugcggauggcguggggcggguccuacaucgcccuggacagcggcaagggguccugggacugcaucaugacgagcuaccaguaccucaucauccagaacaccaccugggaggaccacugccaguucucccgccccagccccaucggcuaccuggggcugcucagccagcggacccgcgacaucuacaucucccggcgccugcugggcacguucaccuggacccucagcgacuccgagagcaacgagaccccgggcggguacugccugacgcgguggaugcugaucgaggccgagcucaagugcuucggcaacaccgccguggccaagugcaacgagaagcacgacgaggaguucugcgacaugcugcgccuguucgacuucugcaagcaggcgauccggcgccucaaggccgaggcccagauguccauccagcugaucaacaaggccgugaacgcccugaucaacgaccagcucaucaugaagaaccaccuccgggacaucauggggauccccuacugcaacuacagcaaguacugcuaccugaaccacaccgucaccggccgcacgucccugccccggugcugccuggugagcaacggguccuaccugaacgagacccacuucagcgacgacaucgagcagcaggcggacaacaugaucaccgagcuccugcagaaggaguacauggaccgccagggcaagacgccccugggccugguggaccucuucgucuucuccaccagcuucuaccugaucuccaucuuccugcaccucgugaagaucccgacccaccggcacgugaucgggaagcccugccccaagccccaccgccugaaccacaugggcaucugcagcugcgggcuguacaagcacccgggcguccccgugaaguggaagcggugaggacuaguaauaaggaaacuguaugaaugucugugggcaggaagugaagagauccuucuguaaagguuuuuggaauuaugucugcugaauaauaaacuuuuuugaaauaauaaaucugguagaaaaaugagaucucaaaggcucuuuucagagccaccaaaaaaaaaaaaaaaaaaaaaaaaaaaaaaaaaaaaaaaaaaaaaaaaaaaaaaaaaaaaaaaaagaauu

SEQ ID NO: 40884 - RNA, 1778 nt, Artificial Sequence
  mRNA product Design b-4 (hSL-A64-N5) comprising derived and/or modified sequence from LASV(LASV035-NIG-2009;Clade II)__AIT17588__GPCmut12 (opt1)
aggagagucccgcagucggcguccagcggcucugcuuguucgugugugugucguugcaggccuuauucaagcuuaccaugggccagaucaucaccuucuuccaggaggugccccacgucaucgaggaggugaugaacaucgugcugaucgcccucagccugcuggccauccucaaggggaucuacaacgucgcgaccugcggccuguucgggcugguguccuuccuccugcugugcggccgcagcugcuccacgaccuacaaggggguguacgagcuccagacccuggagcuggacauggccagccucaacaugugcaugccgcuguccugcaccaagaacaacagccaccacuacaucauggucggcaacgagacgggccuggagcucacccugaccaacaccuccaucaucaaccacaaguucugcaaccugagcgacgcccacaagaagaaccucuacgaccacgcccugauguccaucaucagcacguuccaccuguccauccccaacuucaaccaguacgaggccaugagcugcgacuucaacgggggcaagaucuccgugcaguacaaccucagccacgcguacgccguggacgccgccaaccacugcgggaccaucgcgaacggcguccugcagaccuucaugcggauggccuggggcggguccuacaucgcccuggacagcggcaagggguccugggacugcaucaugaccagcuaccaguaccucaucauccagaacacgaccugggaggaccacugccaguucucccgccccagccccaucggcuaccuggggcugcucagccagcggacccgcgacaucuacaucucccggcgccugcugggcaccuucacguggacccucagcgacuccgagggcaacgagacccccgggggcuacugccugacccgguggaugcugaucgaggccgagcucaagugcuucgggaacacggccguggcgaagugcaacgagaagcacgacgaggaguucugcgacaugcugcgccuguucgacuucugcaagcaggccauccggcgccucaaggccgaggcccagaugagcauccagcugaucaacaaggccgugaacgcgcugaucaacgaccagcucaucaugaagaaccaccuccgggacaucaugggcauccccuacugcaacuacuccaaguacugcuaccugaaccacaccgucaccgggaagaccagccugccccgcugcugccugguguccaacggcagcuaccugaacgagacgcacuucuccgacgacaucgagcagcaggccgacaacaugaucaccgagcuccugcagaaggaguacaucgaccggcagggcaagaccccgcuggggcugguggaccucuucgucuucagcaccuccuucuaccugaucagcaucuuccugcaccucgugaagaucccgacgcaccgccacgugaucggcaagcccugccccaagccccaccggcugaaccacauggggaucugcuccugcggccuguacaagcacccggggguccccgugaaguggaagcgcugaggacuaguaauaaggaaacuguaugaaugucugugggcaggaagugaagagauccuucuguaaagguuuuuggaauuaugucugcugaauaauaaacuuuuuugaaauaauaaaucugguagaaaaaugagaucucaaaggcucuuuucagagccaccaaaaaaaaaaaaaaaaaaaaaaaaaaaaaaaaaaaaaaaaaaaaaaaaaaaaaaaaaaaaaaaaagaauu

SEQ ID NO: 40885 - RNA, 1778 nt, Artificial Sequence
  mRNA product Design b-4 (hSL-A64-N5) comprising derived and/or modified sequence from LASV(LASV1000-NIG-2009;Clade II)__AIT17782__GPCmut12 (opt1)
aggagagucccgcagucggcguccagcggcucugcuuguucgugugugugucguugcaggccuuauucaagcuuaccaugggccagaucaucaccuucuuccaggaggugccccacgucaucgaggaggugaugaacaucgugcugaucgcccucagccugcuggccauccucaaggggaucuacaacgucgcgaccugcggccuguucgggcugguguccuuccuccugcugugcggccgcagcugcuccacgaccuacaaggggguguacgagcuccagacccuggagcuggacauggccagccucaacaugugcaugccgcuguccugcaccaagaacaacagccaccacuacaucauggucggcaacgagacgggccuggagcucacccugaccaacaccuccaucaucaaccacaaguucugcaaccugagcgacgcccacaagaagaaccucuacgaccacgcccugauguccaucaucagcacguuccaccuguccauccccaacuucaaccaguacgaggccaugagcugcgacuucaacgggggcaagaucuccgugcaguacaaccucagccacaccuacgcgguggacgccgccaaccacugcgggaccaucgccaacggcguccugcagaccuucaugcggauggcguggggcggguccuacaucgcccuggacagcggcaagggguccugggacugcaucaugacgagcuaccaguaccucaucauccagaacaccaccugggaggaccacugccaguucucccgccccagccccaucggcuaccuggggcugcucagccagcggacccgcgacaucuacaucucccggcgccugcugggcacguucaccuggacccucagcgacuccgagggcaacgagacccccgggggcuacugccugacgcgguggaugcugaucgaggccgagcucaagugcuucgggaacaccgccguggccaagugcaacgagaagcacgacgaggaguucugcgacaugcugcgccuguucgacuucugcaagcaggcgaucaagcggcucaagaccgaggcccagaugagcauccagcugaucaacaaggccgugaacgcccugaucaacgaccagcucaucaugaagaaccaccuccgcgacaucaugggcaucccguacugcaacuacuccaaguacugcuaccugaaccacaccgucacggggaagaccagccugccccggugcugccugguguccaacggcagcuaccugaacgagacccacuucuccgacgacaucgagcagcaggccgacaacaugaucaccgagcuccugcagaaggaguacaucgaccgccagggcaagacgccccuggggcugguggaccucuucgucuucagcaccuccuucuaccugaucagcaucuuccugcaccucgugaagaucccgacccaccggcacguggucggcaagcccugccccaagccccaccgccugaaccacauggggaucugcuccugcggccuguacaagcacccgggggugcccgugaaguggaagcggugaggacuaguaauaaggaaacuguaugaaugucugugggcaggaagugaagagauccuucuguaaagguuuuuggaauuaugucugcugaauaauaaacuuuuuugaaauaauaaaucugguagaaaaaugagaucucaaaggcucuuuucagagccaccaaaaaaaaaaaaaaaaaaaaaaaaaaaaaaaaaaaaaaaaaaaaaaaaaaaaaaaaaaaaaaaaagaauu

SEQ ID NO: 40886 - RNA, 1778 nt, Artificial Sequence
  mRNA product Design b-4 (hSL-A64-N5) comprising derived and/or modified sequence from LASV(LASV221-NIG-2010;Clade II)__AIT17624__GPCmut12 (opt1)
aggagagucccgcagucggcguccagcggcucugcuuguucgugugugugucguugcaggccuuauucaagcuuaccaugggccagaucaucaccuucuuccaggaggugccccacgucaucgaggaggugaugaacaucgugcugaucgcccucagccugcuggccauccucaaggggaucuacaacgucgcgaccugcggccuguucgggcugguguccuuccuccugcugugcggccgcagcugcuccacgaccuacaaggggguguacgagcuccagacccuggagcuggacauggccagccucaacaugugcaugccgcuguccugcaccaagaacaacagccaccacuacaucauggucggcaacgagacgggccuggagcucacccugaccaacaccuccaucaucaaccacaaguucugcaaccugagcgacgcccacaagaagaaccucuacgaccacgcccugauguccaucaucagcacguuccaccuguccauccccaacuucaaccaguacgaggccaugagcugcgacuucaacgggggcaagaucuccgugcaguacaaccucagccacaccuacgcgaucgacgccgccaaccacugcgggaccaucgccaacggcgugcugcagaccuucaugcggauggcguggggcggguccuacaucgcccuggacagcggcaagggguccugggacugcaucaugacgagcuaccaguaccucaucauccagaacaccaccugggaggaccacugccaguucucccgccccagccccaucggcuaccuggggcugcucagccagcggacccgcgacaucuacaucucccggcgccugcugggcacguucaccuggacccucagcgacuccgagggcaacgagacccccgggggcuacugccugacgcgguggaugcugaucgaggccgagcucaagugcuucgggaacaccgccgucgccaagugcaacgagaagcacgacgaggaguucugcgacaugcugcgccuguucgacuucugcaagcaggcgauccggcgccucaagaccgaggcccagaugagcauccagcugaucaacaaggccgugaacgcccugaucaacgaccagcucaucaugaagaaccaccuccgggacaucaugggcaucccguacugcaacuacuccaaguacugcuaccugaaccacaccgugacggggaagaccagccugccccgcugcugccuggucuccaacggcagcuaccugaacgagacccacuucuccgacgacaucgagcagcaggccgacaacaugaucaccgagaugcuccagaaggaguacauggaccggcagggcaagacgccccuggggcugguggaccuguucguguucagcaccuccuucuaccucaucagcaucuuccugcaccuggucaagaucccgacccaccgccacgugaucggcaagcccugccccaagccccaccggcucaaccacauggggaucugcuccugcggccuguacaagcacccgggggugcccgucaaguggaagcgcugaggacuaguaauaaggaaacuguaugaaugucugugggcaggaagugaagagauccuucuguaaagguuuuuggaauuaugucugcugaauaauaaacuuuuuugaaauaauaaaucugguagaaaaaugagaucucaaaggcucuuuucagagccaccaaaaaaaaaaaaaaaaaaaaaaaaaaaaaaaaaaaaaaaaaaaaaaaaaaaaaaaaaaaaaaaaagaauu

SEQ ID NO: 40887 - RNA, 1778 nt, Artificial Sequence
  mRNA product Design b-4 (hSL-A64-N5) comprising derived and/or modified sequence from LASV(LASV237-NIG-2010;Clade II)__AIT17638__GPCmut12 (opt1)
aggagagucccgcagucggcguccagcggcucugcuuguucgugugugugucguugcaggccuuauucaagcuuaccaugggccagaucaucaccuucuuccaggaggugccccacgucaucgaggaggugaugaacaucgugcugaucgcccucagccugcuggccauccucaaggggaucuacaacgucgcgaccugcggccuguucgggcugguguccuuccuccugcugugcggccgcagcugcuccacgaccuacaaggggguguacgagcuccagacccuggagcuggacauggccagccucaacaugugcaugccgcuguccugcaccaagaacaacagccaccacuacaucauggucggcaacgagacgggccuggagcucacccugaccaacaccuccaucaucaaccacaaguucugcaaccugagcgacgcccacaagaaggaccucuacgaccacgcccugauguccaucaucagcacguuccaccuguccauccccaacuucaaccaguacgaggccaugagcugcgacuucaacgggggcaagaucuccgugcaguacaaccucagccacaccuacgcgguggacgccgccaaccacugcgggaccaucgccaacggcguccugcagaccuucaugcggauggcguggggcggguccuacaucgcccuggacagcggcaagggguccugggacugcaucaugacgagcuaccaguaccucaucauccagaacaccaccugggaggaccacugccaguucucccgccccagccccaucggcuaccuggggcugcucagccagcggacccgcgacaucuacaucucccggcgccugcugggcacguucaccuggacccucagcgacuccgagggcaacgagacccccgggggcuacugccugacgcgguggaugcugaucgaggccgagcucaagugcuucgggaacaccgccguggccaagugcaacgagaagcacgacgaggaguucugcgacaugcugcgccuguucgacuucugcaagcaggcgauccggcgccucaagaccgaggcccagaugagcauccagcugaucaacaaggccgugaacgcccugaucaacgaccagcucaucaugaagaaccaccuccgggacaucaugggcaucccguacugcaacuacuccaaguacugcuaccugaaccacaccgucacggggaagaccagccugccccgcugcugccugguguccaacggcagcuaccugaacgagacccacuucuccgacgacaucgagcagcaggccgacaacaugaucaccgagcuccugcagaaggaguacauggaccggcagggcaagacgccccuggggcugguggaccucuucgucuucagcaccuccuucuaccugaucagcaucuuccugcaccucaucaagaucccgacccaccgccacaucaccggcaagcccugccccaagccccaccggcugaaccacauggggaucugcuccugcggccuguacaagcacccgggggugcccgugaaguggaagcgcugaggacuaguaauaaggaaacuguaugaaugucugugggcaggaagugaagagauccuucuguaaagguuuuuggaauuaugucugcugaauaauaaacuuuuuugaaauaauaaaucugguagaaaaaugagaucucaaaggcucuuuucagagccaccaaaaaaaaaaaaaaaaaaaaaaaaaaaaaaaaaaaaaaaaaaaaaaaaaaaaaaaaaaaaaaaaagaauu

SEQ ID NO: 40888 - RNA, 1778 nt, Artificial Sequence
  mRNA product Design b-4 (hSL-A64-N5) comprising derived and/or modified sequence from LASV(LASV253-NIG-2011;Clade II)__AIT17670__GPCmut12 (opt1)
aggagagucccgcagucggcguccagcggcucugcuuguucgugugugugucguugcaggccuuauucaagcuuaccaugggccagaucaucaccuucuuccaggaggugccccacgucaucgaggaggugaugaacaucgugcugaucgcccucagccugcuggccauccucaaggggaucuacaacgucgcgaccugcggccuguucgggcugguguccuuccuccugcugugcggccgcagcugcuccacgaccuacaaggggguguacgagcuccagacccuggagcuggacauggccagccucaacaugugcaugccgcuguccugcaccaagaacaacagccaccacuacaucauggucggcaacgagacgggccuggagcucacccugaccaacaccuccaucaucaaccacaaguucugcaaccugagcgacgcccacaagaagaaccucuacgaccacgcccugauguccaucaucagcacguuccaccuguccauccccaacuucaaccaguacgaggccaugagcugcgacuucaacgggggcaagaucuccgugcaguacaaccucagccacaccuacgcgguggacgccgccaaccacugcgggaccaucgccaacggcguccugcagaccuucaugcggauggcguggggcggguccuacaucgcccuggacagcggcaagggguccugggacugcaucaugacgagcuaccaguaccucaucauccagaacaccaccugggaggaccacugccaguucucccgccccagccccaucggcuaccuggggcugcucagccagcggacccgcgacaucuacaucucccggcgccugcugggcacguucaccuggacccucagcgacuccgagggcaacgagacccccgggggcuacugccugacgcgguggaugcugaucgaggccgagcucaagugcuucgggaacaccgccguggccaagugcaacgagaagcacgacgaggaguucugcgacaugcugcgccuguucgacuucugcaagcaggcgauccggcgccucaaggccgaggcccagaugagcauccagcugaucaacaaggccgugaacgcccugaucaacgaccagcucaucaugaagaaccaccuccgggacaucaugggcauccccuacugcaacuacuccaaguacugcuaccugaaccacaccgucaccgggcgcacgagccugccccggugcugccugguguccaacggcagcuaccugaacgagacccacuucuccgacgacaucgagcagcaggcggacaacaugaucaccgagcuccugcagaaggaguacaucgaccgccagggcaagaccccgcuggggcugguggaccucuucgucuucagcacguccuucuaccugaucagcaucuuccugcaccucgugaagaucccgacccaccggcacaucaucggcaagcccugccccaagccccaccgccugaaccacauggggaucugcuccugcggccuguacaagcacccgggggugcccgucaaguggaagcggugaggacuaguaauaaggaaacuguaugaaugucugugggcaggaagugaagagauccuucuguaaagguuuuuggaauuaugucugcugaauaauaaacuuuuuugaaauaauaaaucugguagaaaaaugagaucucaaaggcucuuuucagagccaccaaaaaaaaaaaaaaaaaaaaaaaaaaaaaaaaaaaaaaaaaaaaaaaaaaaaaaaaaaaaaaaaagaauu

SEQ ID NO: 40889 - RNA, 1778 nt, Artificial Sequence
  mRNA product Design b-4 (hSL-A64-N5) comprising derived and/or modified sequence from LASV(LASV254-NIG-2011;Clade II)__AIT17674__GPCmut12 (opt1)
aggagagucccgcagucggcguccagcggcucugcuuguucgugugugugucguugcaggccuuauucaagcuuaccaugggccagaucaucaccuucuuccaggaggugccccacgucaucgaggaggugaugaacaucgugcugaucgcccucagccugcuggccauccucaaggggaucuacaacgucgcgaccugcggccuguucgggcugguguccuuccuccugcugugcggccgcagcugcuccacgaccuacaaggggguguacgagcuccagacccuggagcuggacaugaccaaccucaacaugugcaugccgcugagcugcacgaagaacaacucccaccacuacaucauggucggcaacgagaccggccuggagcucacccugaccaacacgagcaucaucaaccacaaguucugcaaccuguccgacgcccacaagaagaaccucuacaaccacgcccugaugagcaucaucuccaccuuccaccugagcauccccaacuucaaccaguacgaggccauguccugcgacuucaacgggggcaagaucagcgugcaguacaaccucucccacagcuacgccguggacgcggccaaccacugcgggaccaucgccaacggcguccugcagaccuucaugcggauggccuggggcggguccuacaucgcgcuggacagcggcaaggggaacugggacugcaucaugacguccuaccaguaccucaucauccagaacaccaccugggaggaccacugccaguucagccgccccucccccaucggcuaccuggggcugcucagccagcggacccgcgacaucuacaucagccggcgccugcugggcacguucaccuggacccucuccgacagcgagggcaacgagacccccgggggcuacugccugacgcgguggaugcugaucgaggccgagcucaagugcuucgggaacaccgccguggccaagugcaacgagaagcacgacgaggaguucugcgacaugcugcgccuguucgacuucugcaagcaggccauccggcgccucaagaccgaggcgcaggccaacauccagcugaucaacaaggccgugaacgcccugaucaacgaccagcucaucaugaagaaccaccuccgggacaucaugggcaucccguacugcaacuacuccaaguacugcuaccugaaccacaccgucacggggaagaccagccugccccgcugcugccugguguccaacggcagcuaccugaacgagacccacuucuccgacgacaucgagcagcaggccgacaacaugaucaccgagcuccugcagaaggaguacauggaccggcagggcaagacgccccuggggcugguggaccucuucgucuucagcaccuccuucuaccugaucagcaucuuccugcaccucgugaagaucccgacccaccgccacgugaucggcaagcccugccccaagccccaccggcugaaccacauggggaucugcuccugcggccuguacaagcacccggggguccccgugaaguggaagcgcugaggacuaguaauaaggaaacuguaugaaugucugugggcaggaagugaagagauccuucuguaaagguuuuuggaauuaugucugcugaauaauaaacuuuuuugaaauaauaaaucugguagaaaaaugagaucucaaaggcucuuuucagagccaccaaaaaaaaaaaaaaaaaaaaaaaaaaaaaaaaaaaaaaaaaaaaaaaaaaaaaaaaaaaaaaaaagaauu

SEQ ID NO: 40890 - RNA, 1778 nt, Artificial Sequence
  mRNA product Design b-4 (hSL-A64-N5) comprising derived and/or modified sequence from LASV(Nig08-A19;Clade III)__ADU56618__GPCmut12 (opt1)
aggagagucccgcagucggcguccagcggcucugcuuguucgugugugugucguugcaggccuuauucaagcuuaccaugggccagaucgugaccuucuuccaggaggucccccacgugaucgaggaggugaugaacaucguccugaucgcccucagcauccuggccauccugaaggggcucuacaacaucgcgaccugcggccugaucgggcuggugacguuccuccugcuguccggccgcagcugcuccaugaccuacaaggggguguacgagcuccagacccuggagcugaacaugaacacccucaacaugugcaugccgcugagcugcacgaagaacaacucccaccacuacaucauggucggcaacgagaccggccuggagcucacccugaccaacacgagccugcuccaccacaaguucugcaaccuguccgacgcccacaagaagaaccuguacgaccacacccucaugagcaucaucuccaccuuccaccugagcauccccaacuucaaccaguacgaggccauguccugcgacuucaacgggggcaagaucaccgugcaguacaaccugagccacuccuacgccaucgacgccgcgaaccacugcgggacgguggccaacggcguccuccagaccuucaugcggauggccuggggcgggagcuacaucgcccuggacuccggccgcgggaagugggacugcaucaugaccagcuaccaguaccugaucauccagaacaccacgugggaggaccacugccaguucucccggcccagccccaucggcuaccucgggcugcugucccagcgcacccgggacaucuacaucagccgccggcuccugggcaccuucaccuggacgcugagcgacuccgagggcaacgagacccccgggggcuacugccucacccgcuggaugcugaucgaggcggagcugaagugcuucgggaacaccgccguggccaagugcaacgagaagcacgacgaggaguucugcgacaugcuccggcuguucgacuucugcaagcaggccauccgccggcugaaggccgaggcgcagaugagcauccagcucaucaacaaggccgugaacgcccugaucaacgaccagcugaucaugaagaaccaccuccgcgacaucaugggcauccccuacugcaacuacuccaaguacugcuaccugaaccacacgagcaccgggcggaccucccugccccgcugcugccucgucagcaacggcuccuaccugaacgagacccacuucagcgacgacaucgagcagcaggccgacaacaugaucacggagaugcugcagaaggaguaccuggaccggcagggcaagaccccgcucgggcugguggaccuguucguguucuccaccagcuucuaccucaucuccaucuuccugcaccuggucaagaucccgacccaccgccacaucgugggcaagcccugccccaagccccaccggcucaaccacauggggaucugcagcugcggccuguacaagcagccgggggugcccguccgcuggaagcggugaggacuaguaauaaggaaacuguaugaaugucugugggcaggaagugaagagauccuucuguaaagguuuuuggaauuaugucugcugaauaauaaacuuuuuugaaauaauaaaucugguagaaaaaugagaucucaaaggcucuuuucagagccaccaaaaaaaaaaaaaaaaaaaaaaaaaaaaaaaaaaaaaaaaaaaaaaaaaaaaaaaaaaaaaaaaagaauu

SEQ ID NO: 40891 - RNA, 1781 nt, Artificial Sequence
  mRNA product Design b-4 (hSL-A64-N5) comprising derived and/or modified sequence from LASV(G1180-SLE-2010;Clade IV)__AIT17168__GPCmut12 (opt1)
aggagagucccgcagucggcguccagcggcucugcuuguucgugugugugucguugcaggccuuauucaagcuuaccaugggccagaucgugaccuucuuccaggaggucccccacgugaucgaggaggugaugaacaucguccugaucgcccucagcauccuggccgugcugaaggggcucuacaacuucgcgaccugcggccugguggggcugcucacguuccugcugcucugcggccgcuccugcaccgccagccgguacaagggggucuacgagcugcagacccuggagcucaacauggagacccugaacaugugcaugccgcuguccugcacgaagaacaacagccaccacuacaucauggugggcaacgagaccggccucgagcugacccugaccaacacguccaucaucaaccacaaguucugcaaccucagcgacgcccacaagaagaaccuguacgaccacgcccugauguccaucaucagcaccuuccaccucuccauccccaacuucaaccaguacgaggccaugagcugcgacuucaacgggggcaagaucuccgugcaguacaaccugagccacuccuacgcgggggacgccgccaaccacugcggcaccgucgccaacggggugcugcagaccuucaugcgcauggcguggggcggcagcuacaucgcccucgacuccgggcacggcagcugggacugcaucaugacguccuaccaguaccugaucauccagaacaccaccugggaggaccacugccaguucagccggcccucccccaucggguaccugggccuccugagccagcgcacccgggacaucuacaucagccgccggcugcucggcacguucaccuggacccuguccgacagcgaggggaaggacaccccgggcggguacugccugacgcgcuggaugcucaucgaggccgagcugaagugcuucggcaacaccgccguggccaagugcaacgagaagcacgacgaggaguucugcgacaugcugcggcuguucgacuucugcaagcaggcgauccagcgccugaaggccgaggcccagauguccauccagcugaucaacaaggccgucaacgcccucaucaacgaccagcugaucaugaagaaccaccuccgggacaucauggggauccccuacugcaacuacagcaaguacugcuaccucaaccacaccaccacgggcaagaccucccugcccaagugcugccuggugagcaacggcuccuaccucaacgagacccacuucagcgacgacaucgagcagcaggcggacaacaugaucaccgagaugcugcagaaggaguacauggagcgccaggggaagacgccccugggccugguggaccucuucgucuucuccaccagcuucuaccugaucuccaucuuccugcaccucgugaagaucccgacccaccggcacaucgugggcaagagcugccccaagccccaccgccugaaccacauggggaucugcuccugcgggcuguacaagcagcccggcgucccggugaaguggaagcggugaggacuaguaauaaggaaacuguaugaaugucugugggcaggaagugaagagauccuucuguaaagguuuuuggaauuaugucugcugaauaauaaacuuuuuugaaauaauaaaucugguagaaaaaugagaucucaaaggcucuuuucagagccaccaaaaaaaaaaaaaaaaaaaaaaaaaaaaaaaaaaaaaaaaaaaaaaaaaaaaaaaaaaaaaaaaagaauu

SEQ ID NO: 40892 - RNA, 1781 nt, Artificial Sequence
  mRNA product Design b-4 (hSL-A64-N5) comprising derived and/or modified sequence from LASV(G1442-SLE-2011;Clade IV)__AIT17180__GPCmut12 (opt1)
aggagagucccgcagucggcguccagcggcucugcuuguucgugugugugucguugcaggccuuauucaagcuuaccaugggccagaucgugaccuucuuccaggaggucccccacgugaucgaggaggugaugaacaucguccugaucgcccucagcauccuggccgugcugaaggggcucuacaacguggcgaccugcggccugaucgggcuggucaccuuccuccugcugugcggccgcuccugcaccaccacccucuacaaggggguguacgagcugcagacgcuggagcucaacauggagacccugaacaugugcaugccgcugagcugcaccaagaacaacucccaccacuacauccgggugggcaacgagaccggccucgagcugacgcugaccaacaccagcaucaucaaccacaaguucugcaaccucuccgacgcccacaagaagaaccuguacgaccacgcccugaugagcaucaucuccaccuuccaccucagcauccccaacuucaaccaguacgaggccauguccugcgacuucaacgggggcaagaucagcguccaguacaaccugucccacagcuacgccggggacgcggccaaccacugcggcacgguggccaacggggugcugcagaccuucaugcgcauggccuggggcggcuccuacaucgcgcucgacagcgggcggggcaacugggacugcaucaugaccuccuaccaguaccugaucauccagaacaccacgugggacgaccacugccaguucagccgccccucccccaucggguaccugggccuccugagccagcggacccgcgacgucuacaucucccggcgccugcucggcaccuucaccuggacgcugagcgacagcgaggggaaggacaccccgggcggguacugccugacccgguggaugcucaucgaggccgagcugaagugcuucggcaacaccgccguggccaagugcaacgagaagcacgacgaggaguucugcgacaugcugcgccucuucgacuucugcaagcaggccauccagcggcugaaggcggaggcccagauguccauccagcugaucaacaaggccgugaacgcccucaucaacgaccagcugaucaugaagaaccaccuccgcgacaucauggggauccccuacugcaacuacagcaaguacugcuaccugaacaacacggccaccggcaagaccucccugcccaagugcugccugaucagcaacggcuccuaccucaacgagacccacuucagcgacgacaucgagcaggaggcggacaacaugaucacggagaugcugcagaaggaguacauggagcggcaggggaagacgccccugggccuggucgaccucuucguguucuccaccagcuucuaccugaucuccaucuuccugcaccucgugaagaucccgacccaccgccacaucgucggcaagagcugccccaagccccaccggcugaaccacauggggaucugcuccugcgggcuguacaagcagcccggcgugccggugcgcuggaagcggugaggacuaguaauaaggaaacuguaugaaugucugugggcaggaagugaagagauccuucuguaaagguuuuuggaauuaugucugcugaauaauaaacuuuuuugaaauaauaaaucugguagaaaaaugagaucucaaaggcucuuuucagagccaccaaaaaaaaaaaaaaaaaaaaaaaaaaaaaaaaaaaaaaaaaaaaaaaaaaaaaaaaaaaaaaaaagaauu

SEQ ID NO: 40893 - RNA, 1781 nt, Artificial Sequence
  mRNA product Design b-4 (hSL-A64-N5) comprising derived and/or modified sequence from LASV(G3010-SLE-2013;Clade IV)__AIT17344__GPCmut12 (opt1)
aggagagucccgcagucggcguccagcggcucugcuuguucgugugugugucguugcaggccuuauucaagcuuaccaugggccagaucgugaccuucuuccaggaggucccccacgugaucgaggaggugaugaacaucguccugaucgcccucagcauccuggccgugcugaaggggcucuacaacuucgcgaccugcggccugguggggcuggucacguuccuccugcugugcggccgcuccugcaccaccagccucuacaaggggguguacgagcugcagacccuggagcucaacauggagacgcugaacaugugcaugccgcuguccugcaccaagaacaacagccaccacuacaucauggugggcaacgagaccggccucgagcugacccugacgaacaccuccaucaucaaccacaaguucugcaaccucagcgacgcccacaagaagaaccuguacaaccacgcccugauguccaucaucagcaccuuccaccucuccauccccaacuucaaccaguacgaggccaugagcugcgacuucaacgggggcaagaucuccguccaguacaaccugagccacuccuacgccggggacgcggccagccacugcggcaccguggccaacggggugcugcagacguucaugcggauggccuggggcggcuccuacaucgcgcucgacagcggguacggcaagugggacugcaucaugaccuccuaccaguaccugaucauccagaacaccaccugggaggaccacugccaguucagccgccccucccccaucggguaccugggccuccugagccagcggacgcgcgacaucuacaucagccggcgccugcucggcaccuucaccuggacccuguccgacagcgaggggaaggacacgccgggcggguacugccugacccgguggaugcucaucgaggccgagcugaagugcuucggcaacaccgccgucgccaagugcaacgagaagcacgacgaggaguucugcgacaugcugcgccucuucgacuucugcaagcaggccauccagcggcugaagaccgaggcgcagauguccauccagcugaucaacaaggccgugaacgcccucaucaacgaccagcugaucaugaagaaccaccuccgcgacaucauggggauccccuacugcaacuacagcaaguacugcuaccugaaccacacgaccaccggcaagaccucccugcccaagugcugccuggugagcaacggcuccuaccucaacgagacgcacuucagcgacgacaucgagcagcaggccgacaacaugaucaccgagaugcugcagaaggaguacauggagcggcaggggaagacgccccugggccuggucgaccucuucguguucuccaccagcuucuaccugaucuccaucuuccugcaccucgugaagaucccgacccaccgccacaucgucggcaagagcugccccaagccccaccggcugaaccacauggggaucugcuccugcgggcuguacaagcagcccggcgugccggugcgcuggaagcggugaggacuaguaauaaggaaacuguaugaaugucugugggcaggaagugaagagauccuucuguaaagguuuuuggaauuaugucugcugaauaauaaacuuuuuugaaauaauaaaucugguagaaaaaugagaucucaaaggcucuuuucagagccaccaaaaaaaaaaaaaaaaaaaaaaaaaaaaaaaaaaaaaaaaaaaaaaaaaaaaaaaaaaaaaaaaagaauu

SEQ ID NO: 40894 - RNA, 1781 nt, Artificial Sequence
  mRNA product Design b-4 (hSL-A64-N5) comprising derived and/or modified sequence from LASV(G502-SLE-2009;Clade IV)__AIT17126__GPCmut12 (opt1)
aggagagucccgcagucggcguccagcggcucugcuuguucgugugugugucguugcaggccuuauucaagcuuaccaugggccagaucgugaccuucuuccaggaggucccccacgugaucgaggaggugaugaacaucguccugaucgcccucagcauccuggccgugcugaaggggcucuacaacuucgcgaccugcggccugguggggcugcucacguuccugcugcucugcggccgcuccugcaccaccgggcuguacaagggcgucuacgagcugcagacccucgagcugaacauggagacgcugaacaugugcaugccgcucagcugcaccaagaacaacucccaccacuacaucauggugggcaacgagaccgggcuggagcugacccucacgaacaccagcaucaucaaccacaaguucugcaaccuguccgacgcccacaagaagaaccuguacgaccacgcccucaugagcaucaucuccaccuuccaccugagcauccccaacuucaaccaguacgaggccauguccugcgacuucaacggcgggaagaucagcgugcaguacaaccugucccacagcuacgccggcgacgcggccgaccacugcgggaccgucgccaacggcgugcuccagacguucaugcggauggccuggggcggguccuacaucgcgcuggacagcggccgcgggcggugggacugcaucaugaccuccuaccaguaccugaucauccagaacaccaccugggaggaccacugccaguucagccgccccucccccaucggcuaccucggccugcugagccagcggacgcgcgacaucuacaucucccggcgccuccuggggaccuucaccuggacccugagcgacagcgagggcaaggacacgcccgggggcuacugccucacccgguggaugcugaucgaggccgagcugaagugcuucgggaacaccgccguggccaagugcaacgagaagcacgacgaggaguucugcgacaugcuccgccuguucgacuucugcaagcaggccauccagcggcugaaggcggaggcccagauguccauccagcucaucaacaaggccgucaacgcccugaucaacgaccagcuggugaugaagaaccaccuccgcgacaucaugggcauccccuacugcaacuacagccgguacugcuaccugaaccacaccacgaccggccgcaccucccugcccaagugcugccucgugagcaacggguccuaccugaacgagacccacuucagcgacgacaucgagcagcaggccgacaacaugaucacggagaugcugcagaaggaguacauggagcggcagggcaagaccccgcuggggcucgucgaccuguucguguucuccaccagcuucuaccugaucuccaucuuccuccaccuggugaagaucccgacccaccgccacaucgucggcaagagcugccccaagccccaccggcugaaccacauggggaucugcuccugcggccucuacaagcagcccggcgugccggugaaguggaagcgcugaggacuaguaauaaggaaacuguaugaaugucugugggcaggaagugaagagauccuucuguaaagguuuuuggaauuaugucugcugaauaauaaacuuuuuugaaauaauaaaucugguagaaaaaugagaucucaaaggcucuuuucagagccaccaaaaaaaaaaaaaaaaaaaaaaaaaaaaaaaaaaaaaaaaaaaaaaaaaaaaaaaaaaaaaaaaagaauu

SEQ ID NO: 40895 - RNA, 1781 nt, Artificial Sequence
  mRNA product Design b-4 (hSL-A64-N5) comprising derived and/or modified sequence from LASV(G733-SLE-2010;Clade IV)__AIT17154__GPCmut12 (opt1)
aggagagucccgcagucggcguccagcggcucugcuuguucgugugugugucguugcaggccuuauucaagcuuaccaugggccagaucgugaccuucuuccaggaggucccccacgugaucgaggaggugaugaacaucguccugaucgcccucagcauccuggccgugcugaaggggcucuacaacuucgcgaccugcggcaucguggggcuggucuccuuccugcuccugugcggccgcagcugcacgaccucccuguacaaggggguguacgagcuccagacccuggagcugaacauggagacccucaacaugugcaugccgcugagcugcacgaagaacaacucccaccacuacaucauggugggcaacgagaccggccuggagcucacccugaccaacacgagcaucaucaaccacaaguucugcaaccuguccgacgcccacaagaagaaccucuacgaccacgcccugaugagcaucaucuccaccuuccaccugagcauccccaacuucaaccaguacgaggccauguccugcgacuucaacgggggcaagaucagcguccaguacaaccucucccacagcuacgccggggacgcggccaaccacugcggcaccaucgccaacggggugcugcagaccuucaugcggauggccuggggcggcuccuacaucgcgcuggacagcgggcgcgaccggugggacugcaucaugacguccuaccaguaccucaucauccagaacaccaccugggaggaccacugccaguucagccgccccucccccaucggcuaccuggggcugcucagccagcggacccgcgacaucuacaucagccggcgccugcugggcacguucaccuggacccucuccgacagcgagggcaaggacacccccgggggcuacugccugacgcgguggaugcugaucgaggccgagcucaagugcuucgggaacaccgccguggccaagugcaacgagaagcacgacgaggaguucugcgacaugcugcgccuguucgacuucugcaagcaggccauccagcggcucaaggcggaggcccagauguccauccagcugaucaacaaggccgucaacgcccugaucaacgaccagcucaucaugaagaaccaccuccgcgacaucaugggcaucccguacugcaacuacagcaaguacugcuaccugaaccacaccaccacggggaagaccucccugcccaagugcugccuggugagcaacggcuccuaccugaacgagacccacuucagcgacgacaucgagcagcaggccgacaacaugaucaccgagaugcuccagaaggaguacauggagcggcagggcaagacgccccuggggcugguggaccuguucgucuucuccaccagcuucuaccucaucuccaucuuccugcaccuggugaagaucccgacccaccgccacguggucggcaagagcugccccaagccccaccggcucaaccacauggggaucugcuccugcggccuguacgggcagcccggcgugccggugaaguggaagcgcugaggacuaguaauaaggaaacuguaugaaugucugugggcaggaagugaagagauccuucuguaaagguuuuuggaauuaugucugcugaauaauaaacuuuuuugaaauaauaaaucugguagaaaaaugagaucucaaaggcucuuuucagagccaccaaaaaaaaaaaaaaaaaaaaaaaaaaaaaaaaaaaaaaaaaaaaaaaaaaaaaaaaaaaaaaaaagaauu

SEQ ID NO: 40896 - RNA, 1781 nt, Artificial Sequence
  mRNA product Design b-4 (hSL-A64-N5) comprising derived and/or modified sequence from MOPV/LASV reassortant(IGS-1;Clade IV)__AFY05576__GPCmut12 (opt1)
aggagagucccgcagucggcguccagcggcucugcuuguucgugugugugucguugcaggccuuauucaagcuuaccaugggccagaucgugaccuucuuccaggaggucccccacgugaucgaggaggugaugaacaucguccugaucgcccucagcgugcuggccgugcugaaggggcucuacaacuucgcgaccugcggccuggucgggcuggugaccuuccuccugcugugcggccgcuccugcaccaccagccucuacaaggggguguacgagcugcagacccuggagcucaacauggagacgcugaacaugugcaugccgcuguccugcaccaagaacaacagccaccacuacaucauggucggcaacgagaccggccucgagcugacccugacgaacaccuccaucaucaaccacaaguucugcaaccucagcgacgcccacaagaagaaccuguacgaccacgcccugauguccaucaucagcaccuuccaccucuccauccccaacuucaaccaguacgaggccaugagcugcgacuucaacgggggcaagaucuccgugcaguacaaccugagccacuccuacgccggggacgcggccaaccacugcggcaccguggccaacgggguccugcagacguucaugcggauggccuggggcggcagcuacaucgcgcucgacuccgggcgcggcaacugggacugcaucaugaccagcuaccaguaccugaucauccagaacaccaccugggaggaccacugccaguucucccggcccagccccaucggguaccugggccuccugucccagcgcacgcgggacaucuacaucagccgccggcugcucggcaccuucaccuggacccugagcgacuccgagggggaggacacgccgggcggguacugccugacccgcuggaugcucaucgaggccgagcugaagugcuucggcaacaccgccguggccaagugcaacgagaagcacgacgaggaguucugcgacaugcugcggcuguucgacuucugcaagcaggccauccagcgccugaaggcggaggcccagaugagcauccagcugaucaacaaggccgugaacgcccucaucaacgaccagcugaucaugaagaaccaccuccgggacaucauggggauccccuacugcaacuacuccaaguacugcuaccucaaccacaccacgaccggccgcaccagccugcccaagugcugccuggucuccaacggcagcuaccucaacgagacccacuucuccgacgacaucgagcagcaggccgacaacaugaucacggagaugcugcagaaggaguacauggagcggcaggggaagacgccccugggccugguggaccucuucguguucagcaccuccuucuaccugaucagcaucuuccugcaccucgucaagaucccgacccaccgccacaucguggggaaguccugccccaagccccaccggcugaaccacaugggcaucugcagcugcgggcuguacaagcagcccggcgugccggucaaguggaagcgcugaggacuaguaauaaggaaacuguaugaaugucugugggcaggaagugaagagauccuucuguaaagguuuuuggaauuaugucugcugaauaauaaacuuuuuugaaauaauaaaucugguagaaaaaugagaucucaaaggcucuuuucagagccaccaaaaaaaaaaaaaaaaaaaaaaaaaaaaaaaaaaaaaaaaaaaaaaaaaaaaaaaaaaaaaaaaagaauu

SEQ ID NO: 40897 - RNA, 1781 nt, Artificial Sequence
  mRNA product Design b-4 (hSL-A64-N5) comprising derived and/or modified sequence from LASV(LM765-SLE-2012;Clade IV)__AIT17814__GPCmut12 (opt1)
aggagagucccgcagucggcguccagcggcucugcuuguucgugugugugucguugcaggccuuauucaagcuuaccaugggccagaucgugaccuucuuccaggaggucccccacgugaucgaggaggugaugaacaucguccugaucgcccucagcauccuggccgugcugaaggggcucuacaacuucgcgaccugcggccugguggggcuggucacguuccuccugcugugcggccgcuccugcaccaccagccucuacaaggggguguacgagcugcagacccuggagcucaacauggagacgcugaacaugugcaugccgcuguccugcaccaagaacaacagccaccacuacaucauggugggcaacgagaccggccucgagcugacccugacgaacaccuccaucaucgaccacaaguucugcaaccucagcgacgcccaccggaagaaccuguacgaccacgcccugauguccaucaucagcaccuuccaccucuccauccccaacuucaaccaguacgaggccaugagcugcgacuucaacgggggcaagaucuccguccaguacaaccugagccacuccuacgccaaggacgcggccgaccacugcgggaccguggccaacggcgugcugcagacguucaugcgcauggccuggggcgggagcuacaucgcgcucgacuccggccgggggcgcugggacugcaucaugaccagcuaccaguaccugaucauccagaacaccaccugggaggaccacugccaguucucccggcccagccccaucggcuaccuggggcuccugucccagcgcacgcgggacaucuacaucagccgccggcugcucggcaccuucaccuggacccugagcgacuccgagggcaaggacacgcccgggggcuacugccugacccgcuggaugcucaucgaggccgagcugaagugcuucgggaacaccgccgucgccaagugcaacgagaagcacgacgaggaguucugcgacaugcugcggcuguucgacuucugcaagcaggccauccagcgccugaaggcggaggcccagaugagcauccagcugaucaacaaggccgugaacgcccucaucaacgaccagcugaucaugaagaaccaccuccgggacaucaugggcauccccuacugcaacuacuccaaguacugcuaccucaaccacaccacgaccgggaagaccagccugcccaagugcugccugguguccaacggcagcuaccucaacgagacccacuucuccgacgacaucgagcagcaggccgacaacaugaucacggagaugcugcagaaggaguacauggagcgccagggcaagaccccgcuggggcuggucgaccucuucguguucagcaccuccuucuaccugaucagcaucuuccugcaccucgugaagaucccgacccaccggcacaucgucggcaagcccugccccaagccccaccgccugaaccacauggggaucugcuccugcggccuguacaagcagccgggggugcccgugaaguggaagcggugaggacuaguaauaaggaaacuguaugaaugucugugggcaggaagugaagagauccuucuguaaagguuuuuggaauuaugucugcugaauaauaaacuuuuuugaaauaauaaaucugguagaaaaaugagaucucaaaggcucuuuucagagccaccaaaaaaaaaaaaaaaaaaaaaaaaaaaaaaaaaaaaaaaaaaaaaaaaaaaaaaaaaaaaaaaaagaauu

SEQ ID NO: 40898 - RNA, 1781 nt, Artificial Sequence
  mRNA product Design b-4 (hSL-A64-N5) comprising derived and/or modified sequence from LASV(LM776-SLE-2012;Clade IV)__AIT17824__GPCmut12 (opt1)
aggagagucccgcagucggcguccagcggcucugcuuguucgugugugugucguugcaggccuuauucaagcuuaccaugggccagaucgugaccuucuuccaggaggucccccacgugaucgaggaggugaugaacaucguccugaucgcccucagcauccuggccgugcugaaggggcucuacaacuucgcgaccugcggccugguggggcuggucaccuuccuccugcugugcggccgcuccugcaccaccagcguguacaaggggguguacgagcuccagacccuggagcugaacauggagacgcucaacaugugcaugccgcuguccugcaccaagaacaacagccaccacuacaucauggucggcaacgagaccggccuggagcucacccugacgaacaccuccaucaucaaccacaaguucugcaaccugagcgacgcccacaagaagaaccucuacgaccacgcccugauguccaucaucagcaccuuccaccuguccauccccaacuucaaccaguacgaggccaugagcugcgacuucaacgggggcaagaucuccgugcaguacaaccucagccacuccuacgccggggacgcggccaaccacugcggcaccguggccaacgggguccugcagacguucaugcggauggccuggggcggcagcuacaucgcgcuggacuccgggcacggcaagugggacugcaucaugaccagcuaccaguaccucaucauccagaacaccaccugggaggaccacugccaguucucccgccccagccccaucggguaccugggccugcucucccagcggacgcgcgacaucuacaucagccggcgccugcugggcaccuucaccuggacccucagcgacuccgaggggaaggacacgccgggcggguacugccugacccgguggaugcugaucgaggccgagcucaagugcuucggcaacaccgccguggccaagugcaacgagaagcacgacgaggaguucugcgacaugcugcgccuguucgacuucugcaagcaggccauccagcggcucaaggcggaggcccagaugagcauccagcugaucaacaaggccgugaacgcccugaucaacgaccagcucaucaugaagaaccaccuccgcgacaucauggggauccccuacugcaacuacuccaaguacugcuaccugaaccacaccacgaccggcaagaccagccugcccaagugcugccuggucuccaacggcagcuaccugaacgagacccacuucuccgacgacaucgagcagcaggccgacaacaugaucacggagaugcuccagaaggaguacauggagcggcaggggaagacgccccugggccugguggaccuguucguguucagcaccuccuucuaccucaucagcaucuuccugcaccuggucaagaucccgacccaccgccacaucguggggaaguccugccccaagccccaccggcucaaccacaugggcaucugcagcugcgggcuguacaagcagcccggcgugccgguccgcuggaagcggugaggacuaguaauaaggaaacuguaugaaugucugugggcaggaagugaagagauccuucuguaaagguuuuuggaauuaugucugcugaauaauaaacuuuuuugaaauaauaaaucugguagaaaaaugagaucucaaaggcucuuuucagagccaccaaaaaaaaaaaaaaaaaaaaaaaaaaaaaaaaaaaaaaaaaaaaaaaaaaaaaaaaaaaaaaaaagaauu

SEQ ID NO: 40899 - RNA, 1781 nt, Artificial Sequence
  mRNA product Design b-4 (hSL-A64-N5) comprising derived and/or modified sequence from LASV(Mad39;Clade IV)__ANH09722__GPCmut12 (opt1)
aggagagucccgcagucggcguccagcggcucugcuuguucgugugugugucguugcaggccuuauucaagcuuaccaugggccagaucgugaccuucuuccaggaggucccccacgugaucgaggaggugaugaacaucguccugaucgcccucagcauccuggccgugcugaaggggcucuacaacguggcgaccugcggccugaucgggcuggucacguuccuccugcugugcggccgcuccugcaccaccacccucuacaaggggguguacgagcugcaggcccuggagcucaacauggagacgcugaacaugugcaugccgcugagcugcaccaagaacaacucccaccacuacauccgggugggcaacgagaccggccucgagcugacccugacgaacaccagccucaucaaccacaaguucugcaaccuguccgacgcccacaagaagaaccuguacgaccacgcccucaugagcaucaucuccaccuuccaccugagcauccccaacuucaaccaguacgaggccauguccugcgacuucaacgacgggaagaucagcguccaguacaaccugucccacaccuacgcgggcgacacggccaaccacugcgggaccguggccaacggcgugcuccagaccuucaugcgcauggccuggggcgggagcuacaucgcgcuggacuccggccgcgggggcugggacugcaucaugaccagcuaccaguaccugaucauccagaacacgaccugggaggaccacugccaguucucccggcccagccccaucggguaccucggccugcugucccagcggacccgcgacaucuacaucagccggcgccuccugggcaccuucacguggacccuguccgacagcgaggggaaggacaccccgggcggguacugccucacccgguggaugcugaucgaggccgagcugaagugcuucggcaacacggccgucgccaagugcaacgagaagcacgacgaggaguucugcgacaugcuccgccuguucgacuucugcaagcaggccauccagcggcugaaggcggaggcccagaugagcauccagcucaucaacaaggccgugaacgcccugaucaacgaccagcugaucaugaagaaccaccuccgcgacaucauggggauccccuacugcaacuacuccaaguacugcuaccugaaccacaccgugaccggcaagaccagccugcccaagugcugccucgucuccaacggcagcuaccugaacgagacgcacuucuccgacgacaucgagcagcaggccgacaacaugaucaccgagaugcugcagaaggaguacauggagcggcaggggaagacgccccugggccucguggaccuguucguguucagcaccuccuucuaccugaucagcaucuuccuccaccuggucaagaucccgacccaccgccacgugguggggaagcccugccccaagccccaccggcugaaccacaugggcaucugcuccugcggguucuacaagcagccgggcguccccgugcgcuggaagcggugaggacuaguaauaaggaaacuguaugaaugucugugggcaggaagugaagagauccuucuguaaagguuuuuggaauuaugucugcugaauaauaaacuuuuuugaaauaauaaaucugguagaaaaaugagaucucaaaggcucuuuucagagccaccaaaaaaaaaaaaaaaaaaaaaaaaaaaaaaaaaaaaaaaaaaaaaaaaaaaaaaaaaaaaaaaaagaauu

SEQ ID NO: 40900 - RNA, 1781 nt, Artificial Sequence
  mRNA product Design b-4 (hSL-A64-N5) comprising derived and/or modified sequence from LASV(Z0947-SLE-2011;Clade IV)__AIT17840__GPCmut12 (opt1)
aggagagucccgcagucggcguccagcggcucugcuuguucgugugugugucguugcaggccuuauucaagcuuaccaugggccagaucgugaccuucuuccaggaggucccccacgugaucgaggaggugaugaacaucguccugaucgcccucagcauccuggccgugcugaaggggcucuacaacuucgcgaccugcggccugguggggcuggucacguuccuccugcugugcggccgcuccugcaccaucagccucuacaaggggguguacgagcugcagacccuggagcucaacauggagacccugaacaugugcaugccgcuguccugcacgaagaacaacagccaccacuacaucauggugggcaacgagaccggccucgagcugacccugaccaacacguccaucaucaaccacaaguucugcaaccucagcgacgcccacaagaagaaccuguacgaccacgcccugauguccaucaucagcaccuuccaccucuccauccccaacuucaaccaguacgaggccaugagcugcgacuucaacgggggcaagaucuccguccaguacaaccugagccacuccuacgccggggacgcggccaaccacugcggcaccguggccaacggggugcugcagaccuucaugcggauggccuggggcggcagcuacaucgcgcucgacuccgggcgcgaccggugggacugcaucaugacgagcuaccaguaccugaucauccagaacaccaccugggaggaccacugccaguucucccgccccagccccaucggcuaccuggggcuccugucccagcggacccgcgacaucuacaucagccggcgccugcucggcacguucaccuggacccugagcgacuccgagggcaaggacacccccgggggcuacugccugacgcgguggaugcucaucgaggccgagcugaagugcuucgggaacaccgccgucgccaagugcaacgagaagcacgacgaggaguucugcgacaugcugcgccucuucgacuucugcaagcaggccauccagcggcugaaggcggaggcccagaugagcauccagcugaucaacaaggccgugaacgcccucaucaacgaccagcugaucaugaagaaccaccuccgcgacaucaugggcaucccguacugcaacuacuccaaguacugcuaccugaaccacaccaccacggggaagaccagccugcccaagugcugccugguguccaacggcagcuaccucaacgagacccacuucuccgacgacaucgagcagcaggccgacaacaugaucaccgagaugcugcagaaggaguacauggagcggcagggcaagacgccccuggggcuggucgaccucuucguguucagcaccuccuucuaccugaucagcaucuuccugcaccucgugaagaucccgacccaccgccacaucgucggcaagcccugccccaagccccaccggcugaaccacauggggaucugcuccugcggccuguacaagcagccgggggugcccgugaaguggaagcgcugaggacuaguaauaaggaaacuguaugaaugucugugggcaggaagugaagagauccuucuguaaagguuuuuggaauuaugucugcugaauaauaaacuuuuuugaaauaauaaaucugguagaaaaaugagaucucaaaggcucuuuucagagccaccaaaaaaaaaaaaaaaaaaaaaaaaaaaaaaaaaaaaaaaaaaaaaaaaaaaaaaaaaaaaaaaaagaauu

SEQ ID NO: 40901 - RNA, 1781 nt, Artificial Sequence
  mRNA product Design b-4 (hSL-A64-N5) comprising derived and/or modified sequence from LASV(Josiah;Clade IV)__NP_694870__GPCmut12 (opt4)
aggagagucccgcagucggcguccagcggcucugcuuguucgugugugugucguugcaggccuuauucaagcuuaccaugggccagaucgugaccuucuuccaggaggugccccacgugaucgaggaggugaugaacaucgugcugaucgcccugagcgugcuggccgugcugaagggccuguacaacuucgccaccugcggccuggugggccuggugaccuuccugcugcugugcggcagaagcugcaccaccagccuguacaagggcguguacgagcugcagacccuggagcugaacauggagacccugaacaugugcaugccccugagcugcaccaagaacaacagccaccacuacaucauggugggcaacgagaccggccuggagcugacccugaccaacaccagcaucaucaaccacaaguucugcaaccugagcgacgcccacaagaagaaccuguacgaccacgcccugaugagcaucaucagcaccuuccaccugagcauccccaacuucaaccaguacgaggccaugagcugcgacuucaacggcggcaagaucagcgugcaguacaaccugagccacagcuacgccggcgacgccgccaaccacugcggcaccguggccaacggcgugcugcagaccuucaugagaauggccuggggcggcagcuacaucgcccuggacagcggcagaggcaacugggacugcaucaugaccagcuaccaguaccugaucauccagaacaccaccugggaggaccacugccaguucagcagacccagccccaucggcuaccugggccugcugagccagagaaccagagacaucuacaucagcagaagacugcugggcaccuucaccuggacccugagcgacagcgagggcaaggacacccccggcggcuacugccugaccagauggaugcugaucgaggccgagcugaagugcuucggcaacaccgccguggccaagugcaacgagaagcacgacgaggaguucugcgacaugcugagacuguucgacuucugcaagcaggccauccagagacugaaggccgaggcccagaugagcauccagcugaucaacaaggccgugaacgcccugaucaacgaccagcugaucaugaagaaccaccugagagacaucaugggcauccccuacugcaacuacagcaaguacugcuaccugaaccacaccaccaccggcagaaccagccugcccaagugcugccuggugagcaacggcagcuaccugaacgagacccacuucagcgacgacaucgagcagcaggccgacaacaugaucaccgagaugcugcagaaggaguacauggagagacagggcaagaccccccugggccugguggaccuguucguguucagcaccagcuucuaccugaucagcaucuuccugcaccuggugaagauccccacccacagacacaucgugggcaagagcugccccaagccccacagacugaaccacaugggcaucugcagcugcggccuguacaagcagcccggcgugcccgugaaguggaagagaugaggacuaguaauaaggaaacuguaugaaugucugugggcaggaagugaagagauccuucuguaaagguuuuuggaauuaugucugcugaauaauaaacuuuuuugaaauaauaaaucugguagaaaaaugagaucucaaaggcucuuuucagagccaccaaaaaaaaaaaaaaaaaaaaaaaaaaaaaaaaaaaaaaaaaaaaaaaaaaaaaaaaaaaaaaaaagaauu

SEQ ID NO: 40902 - RNA, 1778 nt, Artificial Sequence
  mRNA product Design b-4 (hSL-A64-N5) comprising derived and/or modified sequence from LASV(LP;Clade I)__AAF86701__GPCmut12 (opt4)
aggagagucccgcagucggcguccagcggcucugcuuguucgugugugugucguugcaggccuuauucaagcuuaccaugggccagaucaucaccuucuuccaggaggugccccacgugaucgaggaggugaugaacaucgugcugaucgcccugagccugcuggccauccugaagggccuguacaacaucgccaccugcggcaucaucggccugguggccuuccuguuccugugcggcaagagcugcagccugacccugaagggcggcuacgagcugcagacccuggagcugaacauggagacccugaacaugugcaugccccugagcugcaccaagaacagcagccaccacuacaucagagugggcaacgagaccggccuggagcugacccugaccaacaccagcaucaucaaccacaaguucugcaaccugagcgacgcccacaagaagaaccuguacgaccacgcccugaugagcaucaucagcaccuuccaccugagcauccccaacuucaaccaguacgaggccaugagcugcgacuucaacggcggcaagaucagcgugcaguacaaccugagccacagcuacgccggcgacgccgccgagcacugcggcaccguggccaacggcgugcugcagaccuucaugagaauggccuggggcggcagauacaucgcccuggacagcggcaagggcaacugggacugcaucaugaccagcuaccaguaccugaucauccagaacaccaccugggaggaccacugccaguucagcagacccagccccaucggcuaccugggccugcugagccagagaaccagagacaucuacaucagcagaagacugcugggcaccuucaccuggacccugagcgacagcgagggcaacgagacccccggcggcuacugccugaccagauggaugcugaucgaggccgagcugaagugcuucggcaacaccgccguggccaagugcaacgagaagcacgacgaggaguucugcgacaugcugagacuguucgacuucugcaagcaggccaucagaagacugaaggccgaggcccagaugagcauccagcugaucaacaaggccgugaacgcccugaucaacgaccagcugaucaugaagaaccaccugagagacaucaugggcauccccuacugcaacuacagcaaguacugcuaccugaaccacaccagcagcggcagaaccagccugcccaagugcugccugaucagcaacggcagcuaccugaacgagacccaguucagcgacgacaucgagcagcaggccgacaacaugaucaccgagaugcugcagaaggaguacaucgagagacagggcaagaccccccugggccugguggacaucuucaucuucagcaccagcuucuaccugaucagcaucuuccugcaccugaucaagauccccacccacagacacaucgugggcaagcccugccccaagccccacagacugaaccacaugggcgugugcagcugcggccuguacaagcaccccggcgugcccaccaaguggaagagaugaggacuaguaauaaggaaacuguaugaaugucugugggcaggaagugaagagauccuucuguaaagguuuuuggaauuaugucugcugaauaauaaacuuuuuugaaauaauaaaucugguagaaaaaugagaucucaaaggcucuuuucagagccaccaaaaaaaaaaaaaaaaaaaaaaaaaaaaaaaaaaaaaaaaaaaaaaaaaaaaaaaaaaaaaaaaagaauu

SEQ ID NO: 40903 - RNA, 1778 nt, Artificial Sequence
  mRNA product Design b-4 (hSL-A64-N5) comprising derived and/or modified sequence from LASV(803213;Clade II)__AAF86703__GPCmut12 (opt4)
aggagagucccgcagucggcguccagcggcucugcuuguucgugugugugucguugcaggccuuauucaagcuuaccaugggccagaucaucaccuucuuccaggaggugccccacgugaucgaggaggugaugaacaucgugcugaucgcccugagccugcuggccauccugaagggcaucuacaacguggccaccugcggccuguucggccugaucagcuuccugcugcugugcggcagaagcugcagcgugaccuacaagggcguguacgagcugcagacccuggagcugaacauggccaaccugaacaugugcaugccccugagcugcaccaagaacaacagccaccacuacaucauggugggcaacgagaccggccuggagcugacccugaccaacaccagcaucaucaaccacaaguucugcaaccugagcgacgcccacaagaagaaccuguacgaccacgcccugaugagcaucaucagcaccuuccaccugagcauccccaacuucaaccaguacgaggccaugagcugcgacuucaacggcggcaagaucagcgugcaguacaaccugagccacagcuucgccguggacgccgccaaccacugcggcaccaucgccaacggcgugcugcagaccuucaugagaauggccuggggcggcagcuacaucgcccuggacagcggcaagggcaacugggacugcaucaugaccagcuaccaguaccugaucauccagaacaccaccugggaggaccacugccaguucagcagacccagccccaucggcuaccugggccugcugagccagagaaccagagacaucuacaucagcagaagacugcugggcaccuucaccuggacccugagcgacagcgagggcaacgaggcccccggcggcuacugccugaccagauggaugcugaucgaggccgagcugaagugcuucggcaacaccgccguggccaagugcaacgagaagcacgacgaggaguucugcgacaugcugagacuguucgacuucugcaagcaggccaucaagagacugaagaccgaggcccagaugagcauccagcugaucaacaaggccgugaacgcccugaucaacgaccagcugaucaugaagaaccaccugagagacaucaugggcauccccuacugcaacuacagcagauacugcuaccugaaccacaccgugaccggcaagaccagccugcccagaugcugccuggugagcaacggcagcuaccugaacgagacccacuucagcgacgacaucgagcagcaggccgacaacaugaucaccgagaugcugcagaaggaguacauggacagacagggcaagaccccccugggccugguggaccuguucguguucagcaccagcuucuaccugaucagcaucuuccugcaccuggugaagauccccacccacagacacaucgugggcaagcccugccccaagccccacagacugaaccacaugggcaucugcagcugcggccuguacaagcaccccggcgugcccgugaaguggaagagaugaggacuaguaauaaggaaacuguaugaaugucugugggcaggaagugaagagauccuucuguaaagguuuuuggaauuaugucugcugaauaauaaacuuuuuugaaauaauaaaucugguagaaaaaugagaucucaaaggcucuuuucagagccaccaaaaaaaaaaaaaaaaaaaaaaaaaaaaaaaaaaaaaaaaaaaaaaaaaaaaaaaaaaaaaaaaagaauu

SEQ ID NO: 40904 - RNA, 1778 nt, Artificial Sequence
  mRNA product Design b-4 (hSL-A64-N5) comprising derived and/or modified sequence from LASV(GA391;Clade III)__CAA36645__GPCmut12 (opt4)
aggagagucccgcagucggcguccagcggcucugcuuguucgugugugugucguugcaggccuuauucaagcuuaccaugggccagaucgugaccuucuuccaggaggugccccacgugaucgaggaggugaugaacaucgugcugaucgcccugagcauccuggccauccugaagggccuguacaacguggccaccugcggccugaucggccuggugaccuuccugcugcugagcggcagaagcugcagccugaucuacaagggcaccuacgagcugcagacccuggagcugaacauggagacccugaacaugugcaugccccugagcugcaccaagaacaacagccaccacuacaucagagugggcaacgagaccggccuggagcugacccugaccaacaccagcauccugaaccacaaguucugcaaccugagcgacgcccacaagagaaaccuguacgaccacagccugaugagcaucaucagcaccuuccaccugagcauccccaacuucaaccaguacgaggccaugagcugcgacuucaacggcggcaagaucaccgugcaguacaaccugagccacagcuucgccguggacgccgccggccacugcggcacccuggccaacggcgugcugcagaccuucaugagaauggccuggggcggcagcuacaucgcccuggacagcggcagaggcaacugggacugcaucaugaccagcuaccaguaccugaucauccagaacaccaccugggacgaccacugccaguucagcagacccagccccaucggcuaccugggccugcugagccagagaaccagagacaucuacaucagcagaagacugcugggcaccuucaccuggacccugagcgacagcgagggcaacgagacccccggcggcuacugccugaccagauggaugcugaucgaggccgagcugaagugcuucggcaacaccgccguggccaagugcaacgagaagcacgacgaggaguucugcgacaugcugagacuguucgacuucugcaagcaggccaucagaagacugaagaccgaggcccagaugagcauccagcugaucaacaaggccgugaacgcccugaucaacgaccagcugaucaugaagaaccaccugagagacaucaugggcauccccuacugcaacuacagcagauacugcuaccugaaccacaccagcaccggcaagaccagccugcccagaugcugccugaucagcaacggcagcuaccugaacgagaccaaguucagcgacgacaucgagcagcaggccgacaacaugaucaccgagaugcugcagaaggaguacaucgacagacagggcaagaccccccugggccugguggaccuguucguguucagcaccagcuucuaccugaucagcaucuuccugcaccuggugaagauccccacccacagacacaucgugggcaagcccugccccaagccccacagacugaaccacaugggcaucugcagcugcggccuguacaagcagcccggcgugcccgugagauggaagagaugaggacuaguaauaaggaaacuguaugaaugucugugggcaggaagugaagagauccuucuguaaagguuuuuggaauuaugucugcugaauaauaaacuuuuuugaaauaauaaaucugguagaaaaaugagaucucaaaggcucuuuucagagccaccaaaaaaaaaaaaaaaaaaaaaaaaaaaaaaaaaaaaaaaaaaaaaaaaaaaaaaaaaaaaaaaaagaauu

SEQ ID NO: 40905 - RNA, 1781 nt, Artificial Sequence
  mRNA product Design b-4 (hSL-A64-N5) comprising derived and/or modified sequence from LASV(AV;Clade V)__CCA30314__GPCmut12 (opt4)
aggagagucccgcagucggcguccagcggcucugcuuguucgugugugugucguugcaggccuuauucaagcuuaccaugggccagaucgugaccuucuuccaggaggugccccacgugaucgaggaggugaugaacaucgugcugaucgcccugagcauccuggccgugcugaagggccuguacaacaucgccaccugcggccugaucggccugaucaccuuccugcugcugugcggcagaagcugcagcagcaaccuguacaagggcguguacgagcugcagagccuggaccugaacauggagacccugaacaugugcaugccccugagcugcaccaagaacaacagccaccacuacaucagagugggcaacgacaccggccuggagcugacccugaccaacaccagcauccugaaccacaaguucugcaaccugagcgacgcccacaagaaggaccuguacgaccacgcccugaugagcaucaucagcaccuuccaccugagcauccccaacuucaaccaguacgaggccaugagcugcgacuucaacggcggcaagaucagcgugcaguacaaccugagccacagcuacgccaucgacgccgccaaccacugcggcaccguggccaacggcauccugcagaccuucaugagaauggccuggggcggcagcuacaucgcccuggacagcggcagaggcaacugggacugcaucaugaccagcuaccaguaccugaucauccagaacaccaccugggagaaccacugccaguucagcagacccagccccaucggcuaccugggccugcugagccagagaaccagagacaucuacaucagcagaagacugcugggcaccuucaccuggacccugagcgacagcgagggcaacgccacccccggcggcuacugccugaccagauggaugcugaucgaggccgagcugaagugcuucggcaacaccgccguggccaagugcaacgagaagcacgacgaggaguucugcgacaugcugagacuguucgacuucugcaagcaggccaucagcagacugaagagcgaggcccagaugagcauccagcugaucaacaaggccgugaacgcccugaucaacgaccagcugaucaugaagaaccaccugagagacaucaugggcauccccuacugcaacuacagcaaguacugcuaccugaaccacaccaucaccggcaagaccagccugcccaagugcugccuggugagcaacggcagcuaccugaacgagacccacuucagcgacgacaucgagcagcaggccgacaacaugaucaccgagaugcugcagaaggaguacauggagagacagggcaagaccccccugggccugguggaccuguucguguucagcaccagcuucuaccugaucagcaucuuccugagacuggugaagauccccacccacagacacaucgugggcaagcccugccccaagccccacagacugaaccacaugggcaucugcagcugcggccuguacaagcagcccggcgugcccgugagauggaagagaugaggacuaguaauaaggaaacuguaugaaugucugugggcaggaagugaagagauccuucuguaaagguuuuuggaauuaugucugcugaauaauaaacuuuuuugaaauaauaaaucugguagaaaaaugagaucucaaaggcucuuuucagagccaccaaaaaaaaaaaaaaaaaaaaaaaaaaaaaaaaaaaaaaaaaaaaaaaaaaaaaaaaaaaaaaaaagaauu

SEQ ID NO: 40906 - RNA, 1778 nt, Artificial Sequence
  mRNA product Design b-4 (hSL-A64-N5) comprising derived and/or modified sequence from LASV(Togo/2016/7082;Clade VI)__AMR44577__GPCmut12 (opt4)
aggagagucccgcagucggcguccagcggcucugcuuguucgugugugugucguugcaggccuuauucaagcuuaccaugggccagaucaucaccuucuuccaggaggugccccacgugaucgaggaggugaugaacaucgugcugaucgcccugagccugcuggccauccugaagggcguguacaacguggccaccugcggcaucaucggccuggugaccuuccuguuccugugcggcagaagcugcagccugaucuacaagggcagcuacgagcugcagacccuggagcugaacauggagacccugaacaugugcaugccccugagcugcaccaagaacagcagccaccacuacaucagagugggcaacgagaccggccuggagcugacccugaccaacaccagcaucaucaaccacaaguucugcaaccugagcgacgcccacaagagaaaccuguacgaccacgcccugaugagcauccugagcaccuuccaccugagcauccccaacuucaaccaguacgaggccaugagcugcgacuucaacggcggcaagaucagcgugcaguacaaccugagccacgccuacgccguggacgccgccgagcacugcggcaccguggccaacggcgugcugcagaccuucaugagaauggccuggggcggcagcuacaucgcccuggacagcggcagaggcaacugggacugcaucaugaccagcuaccaguaccugaucauccagaacaccaccugggaggaccacugccaguucagcagacccagccccaucggcuaccugggccugcugagccagagaaccagagacaucuacaucagcagaagacugcugggcaccuucaccuggacccugagcgacagcgagggcaacgagacccccggcggcuacugccugaccagauggaugcugaucgaggccgagcugaagugcuucggcaacaccgccguggccaagugcaacgagaagcacgacgaggaguucugcgacaugcugagacuguucgacuucugcaagcaggccauccagagacugaagagcgaggcccagaugagcauccagcugaucaacaaggccgugaacgcccugaucaacgaccagcugaucaugaagaaccaccugagagacaugaugggcauccccuacugcaacuacagcaaguacugcuaccugaaccacaccagcagcggcagaaccagccugcccaagugcugccuggugagcaacggcagcuaccugaacgagacccacuucagcgacgacaucgagcagcaggccgacaacaugaucaccgagaugcugcagaaggaguacaucgacagacagggcaagaccccccugggccugguggaccuguucguguucagcaccagcuucuaccugaucagcaucuuccugcaccugaucaagauccccacccacagacacaucgugggcaagcccugccccaagccccacagacugaaccacaugggcaucugcagcugcggccuguacaagcagcccggcgugcccaccagauggaagagaugaggacuaguaauaaggaaacuguaugaaugucugugggcaggaagugaagagauccuucuguaaagguuuuuggaauuaugucugcugaauaauaaacuuuuuugaaauaauaaaucugguagaaaaaugagaucucaaaggcucuuuucagagccaccaaaaaaaaaaaaaaaaaaaaaaaaaaaaaaaaaaaaaaaaaaaaaaaaaaaaaaaaaaaaaaaaagaauu

SEQ ID NO: 40907 - RNA, 1778 nt, Artificial Sequence
  mRNA product Design b-4 (hSL-A64-N5) comprising derived and/or modified sequence from LASV(KAK-428;Clade n.d. (VII))__ANH09740__GPCmut12 (opt4)
aggagagucccgcagucggcguccagcggcucugcuuguucgugugugugucguugcaggccuuauucaagcuuaccaugggccagaucgugaccuucuuccaggaggugccccacgugaucgaggaggugaugaacaucgugcugaucgcccugagccugcuggccauccugaagggccuguacaacuucgccaccugcggcgugaucggccugaucaccuuccugcugcugugcggcagaagcugcagcgccaccuacaagggccaguacgagcugcagacccuggagcugaacauggagagccugaacaugugcaugccccugagcugcaccaagaacaacagccaccacuacaucagagccggcaacaacaccggccuggagcugacccugaccaacaccagcaucaucagccacaaguucugcaaccugagcgacgcccacaagaagaaccuguacgaccacacccugaugagcaucaucaccaccuuccaccugagcauccccaacuucaaccaguacgaggccaugagcugcgacuucaacggcggcaagaucagcauccaguacaaccugagccacagcuacgccggcgacgccgcccagcacugcggcaccguggccaacggcgugcugcagaccuucaugagaauggccuggggcggcagcuaccuggcccuggacagcggcagaagaggcugggacugcaucaucagcagcuaccaguaccugaucauccagaacaccaccugggacgaccacugccaguucagcagacccagccccaucggcuaccugggcuucgugagccagaagaccagagacaucuacaucagcagaagacugcugggcaccuucaccuggacccugagcgacagcgagggccacgacaugcccggcggcuacugccugaccagauggaugcugaucgaggccgaccugaagugcuucggcaacaccgccguggccaagugcaacgagaagcacgacgaggaguucugcgacauguggagacuguucgacuucugcaagcaggccauccagagacugaaggccgaggcccagaugaacauccagcugaucaacaaggccgugaacgcccugaucaacgaccagcugaugaugaagaaccaccugagagacaucaugggcauccccuacugcaacuacagcaaguucugcuaccugaacaacaccaccaccggcagaaccagccugcccagaugcugccugaucagcaacggcagcuaccugaacgagacccacuucagcgacgacaucgagcagcaggccgacaacaugaucaccgagaugcugcagaaggaguacauggacagacagggcaagaccccccugggccugguggaccuguucguguucagcaccagcuucuaccugaucaccaucuuccugcaccuggugaagauccccacccacagacacaucgugggcaagcccugccccaagccccacagacugaaccacaugggcaucugcagcugcggccuguacaagcagcccggcgugcccgugagauggaagagaugaggacuaguaauaaggaaacuguaugaaugucugugggcaggaagugaagagauccuucuguaaagguuuuuggaauuaugucugcugaauaauaaacuuuuuugaaauaauaaaucugguagaaaaaugagaucucaaaggcucuuuucagagccaccaaaaaaaaaaaaaaaaaaaaaaaaaaaaaaaaaaaaaaaaaaaaaaaaaaaaaaaaaaaaaaaaagaauu

SEQ ID NO: 40908 - RNA, 1778 nt, Artificial Sequence; identical to SEQ ID NO: 40902
  mRNA product Design b-4 (hSL-A64-N5) comprising derived and/or modified sequence from LASV(Pinneo-NIG-1969;Clade I)__AIT17836__GPCmut12 (opt4)

SEQ ID NO: 40909 - RNA, 1778 nt, Artificial Sequence
  mRNA product Design b-4 (hSL-A64-N5) comprising derived and/or modified sequence from LASV(ISTH0009-NIG-2011;Clade II)__AIT17404__GPCmut12 (opt4)
aggagagucccgcagucggcguccagcggcucugcuuguucgugugugugucguugcaggccuuauucaagcuuaccaugggccagaucaucaccuucuuccaggaggugccccacgugaucgaggaggugaugaacaucgugcugaucgcccugagccugcuggccauccugaagggcaucuacaacguggccaccugcggccuguucggccuggugagcuuccugcugcugugcggcagaagcugcagcaccaccuacaagggcguguacgagcugcagacccuggagcuggacauggccagccugaacaugugcaugccccugagcugcaccaagaacaacagccaccacuacaucauggugggcaacgagaccggccuggagcugacccugaccaacaccagcaucaucaaccacaaguucugcaaccugagcgacgcccacaagaagaaccuguacgaccacgcccugaugagcaucaucagcaccuuccaccugagcauccccaacuucaaccaguacgaggccaugagcugcgacuucaacggcggcaagaucagcgugcaguacaaccugagccacgccuacgccguggacgccgccaaccacugcggcaccaucgccaacggcgugcugcagaccuucaugagaauggccuggggcggcagcuacaucgcccuggacagcggcaagggcagcugggacugcaucaugaccagcuaccaguaccugaucauccagaacaccaccugggaggaccacugccaguucagcagacccagccccaucggcuaccugggccugcugagccagagaaccagagacaucuacaucagcagaagacugcugggcaccuucaccuggacccugagcgacagcgagggcaacgagacccccggcggcuacugccugaccagauggaugcugaucgaggccgagcugaagugcuucggcaacaccgccguggccaagugcaacgagaagcacgacgaggaguucugcgacaugcugagacuguucgacuucugcaagcaggccaucagaagacugaagaccgaggcccagaugagcauccagcugaucaacaaggccgugaacgcccugaucaacgaccagcugaucaugaagaaccaccugagagacaucaugggcauccccuacugcaacuacagcaaguacugcuaccugaaccacaccgugaccggcaagaccagccugcccagaugcugccuggugagcaacggcagcuaccugaacgagacccacuucagcgacgacaucgagcagcaggccgacaacaugaucaccgagcugcugcagaaggaguacauggacagacagggcaagaccccccugggccugguggaccuguucguguucagcaccagcuucuaccugaucagcaucuuccugcaccugaucaagauccccacccacagacacaucaccggcaagcccugccccaagccccacagacugaaccacaugggcaucugcagcugcggccuguacaagcaccccggcgugcccgugaaguggaagagaugaggacuaguaauaaggaaacuguaugaaugucugugggcaggaagugaagagauccuucuguaaagguuuuuggaauuaugucugcugaauaauaaacuuuuuugaaauaauaaaucugguagaaaaaugagaucucaaaggcucuuuucagagccaccaaaaaaaaaaaaaaaaaaaaaaaaaaaaaaaaaaaaaaaaaaaaaaaaaaaaaaaaaaaaaaaaagaauu

SEQ ID NO: 40910 - RNA, 1778 nt, Artificial Sequence
  mRNA product Design b-4 (hSL-A64-N5) comprising derived and/or modified sequence from LASV(ISTH2010-NIG-2012;Clade II)__AIT17482__GPCmut12 (opt4)
aggagagucccgcagucggcguccagcggcucugcuuguucgugugugugucguugcaggccuuauucaagcuuaccaugggccagaucaucaccuucuuccaggaggugccccacgugaucgaggaggugaugaacaucgugcugaucgcccugagccugcuggccauccugaagggcaucuacaacguggccaccugcggccuguucggccuggugagcuuccugcugcugugcggcagaagcugcagcaccaccuacaagggcguguacgagcugcagacccuggagcuggacauggccagccugaacaugugcaugccccugagcugcaccaagaacaacagccaccacuacaucauggugggcaacgagaccggccuggagcugacccugaccaacaccagcaucaucaaccacaaguucugcaaccugagcgacgcccacaagaagaaccuguacgaccacgcccugaugagcaucaucagcaccuuccaccugagcauccccaacuucaaccaguacgaggccaugagcugcgacuucaacggcggcaagaucagcgugcaguacaaccugagccacgccuacgccguggacgccgccaaccacugcggcaccaucgccaacggcgugcugcagaccuucaugagaauggccuggggcggcagcuacaucgcccuggacagcggcaagggcagcugggacugcaucaugaccagcuaccaguaccugaucauccagaacaucaccugggaggaccacugccaguucagcagacccagccccaucggcuaccugggccugcugagccagagaaccagagacaucuacaucagcagaagacugcugggcaccuucaccuggacccugagcgacagcgagggcaacgagacccccggcggcuacugccugaccagauggaugcugaucgaggccgagcugaagugcuucggcaacaccgccguggccaagugcaacgagaagcacgacgaggaguucugcgacaugcugagacuguucgacuucugcaagcaggccaucagaagacugaagaccgaggcccagaugagcauccagcugaucaacaaggccgugaacgcccugaucaacgaccagcugaucaugaagaaccaccugagagacaucaugggcauccccuacugcaacuacagcaaguacugcuaccugaaccacaccgugaccggcaagaccagccugcccagaugcugccuggugagcaacggcagcuaccugaacgagacccacuucagcgacgacaucgagcagcaggccgacaacaugaucaccgagcugcugcagaaggaguacaucgacagacagggcaagaccccccugggccugguggaccuguucguguucagcaccagcuucuaccugaucagcaucuuccugcaccuggugaagauccccacccacagacacguggugggcaagcccugccccaagccccacagacugaaccacaugggcaucugcagcugcggccuguacaagcaccccggcgugcccgugaaguggaagagaugaggacuaguaauaaggaaacuguaugaaugucugugggcaggaagugaagagauccuucuguaaagguuuuuggaauuaugucugcugaauaauaaacuuuuuugaaauaauaaaucugguagaaaaaugagaucucaaaggcucuuuucagagccaccaaaaaaaaaaaaaaaaaaaaaaaaaaaaaaaaaaaaaaaaaaaaaaaaaaaaaaaaaaaaaaaaagaauu

SEQ ID NO: 40911 - RNA, 1778 nt, Artificial Sequence
  mRNA product Design b-4 (hSL-A64-N5) comprising derived and/or modified sequence from LASV(Lassa virus/H.sapiens-wt/NGA/2015/ISTH_0543;Clade II)__AVO03639__GPCmut12 (opt4)
aggagagucccgcagucggcguccagcggcucugcuuguucgugugugugucguugcaggccuuauucaagcuuaccaugggccagaucaucaccuucuuccaggaggugccccacgugaucgaggaggugaugaacaucgugcugaucgcccugagccugcuggccauccugaagggcaucuacaacguggccaccugcggccuguucggccuggugagcuuccugcugcugugcggcagaagcugcagcaccaccuacaagggcguguacgagcugcagacccuggagcuggacauggccaaccugaacaugugcaugccccugagcugcaccaagaacaacagccaccacuacaucauggugggcaacgagaccggccuggagcugacccugaccaacaccagcaucaucaaccacaaguucugcaaccugagcgacgcccacaagaagaaccuguacgaccacgcccugaugagcaucaucagcaccuuccaccugagcauccccaacuucaaccaguacgaggccaugagcugcgacuucaacggcggcaagaucagcgugcaguacaaccugagccacaccuacgccguggacgccgccaaccacugcggcaccaucgccaacggcgugcugcagaccuucaugagaauggccuggggcggcagcuacaucgcccuggacagcggcaagggcagcugggacugcaucaugaccagcuaccaguaccuggugauccagaacaccaccugggaggaccacugccaguucagcagacccagccccaucggcuaccugggccugcugagccagagaaccagagacaucuacaucagcagaagacugcugggcaccuucaccuggacccugagcgacagcgagggcaacgagacccccggcggcuacugccugaccagauggaugcugaucgaggccgagcugaagugcuucggcaacaccgccguggccaagugcaacgagaagcacgacgaggaguucugcgacaugcugagacuguucgacuucugcaagcaggccaucagaagacugaagaccgaggcccagaugagcauccagcugaucaacaaggccgugaacgcccugaucaacgaccagcugaucaugaagaaccaccugagagacaucaugggcauccccuacugcaacuacagcaaguacugcuaccugaaccacaccgugaccggcaagaccagccugcccagaugcugccuggugagcaacggcagcuaccugaacgagacccacuucagcgacgacaucgagcagcaggccgacaacaugaucaccgagcugcugcagaaggaguacaucgacagacagggcaagaccccccugggccugguggaccuguucguguucagcaccagcuucuaccugaucagcaucuuccugcaccuggugaagauccccacccacagacacaucaccggcaagcccugccccaagccccacagacugaaccacaugggcaucugcagcugcggccuguacaagcaccccggcgugcccgugaaguggaagagaugaggacuaguaauaaggaaacuguaugaaugucugugggcaggaagugaagagauccuucuguaaagguuuuuggaauuaugucugcugaauaauaaacuuuuuugaaauaauaaaucugguagaaaaaugagaucucaaaggcucuuuucagagccaccaaaaaaaaaaaaaaaaaaaaaaaaaaaaaaaaaaaaaaaaaaaaaaaaaaaaaaaaaaaaaaaaagaauu

SEQ ID NO: 40912 - RNA, 1778 nt, Artificial Sequence
  mRNA product Design b-4 (hSL-A64-N5) comprising derived and/or modified sequence from LASV(Lassa virus/H.sapiens-wt/NGA/2016/ISTH_0009;Clade II)__AVO03571__GPCmut12 (opt4)
aggagagucccgcagucggcguccagcggcucugcuuguucgugugugugucguugcaggccuuauucaagcuuaccaugggccagaucaucaccuucuuccaggaggugccccacgugaucgaggaggugaugaacaucgugcugaucgcccugagccugcuggccauccugaagggcaucuacaacguggccaccugcggccugcugggccuggugagcuuccugcugcugugcggcagaagcugcagcaccaccuacaagggcguguacgagcugcagacccuggagcuggacauggccagccugaacaugugcaugccccugagcugcaccaagaacaacagccaccacuacaucauggugggcaacgagaccggccuggagcugacccugaccaacaccagcaucaucaaccacaaguucugcaaccugagcgacgcccacaagaagaaccuguacgaccacgcccugaugagcaucaucagcaccuuccaccugagcauccccaacuucaaccaguacgaggccaugagcugcgacuucaacggcggcagaaucagcgugcaguacaaccugagccacagcuacgccguggacgccgccaaccacugcggcaccaucgccaacggcgugcugcagaccuucaugagaauggccuggggcggcagcuacaucgcccuggacagcggcaagggcagcugggacugcaucaugaccagcuaccaguaccugaucauccagaacaccaccugggaggaccacugccaguucagcagacccagccccaucggcuaccugggccugcugagccagagaaccagagacaucuacaucagcagaagacugcugggcaccuucaccuggacccugagcgacagcgagggcaacgagacccccggcggcuacugccugaccagauggaugcugaucgaggccgagcugaagugcuucggcaacaccgccguggccaagugcaacgagaagcacgacgaggaguucugcgacaugcugagacuguucgacuucugcaagcaggccaucagaagacugaagaccgaggcccagaugagcauccagcugaucaacaaggccgugaacgcccugaucaacgaccagcugaucaugaagaaccaccugagagacaucaugggcauccccuacugcaacuacagcaaguacugcuaccugaaccacaccgugaccggcaagaccagccugcccagaugcugccuggugagcaacggcagcuaccugaacgagacccacuucagcgacgacaucgagcagcaggccgacaacaugaucaccgagcugcugcagaaggaguacaucgacagacagggcaagaccccccugggccugguggaccuguucguguucagcaccagcuucuaccugaucagcaucuuccugcaccuggugaagauccccacccacagacacaucaccggcaagcccugccccaagccccacagacugaaccacaugggcaucugcagcugcggccuguacaaccaccccggcgugcccgugaaguggaagagaugaggacuaguaauaaggaaacuguaugaaugucugugggcaggaagugaagagauccuucuguaaagguuuuuggaauuaugucugcugaauaauaaacuuuuuugaaauaauaaaucugguagaaaaaugagaucucaaaggcucuuuucagagccaccaaaaaaaaaaaaaaaaaaaaaaaaaaaaaaaaaaaaaaaaaaaaaaaaaaaaaaaaaaaaaaaaagaauu

SEQ ID NO: 40913 - RNA, 1778 nt, Artificial Sequence
  mRNA product Design b-4 (hSL-A64-N5) comprising derived and/or modified sequence from LASV(Lassa virus/H.sapiens-wt/NGA/2016/ISTH_0017;Clade II)__AVO03567__GPCmut12 (opt4)
aggagagucccgcagucggcguccagcggcucugcuuguucgugugugugucguugcaggccuuauucaagcuuaccaugggccagaucaucaccuucuuccaggaggugccccacgugaucgaggaggugaugaacaucgugcugaucgcccugagccugcuggccauccugaagggcaucuacaacguggccaccugcggccuguucggccuggugagcuuccugcugcugugcggcagaagcugcagcaccaccuacaagggcguguacgagcugcagacccuggagcuggacauggccagccugaacaugugcaugccccugagcugcaccaagaacaacagccaccacuacaucauggugggcaacgagaccggccuggagcugacccugaccaacaccagcaucaucaaccacaaguucugcaaccugagcgacgcccacaagaagaaccuguacgaccacgcccugaugagcaucaucagcaccuuccaccugagcauccccaacuucaaccaguacgaggccaugagcugcgacuucaacggcggcaagaucagcgugcaguacaaccugagccacaccuacgccaucgacgccgccaaccacugcggcaccaucgccaacggcgugcugcagaccuucaugagaauggccuggggcggcagcuacaucgcccuggacagcggcaagggcagcugggacugcaucaugaccagcuaccaguaccugaucauccagaacaccaccugggaggaccacugccaguucagcagacccagccccaucggcuaccugggccugcugagccagagaaccagagacaucuacaucagcagaagacugcugggcaccuucaccuggacccugagcgacagcgagggcaacgagacccccggcggcuacugccugaccagauggaugcugaucgaggccgagcugaagugcuucggcaacaccgccguggccaagugcaacgagaagcacgacgaggaguucugcgacaugcugagacuguucgacuucugcaagcaggccaucagaagacugaagaccgaggcccagaugagcauccagcugaucaacaaggccgugaacgcccugaucaacgaccagcugaucaugaagaaccaccugagagacaucaugggcauccccuacugcaacuacagcaaguacugcuaccugaaccacaccgugaccggcaagaccagccugcccagaugcugccuggugagcaacggcagcuaccugaacgagacccacuucagcgacgacaucgagcagcaggccgacaacaugaucaccgagcugcugcagaaggaguacauggacagacagggcaagaccccccugggccugguggaccuguucguguucagcaccagcuucuaccugaucagcaucuuccugcaccuggugagaauccccacccacagacacgugaucggcaagcccugccccaagccccacagacugaaccacaugggcaucugcagcugcggccuguacaagcaccccggcgugcccgugaaguggaagagaugaggacuaguaauaaggaaacuguaugaaugucugugggcaggaagugaagagauccuucuguaaagguuuuuggaauuaugucugcugaauaauaaacuuuuuugaaauaauaaaucugguagaaaaaugagaucucaaaggcucuuuucagagccaccaaaaaaaaaaaaaaaaaaaaaaaaaaaaaaaaaaaaaaaaaaaaaaaaaaaaaaaaaaaaaaaaagaauu

SEQ ID NO: 40914 - RNA, 1778 nt, Artificial Sequence
  mRNA product Design b-4 (hSL-A64-N5) comprising derived and/or modified sequence from LASV(Lassa virus/H.sapiens-wt/NGA/2018/ISTH_0959;Clade II)__AVV65099__GPCmut12 (opt4)
aggagagucccgcagucggcguccagcggcucugcuuguucgugugugugucguugcaggccuuauucaagcuuaccaugggccagaucaucaccuucuuccaggaggugccccacgugaucgaggaggugaugaacaucgugcugaucgcccugagccugcuggccauccugaagggcaucuacaacguggugaccugcggccuguucggccuggugagcuuccugcugcugugcggcagaagcugcagcaccaccuacaagggcguguacgagcugcagacccuggagcuggacauggccagccugaacaugugcaugccccugagcugcaccaagaacaacagccaccacuacaucauggugggcaacgagaccggccuggagcugacccugaccaacaccagcaucaucaaccacaaguucugcaaccugagcgacgcccacaagaagaaccuguacgaccacgcccugaugagcaucaucagcaccuuccaccugagcauccccaacuucaaccaguacgaggccaugagcugcgacuucaacggcggcaagaucagcgugcaguacaaccugagccacgccuacgccaucgacgccgccaaccacugcggcaccaucgccaacggcgugcugcagaccuucaugagaauggccuggggcggcagcuacaucgcccuggacagcggcaagggcagcugggacugcaucaugaccagcuaccaguaccugaucauccagaacaccaccugggaggaccacugccaguucagcagacccagccccaucggcuaccugggccugcugagccagagaaccagagacaucuacaucagcagaagacugcugggcaccuucaccuggacccugagcgacagcgagggcaacgagacccccggcggcuacugccugaccagauggaugcugaucgaggccgagcugaagugcuucggcaacaccgccguggccaagugcaacgagaagcacgacgaggaguucugcgacaugcugagacuguucgacuucugcaagcaggccaucagaagacugaagaccgaggcccagaugagcauccagcugaucaacaaggccgugaacgcccugaucaacgaccagcugaucaugaagaaccaccugagagacaucaugggcauccccuacugcaacuacagcaaguacugcuaccugaaccacaccgugaccggcaagaccagccugcccagaugcugccuggugagcaacggcagcuaccugaacgagacccacuucagcgacgacaucgagcagcaggccgacaacaugaucaccgagcugcugcagaaggaguacaucgacagacagggcaagaccccccugggccugguggaccuguucguguucagcaccagcuucuaccugaucagcaucuuccugcaccuggugaagauccccacccacagacacgugaucggcaagcccugccccaagccccacagacugaaccacaugggcaucugcagcugcggccuguacaagcaccccggcgugcccgugaaguggaagagaugaggacuaguaauaaggaaacuguaugaaugucugugggcaggaagugaagagauccuucuguaaagguuuuuggaauuaugucugcugaauaauaaacuuuuuugaaauaauaaaucugguagaaaaaugagaucucaaaggcucuuuucagagccaccaaaaaaaaaaaaaaaaaaaaaaaaaaaaaaaaaaaaaaaaaaaaaaaaaaaaaaaaaaaaaaaaagaauu

SEQ ID NO: 40915 - RNA, 1778 nt, Artificial Sequence
  mRNA product Design b-4 (hSL-A64-N5) comprising derived and/or modified sequence from LASV(LASV003-NIG-2008;Clade II)__AIT17580__GPCmut12 (opt4)
aggagagucccgcagucggcguccagcggcucugcuuguucgugugugugucguugcaggccuuauucaagcuuaccaugggccagaucaucaccuucuuccaggaggugccccacgugaucgaggaggugaugaacaucgugcugaucgcccugagccugcuggccauccugaagggcaucuacaacguggccaccugcggccuguucggccuggugagcuuccugcugcugugcggcagaagcugcagcaccaccuacaagggcguguacgagcugcagacccuggagcuggacauggccagccugaacaugugcaugccccugagcugcaccaagaacaacagccaccacuacaucauggugggcaacgagaccggccuggagcugacccugaccaacaccagcaucaucaaccacaaguucugcaaccugagcgacgcccacaagaagaaccuguacgaccacgcccugaugagcaucaucagcaccuuccaccugagcauccccaacuucaaccaguacgaggccaugagcugcgacuucaacggcggcaagaucagcgugcaguacaaccugagccacaccuacgccguggacgccgccaaccacugcggcaccaucgccaacggcgugcugcagaccuucaugagaauggccuggggcggcagcuacaucgcccuggacagcggcaagggcagcugggacugcaucaugaccagcuaccaguaccugaucauccagaacaccaccugggaggaccacugccaguucagcagacccagccccaucggcuaccugggccugcugagccagagaaccagagacaucuacaucagcagaagacugcugggcaccuucaccuggacccugagcgacagcgagagcaacgagacccccggcggcuacugccugaccagauggaugcugaucgaggccgagcugaagugcuucggcaacaccgccguggccaagugcaacgagaagcacgacgaggaguucugcgacaugcugagacuguucgacuucugcaagcaggccaucagaagacugaaggccgaggcccagaugagcauccagcugaucaacaaggccgugaacgcccugaucaacgaccagcugaucaugaagaaccaccugagagacaucaugggcauccccuacugcaacuacagcaaguacugcuaccugaaccacaccgugaccggcagaaccagccugcccagaugcugccuggugagcaacggcagcuaccugaacgagacccacuucagcgacgacaucgagcagcaggccgacaacaugaucaccgagcugcugcagaaggaguacauggacagacagggcaagaccccccugggccugguggaccuguucguguucagcaccagcuucuaccugaucagcaucuuccugcaccuggugaagauccccacccacagacacgugaucggcaagcccugccccaagccccacagacugaaccacaugggcaucugcagcugcggccuguacaagcaccccggcgugcccgugaaguggaagagaugaggacuaguaauaaggaaacuguaugaaugucugugggcaggaagugaagagauccuucuguaaagguuuuuggaauuaugucugcugaauaauaaacuuuuuugaaauaauaaaucugguagaaaaaugagaucucaaaggcucuuuucagagccaccaaaaaaaaaaaaaaaaaaaaaaaaaaaaaaaaaaaaaaaaaaaaaaaaaaaaaaaaaaaaaaaaagaauu

SEQ ID NO: 40916 - RNA, 1778 nt, Artificial Sequence
  mRNA product Design b-4 (hSL-A64-N5) comprising derived and/or modified sequence from LASV(LASV035-NIG-2009;Clade II)__AIT17588__GPCmut12 (opt4)
aggagagucccgcagucggcguccagcggcucugcuuguucgugugugugucguugcaggccuuauucaagcuuaccaugggccagaucaucaccuucuuccaggaggugccccacgugaucgaggaggugaugaacaucgugcugaucgcccugagccugcuggccauccugaagggcaucuacaacguggccaccugcggccuguucggccuggugagcuuccugcugcugugcggcagaagcugcagcaccaccuacaagggcguguacgagcugcagacccuggagcuggacauggccagccugaacaugugcaugccccugagcugcaccaagaacaacagccaccacuacaucauggugggcaacgagaccggccuggagcugacccugaccaacaccagcaucaucaaccacaaguucugcaaccugagcgacgcccacaagaagaaccuguacgaccacgcccugaugagcaucaucagcaccuuccaccugagcauccccaacuucaaccaguacgaggccaugagcugcgacuucaacggcggcaagaucagcgugcaguacaaccugagccacgccuacgccguggacgccgccaaccacugcggcaccaucgccaacggcgugcugcagaccuucaugagaauggccuggggcggcagcuacaucgcccuggacagcggcaagggcagcugggacugcaucaugaccagcuaccaguaccugaucauccagaacaccaccugggaggaccacugccaguucagcagacccagccccaucggcuaccugggccugcugagccagagaaccagagacaucuacaucagcagaagacugcugggcaccuucaccuggacccugagcgacagcgagggcaacgagacccccggcggcuacugccugaccagauggaugcugaucgaggccgagcugaagugcuucggcaacaccgccguggccaagugcaacgagaagcacgacgaggaguucugcgacaugcugagacuguucgacuucugcaagcaggccaucagaagacugaaggccgaggcccagaugagcauccagcugaucaacaaggccgugaacgcccugaucaacgaccagcugaucaugaagaaccaccugagagacaucaugggcauccccuacugcaacuacagcaaguacugcuaccugaaccacaccgugaccggcaagaccagccugcccagaugcugccuggugagcaacggcagcuaccugaacgagacccacuucagcgacgacaucgagcagcaggccgacaacaugaucaccgagcugcugcagaaggaguacaucgacagacagggcaagaccccccugggccugguggaccuguucguguucagcaccagcuucuaccugaucagcaucuuccugcaccuggugaagauccccacccacagacacgugaucggcaagcccugccccaagccccacagacugaaccacaugggcaucugcagcugcggccuguacaagcaccccggcgugcccgugaaguggaagagaugaggacuaguaauaaggaaacuguaugaaugucugugggcaggaagugaagagauccuucuguaaagguuuuuggaauuaugucugcugaauaauaaacuuuuuugaaauaauaaaucugguagaaaaaugagaucucaaaggcucuuuucagagccaccaaaaaaaaaaaaaaaaaaaaaaaaaaaaaaaaaaaaaaaaaaaaaaaaaaaaaaaaaaaaaaaaagaauu

SEQ ID NO: 40917 - RNA, 1778 nt, Artificial Sequence
  mRNA product Design b-4 (hSL-A64-N5) comprising derived and/or modified sequence from LASV(LASV1000-NIG-2009;Clade II)__AIT17782__GPCmut12 (opt4)
aggagagucccgcagucggcguccagcggcucugcuuguucgugugugugucguugcaggccuuauucaagcuuaccaugggccagaucaucaccuucuuccaggaggugccccacgugaucgaggaggugaugaacaucgugcugaucgcccugagccugcuggccauccugaagggcaucuacaacguggccaccugcggccuguucggccuggugagcuuccugcugcugugcggcagaagcugcagcaccaccuacaagggcguguacgagcugcagacccuggagcuggacauggccagccugaacaugugcaugccccugagcugcaccaagaacaacagccaccacuacaucauggugggcaacgagaccggccuggagcugacccugaccaacaccagcaucaucaaccacaaguucugcaaccugagcgacgcccacaagaagaaccuguacgaccacgcccugaugagcaucaucagcaccuuccaccugagcauccccaacuucaaccaguacgaggccaugagcugcgacuucaacggcggcaagaucagcgugcaguacaaccugagccacaccuacgccguggacgccgccaaccacugcggcaccaucgccaacggcgugcugcagaccuucaugagaauggccuggggcggcagcuacaucgcccuggacagcggcaagggcagcugggacugcaucaugaccagcuaccaguaccugaucauccagaacaccaccugggaggaccacugccaguucagcagacccagccccaucggcuaccugggccugcugagccagagaaccagagacaucuacaucagcagaagacugcugggcaccuucaccuggacccugagcgacagcgagggcaacgagacccccggcggcuacugccugaccagauggaugcugaucgaggccgagcugaagugcuucggcaacaccgccguggccaagugcaacgagaagcacgacgaggaguucugcgacaugcugagacuguucgacuucugcaagcaggccaucaagagacugaagaccgaggcccagaugagcauccagcugaucaacaaggccgugaacgcccugaucaacgaccagcugaucaugaagaaccaccugagagacaucaugggcauccccuacugcaacuacagcaaguacugcuaccugaaccacaccgugaccggcaagaccagccugcccagaugcugccuggugagcaacggcagcuaccugaacgagacccacuucagcgacgacaucgagcagcaggccgacaacaugaucaccgagcugcugcagaaggaguacaucgacagacagggcaagaccccccugggccugguggaccuguucguguucagcaccagcuucuaccugaucagcaucuuccugcaccuggugaagauccccacccacagacacguggugggcaagcccugccccaagccccacagacugaaccacaugggcaucugcagcugcggccuguacaagcaccccggcgugcccgugaaguggaagagaugaggacuaguaauaaggaaacuguaugaaugucugugggcaggaagugaagagauccuucuguaaagguuuuuggaauuaugucugcugaauaauaaacuuuuuugaaauaauaaaucugguagaaaaaugagaucucaaaggcucuuuucagagccaccaaaaaaaaaaaaaaaaaaaaaaaaaaaaaaaaaaaaaaaaaaaaaaaaaaaaaaaaaaaaaaaaagaauu

SEQ ID NO: 40918 - RNA, 1778 nt, Artificial Sequence
  mRNA product Design b-4 (hSL-A64-N5) comprising derived and/or modified sequence from LASV(LASV221-NIG-2010;Clade II)__AIT17624__GPCmut12 (opt4)
aggagagucccgcagucggcguccagcggcucugcuuguucgugugugugucguugcaggccuuauucaagcuuaccaugggccagaucaucaccuucuuccaggaggugccccacgugaucgaggaggugaugaacaucgugcugaucgcccugagccugcuggccauccugaagggcaucuacaacguggccaccugcggccuguucggccuggugagcuuccugcugcugugcggcagaagcugcagcaccaccuacaagggcguguacgagcugcagacccuggagcuggacauggccagccugaacaugugcaugccccugagcugcaccaagaacaacagccaccacuacaucauggugggcaacgagaccggccuggagcugacccugaccaacaccagcaucaucaaccacaaguucugcaaccugagcgacgcccacaagaagaaccuguacgaccacgcccugaugagcaucaucagcaccuuccaccugagcauccccaacuucaaccaguacgaggccaugagcugcgacuucaacggcggcaagaucagcgugcaguacaaccugagccacaccuacgccaucgacgccgccaaccacugcggcaccaucgccaacggcgugcugcagaccuucaugagaauggccuggggcggcagcuacaucgcccuggacagcggcaagggcagcugggacugcaucaugaccagcuaccaguaccugaucauccagaacaccaccugggaggaccacugccaguucagcagacccagccccaucggcuaccugggccugcugagccagagaaccagagacaucuacaucagcagaagacugcugggcaccuucaccuggacccugagcgacagcgagggcaacgagacccccggcggcuacugccugaccagauggaugcugaucgaggccgagcugaagugcuucggcaacaccgccguggccaagugcaacgagaagcacgacgaggaguucugcgacaugcugagacuguucgacuucugcaagcaggccaucagaagacugaagaccgaggcccagaugagcauccagcugaucaacaaggccgugaacgcccugaucaacgaccagcugaucaugaagaaccaccugagagacaucaugggcauccccuacugcaacuacagcaaguacugcuaccugaaccacaccgugaccggcaagaccagccugcccagaugcugccuggugagcaacggcagcuaccugaacgagacccacuucagcgacgacaucgagcagcaggccgacaacaugaucaccgagaugcugcagaaggaguacauggacagacagggcaagaccccccugggccugguggaccuguucguguucagcaccagcuucuaccugaucagcaucuuccugcaccuggugaagauccccacccacagacacgugaucggcaagcccugccccaagccccacagacugaaccacaugggcaucugcagcugcggccuguacaagcaccccggcgugcccgugaaguggaagagaugaggacuaguaauaaggaaacuguaugaaugucugugggcaggaagugaagagauccuucuguaaagguuuuuggaauuaugucugcugaauaauaaacuuuuuugaaauaauaaaucugguagaaaaaugagaucucaaaggcucuuuucagagccaccaaaaaaaaaaaaaaaaaaaaaaaaaaaaaaaaaaaaaaaaaaaaaaaaaaaaaaaaaaaaaaaaagaauu

SEQ ID NO: 40919 - RNA, 1778 nt, Artificial Sequence
  mRNA product Design b-4 (hSL-A64-N5) comprising derived and/or modified sequence from LASV(LASV237-NIG-2010;Clade II)__AIT17638__GPCmut12 (opt4)
aggagagucccgcagucggcguccagcggcucugcuuguucgugugugugucguugcaggccuuauucaagcuuaccaugggccagaucaucaccuucuuccaggaggugccccacgugaucgaggaggugaugaacaucgugcugaucgcccugagccugcuggccauccugaagggcaucuacaacguggccaccugcggccuguucggccuggugagcuuccugcugcugugcggcagaagcugcagcaccaccuacaagggcguguacgagcugcagacccuggagcuggacauggccagccugaacaugugcaugccccugagcugcaccaagaacaacagccaccacuacaucauggugggcaacgagaccggccuggagcugacccugaccaacaccagcaucaucaaccacaaguucugcaaccugagcgacgcccacaagaaggaccuguacgaccacgcccugaugagcaucaucagcaccuuccaccugagcauccccaacuucaaccaguacgaggccaugagcugcgacuucaacggcggcaagaucagcgugcaguacaaccugagccacaccuacgccguggacgccgccaaccacugcggcaccaucgccaacggcgugcugcagaccuucaugagaauggccuggggcggcagcuacaucgcccuggacagcggcaagggcagcugggacugcaucaugaccagcuaccaguaccugaucauccagaacaccaccugggaggaccacugccaguucagcagacccagccccaucggcuaccugggccugcugagccagagaaccagagacaucuacaucagcagaagacugcugggcaccuucaccuggacccugagcgacagcgagggcaacgagacccccggcggcuacugccugaccagauggaugcugaucgaggccgagcugaagugcuucggcaacaccgccguggccaagugcaacgagaagcacgacgaggaguucugcgacaugcugagacuguucgacuucugcaagcaggccaucagaagacugaagaccgaggcccagaugagcauccagcugaucaacaaggccgugaacgcccugaucaacgaccagcugaucaugaagaaccaccugagagacaucaugggcauccccuacugcaacuacagcaaguacugcuaccugaaccacaccgugaccggcaagaccagccugcccagaugcugccuggugagcaacggcagcuaccugaacgagacccacuucagcgacgacaucgagcagcaggccgacaacaugaucaccgagcugcugcagaaggaguacauggacagacagggcaagaccccccugggccugguggaccuguucguguucagcaccagcuucuaccugaucagcaucuuccugcaccugaucaagauccccacccacagacacaucaccggcaagcccugccccaagccccacagacugaaccacaugggcaucugcagcugcggccuguacaagcaccccggcgugcccgugaaguggaagagaugaggacuaguaauaaggaaacuguaugaaugucugugggcaggaagugaagagauccuucuguaaagguuuuuggaauuaugucugcugaauaauaaacuuuuuugaaauaauaaaucugguagaaaaaugagaucucaaaggcucuuuucagagccaccaaaaaaaaaaaaaaaaaaaaaaaaaaaaaaaaaaaaaaaaaaaaaaaaaaaaaaaaaaaaaaaaagaauu

SEQ ID NO: 40920 - RNA, 1778 nt, Artificial Sequence
  mRNA product Design b-4 (hSL-A64-N5) comprising derived and/or modified sequence from LASV(LASV253-NIG-2011;Clade II)__AIT17670__GPCmut12 (opt4)
aggagagucccgcagucggcguccagcggcucugcuuguucgugugugugucguugcaggccuuauucaagcuuaccaugggccagaucaucaccuucuuccaggaggugccccacgugaucgaggaggugaugaacaucgugcugaucgcccugagccugcuggccauccugaagggcaucuacaacguggccaccugcggccuguucggccuggugagcuuccugcugcugugcggcagaagcugcagcaccaccuacaagggcguguacgagcugcagacccuggagcuggacauggccagccugaacaugugcaugccccugagcugcaccaagaacaacagccaccacuacaucauggugggcaacgagaccggccuggagcugacccugaccaacaccagcaucaucaaccacaaguucugcaaccugagcgacgcccacaagaagaaccuguacgaccacgcccugaugagcaucaucagcaccuuccaccugagcauccccaacuucaaccaguacgaggccaugagcugcgacuucaacggcggcaagaucagcgugcaguacaaccugagccacaccuacgccguggacgccgccaaccacugcggcaccaucgccaacggcgugcugcagaccuucaugagaauggccuggggcggcagcuacaucgcccuggacagcggcaagggcagcugggacugcaucaugaccagcuaccaguaccugaucauccagaacaccaccugggaggaccacugccaguucagcagacccagccccaucggcuaccugggccugcugagccagagaaccagagacaucuacaucagcagaagacugcugggcaccuucaccuggacccugagcgacagcgagggcaacgagacccccggcggcuacugccugaccagauggaugcugaucgaggccgagcugaagugcuucggcaacaccgccguggccaagugcaacgagaagcacgacgaggaguucugcgacaugcugagacuguucgacuucugcaagcaggccaucagaagacugaaggccgaggcccagaugagcauccagcugaucaacaaggccgugaacgcccugaucaacgaccagcugaucaugaagaaccaccugagagacaucaugggcauccccuacugcaacuacagcaaguacugcuaccugaaccacaccgugaccggcagaaccagccugcccagaugcugccuggugagcaacggcagcuaccugaacgagacccacuucagcgacgacaucgagcagcaggccgacaacaugaucaccgagcugcugcagaaggaguacaucgacagacagggcaagaccccccugggccugguggaccuguucguguucagcaccagcuucuaccugaucagcaucuuccugcaccuggugaagauccccacccacagacacaucaucggcaagcccugccccaagccccacagacugaaccacaugggcaucugcagcugcggccuguacaagcaccccggcgugcccgugaaguggaagagaugaggacuaguaauaaggaaacuguaugaaugucugugggcaggaagugaagagauccuucuguaaagguuuuuggaauuaugucugcugaauaauaaacuuuuuugaaauaauaaaucugguagaaaaaugagaucucaaaggcucuuuucagagccaccaaaaaaaaaaaaaaaaaaaaaaaaaaaaaaaaaaaaaaaaaaaaaaaaaaaaaaaaaaaaaaaaagaauu

SEQ ID NO: 40921 - RNA, 1778 nt, Artificial Sequence
  mRNA product Design b-4 (hSL-A64-N5) comprising derived and/or modified sequence from LASV(LASV254-NIG-2011;Clade II)__AIT17674__GPCmut12 (opt4)
aggagagucccgcagucggcguccagcggcucugcuuguucgugugugugucguugcaggccuuauucaagcuuaccaugggccagaucaucaccuucuuccaggaggugccccacgugaucgaggaggugaugaacaucgugcugaucgcccugagccugcuggccauccugaagggcaucuacaacguggccaccugcggccuguucggccuggugagcuuccugcugcugugcggcagaagcugcagcaccaccuacaagggcguguacgagcugcagacccuggagcuggacaugaccaaccugaacaugugcaugccccugagcugcaccaagaacaacagccaccacuacaucauggugggcaacgagaccggccuggagcugacccugaccaacaccagcaucaucaaccacaaguucugcaaccugagcgacgcccacaagaagaaccuguacaaccacgcccugaugagcaucaucagcaccuuccaccugagcauccccaacuucaaccaguacgaggccaugagcugcgacuucaacggcggcaagaucagcgugcaguacaaccugagccacagcuacgccguggacgccgccaaccacugcggcaccaucgccaacggcgugcugcagaccuucaugagaauggccuggggcggcagcuacaucgcccuggacagcggcaagggcaacugggacugcaucaugaccagcuaccaguaccugaucauccagaacaccaccugggaggaccacugccaguucagcagacccagccccaucggcuaccugggccugcugagccagagaaccagagacaucuacaucagcagaagacugcugggcaccuucaccuggacccugagcgacagcgagggcaacgagacccccggcggcuacugccugaccagauggaugcugaucgaggccgagcugaagugcuucggcaacaccgccguggccaagugcaacgagaagcacgacgaggaguucugcgacaugcugagacuguucgacuucugcaagcaggccaucagaagacugaagaccgaggcccaggccaacauccagcugaucaacaaggccgugaacgcccugaucaacgaccagcugaucaugaagaaccaccugagagacaucaugggcauccccuacugcaacuacagcaaguacugcuaccugaaccacaccgugaccggcaagaccagccugcccagaugcugccuggugagcaacggcagcuaccugaacgagacccacuucagcgacgacaucgagcagcaggccgacaacaugaucaccgagcugcugcagaaggaguacauggacagacagggcaagaccccccugggccugguggaccuguucguguucagcaccagcuucuaccugaucagcaucuuccugcaccuggugaagauccccacccacagacacgugaucggcaagcccugccccaagccccacagacugaaccacaugggcaucugcagcugcggccuguacaagcaccccggcgugcccgugaaguggaagagaugaggacuaguaauaaggaaacuguaugaaugucugugggcaggaagugaagagauccuucuguaaagguuuuuggaauuaugucugcugaauaauaaacuuuuuugaaauaauaaaucugguagaaaaaugagaucucaaaggcucuuuucagagccaccaaaaaaaaaaaaaaaaaaaaaaaaaaaaaaaaaaaaaaaaaaaaaaaaaaaaaaaaaaaaaaaaagaauu

SEQ ID NO: 40922 - RNA, 1778 nt, Artificial Sequence
  mRNA product Design b-4 (hSL-A64-N5) comprising derived and/or modified sequence from LASV(Nig08-A19;Clade III)__ADU56618__GPCmut12 (opt4)
aggagagucccgcagucggcguccagcggcucugcuuguucgugugugugucguugcaggccuuauucaagcuuaccaugggccagaucgugaccuucuuccaggaggugccccacgugaucgaggaggugaugaacaucgugcugaucgcccugagcauccuggccauccugaagggccuguacaacaucgccaccugcggccugaucggccuggugaccuuccugcugcugagcggcagaagcugcagcaugaccuacaagggcguguacgagcugcagacccuggagcugaacaugaacacccugaacaugugcaugccccugagcugcaccaagaacaacagccaccacuacaucauggugggcaacgagaccggccuggagcugacccugaccaacaccagccugcugcaccacaaguucugcaaccugagcgacgcccacaagaagaaccuguacgaccacacccugaugagcaucaucagcaccuuccaccugagcauccccaacuucaaccaguacgaggccaugagcugcgacuucaacggcggcaagaucaccgugcaguacaaccugagccacagcuacgccaucgacgccgccaaccacugcggcaccguggccaacggcgugcugcagaccuucaugagaauggccuggggcggcagcuacaucgcccuggacagcggcagaggcaagugggacugcaucaugaccagcuaccaguaccugaucauccagaacaccaccugggaggaccacugccaguucagcagacccagccccaucggcuaccugggccugcugagccagagaaccagagacaucuacaucagcagaagacugcugggcaccuucaccuggacccugagcgacagcgagggcaacgagacccccggcggcuacugccugaccagauggaugcugaucgaggccgagcugaagugcuucggcaacaccgccguggccaagugcaacgagaagcacgacgaggaguucugcgacaugcugagacuguucgacuucugcaagcaggccaucagaagacugaaggccgaggcccagaugagcauccagcugaucaacaaggccgugaacgcccugaucaacgaccagcugaucaugaagaaccaccugagagacaucaugggcauccccuacugcaacuacagcaaguacugcuaccugaaccacaccagcaccggcagaaccagccugcccagaugcugccuggugagcaacggcagcuaccugaacgagacccacuucagcgacgacaucgagcagcaggccgacaacaugaucaccgagaugcugcagaaggaguaccuggacagacagggcaagaccccccugggccugguggaccuguucguguucagcaccagcuucuaccugaucagcaucuuccugcaccuggugaagauccccacccacagacacaucgugggcaagcccugccccaagccccacagacugaaccacaugggcaucugcagcugcggccuguacaagcagcccggcgugcccgugagauggaagagaugaggacuaguaauaaggaaacuguaugaaugucugugggcaggaagugaagagauccuucuguaaagguuuuuggaauuaugucugcugaauaauaaacuuuuuugaaauaauaaaucugguagaaaaaugagaucucaaaggcucuuuucagagccaccaaaaaaaaaaaaaaaaaaaaaaaaaaaaaaaaaaaaaaaaaaaaaaaaaaaaaaaaaaaaaaaaagaauu

SEQ ID NO: 40923 - RNA, 1781 nt, Artificial Sequence
  mRNA product Design b-4 (hSL-A64-N5) comprising derived and/or modified sequence from LASV(G1180-SLE-2010;Clade IV)__AIT17168__GPCmut12 (opt4)
aggagagucccgcagucggcguccagcggcucugcuuguucgugugugugucguugcaggccuuauucaagcuuaccaugggccagaucgugaccuucuuccaggaggugccccacgugaucgaggaggugaugaacaucgugcugaucgcccugagcauccuggccgugcugaagggccuguacaacuucgccaccugcggccuggugggccugcugaccuuccugcugcugugcggcagaagcugcaccgccagcagauacaagggcguguacgagcugcagacccuggagcugaacauggagacccugaacaugugcaugccccugagcugcaccaagaacaacagccaccacuacaucauggugggcaacgagaccggccuggagcugacccugaccaacaccagcaucaucaaccacaaguucugcaaccugagcgacgcccacaagaagaaccuguacgaccacgcccugaugagcaucaucagcaccuuccaccugagcauccccaacuucaaccaguacgaggccaugagcugcgacuucaacggcggcaagaucagcgugcaguacaaccugagccacagcuacgccggcgacgccgccaaccacugcggcaccguggccaacggcgugcugcagaccuucaugagaauggccuggggcggcagcuacaucgcccuggacagcggccacggcagcugggacugcaucaugaccagcuaccaguaccugaucauccagaacaccaccugggaggaccacugccaguucagcagacccagccccaucggcuaccugggccugcugagccagagaaccagagacaucuacaucagcagaagacugcugggcaccuucaccuggacccugagcgacagcgagggcaaggacacccccggcggcuacugccugaccagauggaugcugaucgaggccgagcugaagugcuucggcaacaccgccguggccaagugcaacgagaagcacgacgaggaguucugcgacaugcugagacuguucgacuucugcaagcaggccauccagagacugaaggccgaggcccagaugagcauccagcugaucaacaaggccgugaacgcccugaucaacgaccagcugaucaugaagaaccaccugagagacaucaugggcauccccuacugcaacuacagcaaguacugcuaccugaaccacaccaccaccggcaagaccagccugcccaagugcugccuggugagcaacggcagcuaccugaacgagacccacuucagcgacgacaucgagcagcaggccgacaacaugaucaccgagaugcugcagaaggaguacauggagagacagggcaagaccccccugggccugguggaccuguucguguucagcaccagcuucuaccugaucagcaucuuccugcaccuggugaagauccccacccacagacacaucgugggcaagagcugccccaagccccacagacugaaccacaugggcaucugcagcugcggccuguacaagcagcccggcgugcccgugaaguggaagagaugaggacuaguaauaaggaaacuguaugaaugucugugggcaggaagugaagagauccuucuguaaagguuuuuggaauuaugucugcugaauaauaaacuuuuuugaaauaauaaaucugguagaaaaaugagaucucaaaggcucuuuucagagccaccaaaaaaaaaaaaaaaaaaaaaaaaaaaaaaaaaaaaaaaaaaaaaaaaaaaaaaaaaaaaaaaaagaauu

SEQ ID NO: 40924 - RNA, 1781 nt, Artificial Sequence
  mRNA product Design b-4 (hSL-A64-N5) comprising derived and/or modified sequence from LASV(G1442-SLE-2011;Clade IV)__AIT17180__GPCmut12 (opt4)
aggagagucccgcagucggcguccagcggcucugcuuguucgugugugugucguugcaggccuuauucaagcuuaccaugggccagaucgugaccuucuuccaggaggugccccacgugaucgaggaggugaugaacaucgugcugaucgcccugagcauccuggccgugcugaagggccuguacaacguggccaccugcggccugaucggccuggugaccuuccugcugcugugcggcagaagcugcaccaccacccuguacaagggcguguacgagcugcagacccuggagcugaacauggagacccugaacaugugcaugccccugagcugcaccaagaacaacagccaccacuacaucagagugggcaacgagaccggccuggagcugacccugaccaacaccagcaucaucaaccacaaguucugcaaccugagcgacgcccacaagaagaaccuguacgaccacgcccugaugagcaucaucagcaccuuccaccugagcauccccaacuucaaccaguacgaggccaugagcugcgacuucaacggcggcaagaucagcgugcaguacaaccugagccacagcuacgccggcgacgccgccaaccacugcggcaccguggccaacggcgugcugcagaccuucaugagaauggccuggggcggcagcuacaucgcccuggacagcggcagaggcaacugggacugcaucaugaccagcuaccaguaccugaucauccagaacaccaccugggacgaccacugccaguucagcagacccagccccaucggcuaccugggccugcugagccagagaaccagagacguguacaucagcagaagacugcugggcaccuucaccuggacccugagcgacagcgagggcaaggacacccccggcggcuacugccugaccagauggaugcugaucgaggccgagcugaagugcuucggcaacaccgccguggccaagugcaacgagaagcacgacgaggaguucugcgacaugcugagacuguucgacuucugcaagcaggccauccagagacugaaggccgaggcccagaugagcauccagcugaucaacaaggccgugaacgcccugaucaacgaccagcugaucaugaagaaccaccugagagacaucaugggcauccccuacugcaacuacagcaaguacugcuaccugaacaacaccgccaccggcaagaccagccugcccaagugcugccugaucagcaacggcagcuaccugaacgagacccacuucagcgacgacaucgagcaggaggccgacaacaugaucaccgagaugcugcagaaggaguacauggagagacagggcaagaccccccugggccugguggaccuguucguguucagcaccagcuucuaccugaucagcaucuuccugcaccuggugaagauccccacccacagacacaucgugggcaagagcugccccaagccccacagacugaaccacaugggcaucugcagcugcggccuguacaagcagcccggcgugcccgugagauggaagagaugaggacuaguaauaaggaaacuguaugaaugucugugggcaggaagugaagagauccuucuguaaagguuuuuggaauuaugucugcugaauaauaaacuuuuuugaaauaauaaaucugguagaaaaaugagaucucaaaggcucuuuucagagccaccaaaaaaaaaaaaaaaaaaaaaaaaaaaaaaaaaaaaaaaaaaaaaaaaaaaaaaaaaaaaaaaaagaauu

SEQ ID NO: 40925 - RNA, 1781 nt, Artificial Sequence
  mRNA product Design b-4 (hSL-A64-N5) comprising derived and/or modified sequence from LASV(G3010-SLE-2013;Clade IV)__AIT17344__GPCmut12 (opt4)
aggagagucccgcagucggcguccagcggcucugcuuguucgugugugugucguugcaggccuuauucaagcuuaccaugggccagaucgugaccuucuuccaggaggugccccacgugaucgaggaggugaugaacaucgugcugaucgcccugagcauccuggccgugcugaagggccuguacaacuucgccaccugcggccuggugggccuggugaccuuccugcugcugugcggcagaagcugcaccaccagccuguacaagggcguguacgagcugcagacccuggagcugaacauggagacccugaacaugugcaugccccugagcugcaccaagaacaacagccaccacuacaucauggugggcaacgagaccggccuggagcugacccugaccaacaccagcaucaucaaccacaaguucugcaaccugagcgacgcccacaagaagaaccuguacaaccacgcccugaugagcaucaucagcaccuuccaccugagcauccccaacuucaaccaguacgaggccaugagcugcgacuucaacggcggcaagaucagcgugcaguacaaccugagccacagcuacgccggcgacgccgccagccacugcggcaccguggccaacggcgugcugcagaccuucaugagaauggccuggggcggcagcuacaucgcccuggacagcggcuacggcaagugggacugcaucaugaccagcuaccaguaccugaucauccagaacaccaccugggaggaccacugccaguucagcagacccagccccaucggcuaccugggccugcugagccagagaaccagagacaucuacaucagcagaagacugcugggcaccuucaccuggacccugagcgacagcgagggcaaggacacccccggcggcuacugccugaccagauggaugcugaucgaggccgagcugaagugcuucggcaacaccgccguggccaagugcaacgagaagcacgacgaggaguucugcgacaugcugagacuguucgacuucugcaagcaggccauccagagacugaagaccgaggcccagaugagcauccagcugaucaacaaggccgugaacgcccugaucaacgaccagcugaucaugaagaaccaccugagagacaucaugggcauccccuacugcaacuacagcaaguacugcuaccugaaccacaccaccaccggcaagaccagccugcccaagugcugccuggugagcaacggcagcuaccugaacgagacccacuucagcgacgacaucgagcagcaggccgacaacaugaucaccgagaugcugcagaaggaguacauggagagacagggcaagaccccccugggccugguggaccuguucguguucagcaccagcuucuaccugaucagcaucuuccugcaccuggugaagauccccacccacagacacaucgugggcaagagcugccccaagccccacagacugaaccacaugggcaucugcagcugcggccuguacaagcagcccggcgugcccgugagauggaagagaugaggacuaguaauaaggaaacuguaugaaugucugugggcaggaagugaagagauccuucuguaaagguuuuuggaauuaugucugcugaauaauaaacuuuuuugaaauaauaaaucugguagaaaaaugagaucucaaaggcucuuuucagagccaccaaaaaaaaaaaaaaaaaaaaaaaaaaaaaaaaaaaaaaaaaaaaaaaaaaaaaaaaaaaaaaaaagaauu

SEQ ID NO: 40926 - RNA, 1781 nt, Artificial Sequence
  mRNA product Design b-4 (hSL-A64-N5) comprising derived and/or modified sequence from LASV(G502-SLE-2009;Clade IV)__AIT17126__GPCmut12 (opt4)
aggagagucccgcagucggcguccagcggcucugcuuguucgugugugugucguugcaggccuuauucaagcuuaccaugggccagaucgugaccuucuuccaggaggugccccacgugaucgaggaggugaugaacaucgugcugaucgcccugagcauccuggccgugcugaagggccuguacaacuucgccaccugcggccuggugggccugcugaccuuccugcugcugugcggcagaagcugcaccaccggccuguacaagggcguguacgagcugcagacccuggagcugaacauggagacccugaacaugugcaugccccugagcugcaccaagaacaacagccaccacuacaucauggugggcaacgagaccggccuggagcugacccugaccaacaccagcaucaucaaccacaaguucugcaaccugagcgacgcccacaagaagaaccuguacgaccacgcccugaugagcaucaucagcaccuuccaccugagcauccccaacuucaaccaguacgaggccaugagcugcgacuucaacggcggcaagaucagcgugcaguacaaccugagccacagcuacgccggcgacgccgccgaccacugcggcaccguggccaacggcgugcugcagaccuucaugagaauggccuggggcggcagcuacaucgcccuggacagcggcagaggcagaugggacugcaucaugaccagcuaccaguaccugaucauccagaacaccaccugggaggaccacugccaguucagcagacccagccccaucggcuaccugggccugcugagccagagaaccagagacaucuacaucagcagaagacugcugggcaccuucaccuggacccugagcgacagcgagggcaaggacacccccggcggcuacugccugaccagauggaugcugaucgaggccgagcugaagugcuucggcaacaccgccguggccaagugcaacgagaagcacgacgaggaguucugcgacaugcugagacuguucgacuucugcaagcaggccauccagagacugaaggccgaggcccagaugagcauccagcugaucaacaaggccgugaacgcccugaucaacgaccagcuggugaugaagaaccaccugagagacaucaugggcauccccuacugcaacuacagcagauacugcuaccugaaccacaccaccaccggcagaaccagccugcccaagugcugccuggugagcaacggcagcuaccugaacgagacccacuucagcgacgacaucgagcagcaggccgacaacaugaucaccgagaugcugcagaaggaguacauggagagacagggcaagaccccccugggccugguggaccuguucguguucagcaccagcuucuaccugaucagcaucuuccugcaccuggugaagauccccacccacagacacaucgugggcaagagcugccccaagccccacagacugaaccacaugggcaucugcagcugcggccuguacaagcagcccggcgugcccgugaaguggaagagaugaggacuaguaauaaggaaacuguaugaaugucugugggcaggaagugaagagauccuucuguaaagguuuuuggaauuaugucugcugaauaauaaacuuuuuugaaauaauaaaucugguagaaaaaugagaucucaaaggcucuuuucagagccaccaaaaaaaaaaaaaaaaaaaaaaaaaaaaaaaaaaaaaaaaaaaaaaaaaaaaaaaaaaaaaaaaagaauu

SEQ ID NO: 40927 - RNA, 1781 nt, Artificial Sequence
  mRNA product Design b-4 (hSL-A64-N5) comprising derived and/or modified sequence from LASV(G733-SLE-2010;Clade IV)__AIT17154__GPCmut12 (opt4)
aggagagucccgcagucggcguccagcggcucugcuuguucgugugugugucguugcaggccuuauucaagcuuaccaugggccagaucgugaccuucuuccaggaggugccccacgugaucgaggaggugaugaacaucgugcugaucgcccugagcauccuggccgugcugaagggccuguacaacuucgccaccugcggcaucgugggccuggugagcuuccugcugcugugcggcagaagcugcaccaccagccuguacaagggcguguacgagcugcagacccuggagcugaacauggagacccugaacaugugcaugccccugagcugcaccaagaacaacagccaccacuacaucauggugggcaacgagaccggccuggagcugacccugaccaacaccagcaucaucaaccacaaguucugcaaccugagcgacgcccacaagaagaaccuguacgaccacgcccugaugagcaucaucagcaccuuccaccugagcauccccaacuucaaccaguacgaggccaugagcugcgacuucaacggcggcaagaucagcgugcaguacaaccugagccacagcuacgccggcgacgccgccaaccacugcggcaccaucgccaacggcgugcugcagaccuucaugagaauggccuggggcggcagcuacaucgcccuggacagcggcagagacagaugggacugcaucaugaccagcuaccaguaccugaucauccagaacaccaccugggaggaccacugccaguucagcagacccagccccaucggcuaccugggccugcugagccagagaaccagagacaucuacaucagcagaagacugcugggcaccuucaccuggacccugagcgacagcgagggcaaggacacccccggcggcuacugccugaccagauggaugcugaucgaggccgagcugaagugcuucggcaacaccgccguggccaagugcaacgagaagcacgacgaggaguucugcgacaugcugagacuguucgacuucugcaagcaggccauccagagacugaaggccgaggcccagaugagcauccagcugaucaacaaggccgugaacgcccugaucaacgaccagcugaucaugaagaaccaccugagagacaucaugggcauccccuacugcaacuacagcaaguacugcuaccugaaccacaccaccaccggcaagaccagccugcccaagugcugccuggugagcaacggcagcuaccugaacgagacccacuucagcgacgacaucgagcagcaggccgacaacaugaucaccgagaugcugcagaaggaguacauggagagacagggcaagaccccccugggccugguggaccuguucguguucagcaccagcuucuaccugaucagcaucuuccugcaccuggugaagauccccacccacagacacguggugggcaagagcugccccaagccccacagacugaaccacaugggcaucugcagcugcggccuguacggccagcccggcgugcccgugaaguggaagagaugaggacuaguaauaaggaaacuguaugaaugucugugggcaggaagugaagagauccuucuguaaagguuuuuggaauuaugucugcugaauaauaaacuuuuuugaaauaauaaaucugguagaaaaaugagaucucaaaggcucuuuucagagccaccaaaaaaaaaaaaaaaaaaaaaaaaaaaaaaaaaaaaaaaaaaaaaaaaaaaaaaaaaaaaaaaaagaauu

SEQ ID NO: 40928 - RNA, 1781 nt, Artificial Sequence
  mRNA product Design b-4 (hSL-A64-N5) comprising derived and/or modified sequence from MOPV/LASV reassortant(IGS-1;Clade IV)__AFY05576__GPCmut12 (opt4)
aggagagucccgcagucggcguccagcggcucugcuuguucgugugugugucguugcaggccuuauucaagcuuaccaugggccagaucgugaccuucuuccaggaggugccccacgugaucgaggaggugaugaacaucgugcugaucgcccugagcgugcuggccgugcugaagggccuguacaacuucgccaccugcggccuggugggccuggugaccuuccugcugcugugcggcagaagcugcaccaccagccuguacaagggcguguacgagcugcagacccuggagcugaacauggagacccugaacaugugcaugccccugagcugcaccaagaacaacagccaccacuacaucauggugggcaacgagaccggccuggagcugacccugaccaacaccagcaucaucaaccacaaguucugcaaccugagcgacgcccacaagaagaaccuguacgaccacgcccugaugagcaucaucagcaccuuccaccugagcauccccaacuucaaccaguacgaggccaugagcugcgacuucaacggcggcaagaucagcgugcaguacaaccugagccacagcuacgccggcgacgccgccaaccacugcggcaccguggccaacggcgugcugcagaccuucaugagaauggccuggggcggcagcuacaucgcccuggacagcggcagaggcaacugggacugcaucaugaccagcuaccaguaccugaucauccagaacaccaccugggaggaccacugccaguucagcagacccagccccaucggcuaccugggccugcugagccagagaaccagagacaucuacaucagcagaagacugcugggcaccuucaccuggacccugagcgacagcgagggcgaggacacccccggcggcuacugccugaccagauggaugcugaucgaggccgagcugaagugcuucggcaacaccgccguggccaagugcaacgagaagcacgacgaggaguucugcgacaugcugagacuguucgacuucugcaagcaggccauccagagacugaaggccgaggcccagaugagcauccagcugaucaacaaggccgugaacgcccugaucaacgaccagcugaucaugaagaaccaccugagagacaucaugggcauccccuacugcaacuacagcaaguacugcuaccugaaccacaccaccaccggcagaaccagccugcccaagugcugccuggugagcaacggcagcuaccugaacgagacccacuucagcgacgacaucgagcagcaggccgacaacaugaucaccgagaugcugcagaaggaguacauggagagacagggcaagaccccccugggccugguggaccuguucguguucagcaccagcuucuaccugaucagcaucuuccugcaccuggugaagauccccacccacagacacaucgugggcaagagcugccccaagccccacagacugaaccacaugggcaucugcagcugcggccuguacaagcagcccggcgugcccgugaaguggaagagaugaggacuaguaauaaggaaacuguaugaaugucugugggcaggaagugaagagauccuucuguaaagguuuuuggaauuaugucugcugaauaauaaacuuuuuugaaauaauaaaucugguagaaaaaugagaucucaaaggcucuuuucagagccaccaaaaaaaaaaaaaaaaaaaaaaaaaaaaaaaaaaaaaaaaaaaaaaaaaaaaaaaaaaaaaaaaagaauu

SEQ ID NO: 40929 - RNA, 1781 nt, Artificial Sequence
  mRNA product Design b-4 (hSL-A64-N5) comprising derived and/or modified sequence from LASV(LM765-SLE-2012;Clade IV)__AIT17814__GPCmut12 (opt4)
aggagagucccgcagucggcguccagcggcucugcuuguucgugugugugucguugcaggccuuauucaagcuuaccaugggccagaucgugaccuucuuccaggaggugccccacgugaucgaggaggugaugaacaucgugcugaucgcccugagcauccuggccgugcugaagggccuguacaacuucgccaccugcggccuggugggccuggugaccuuccugcugcugugcggcagaagcugcaccaccagccuguacaagggcguguacgagcugcagacccuggagcugaacauggagacccugaacaugugcaugccccugagcugcaccaagaacaacagccaccacuacaucauggugggcaacgagaccggccuggagcugacccugaccaacaccagcaucaucgaccacaaguucugcaaccugagcgacgcccacagaaagaaccuguacgaccacgcccugaugagcaucaucagcaccuuccaccugagcauccccaacuucaaccaguacgaggccaugagcugcgacuucaacggcggcaagaucagcgugcaguacaaccugagccacagcuacgccaaggacgccgccgaccacugcggcaccguggccaacggcgugcugcagaccuucaugagaauggccuggggcggcagcuacaucgcccuggacagcggcagaggcagaugggacugcaucaugaccagcuaccaguaccugaucauccagaacaccaccugggaggaccacugccaguucagcagacccagccccaucggcuaccugggccugcugagccagagaaccagagacaucuacaucagcagaagacugcugggcaccuucaccuggacccugagcgacagcgagggcaaggacacccccggcggcuacugccugaccagauggaugcugaucgaggccgagcugaagugcuucggcaacaccgccguggccaagugcaacgagaagcacgacgaggaguucugcgacaugcugagacuguucgacuucugcaagcaggccauccagagacugaaggccgaggcccagaugagcauccagcugaucaacaaggccgugaacgcccugaucaacgaccagcugaucaugaagaaccaccugagagacaucaugggcauccccuacugcaacuacagcaaguacugcuaccugaaccacaccaccaccggcaagaccagccugcccaagugcugccuggugagcaacggcagcuaccugaacgagacccacuucagcgacgacaucgagcagcaggccgacaacaugaucaccgagaugcugcagaaggaguacauggagagacagggcaagaccccccugggccugguggaccuguucguguucagcaccagcuucuaccugaucagcaucuuccugcaccuggugaagauccccacccacagacacaucgugggcaagcccugccccaagccccacagacugaaccacaugggcaucugcagcugcggccuguacaagcagcccggcgugcccgugaaguggaagagaugaggacuaguaauaaggaaacuguaugaaugucugugggcaggaagugaagagauccuucuguaaagguuuuuggaauuaugucugcugaauaauaaacuuuuuugaaauaauaaaucugguagaaaaaugagaucucaaaggcucuuuucagagccaccaaaaaaaaaaaaaaaaaaaaaaaaaaaaaaaaaaaaaaaaaaaaaaaaaaaaaaaaaaaaaaaaagaauu

SEQ ID NO: 40930 - RNA, 1781 nt, Artificial Sequence
  mRNA product Design b-4 (hSL-A64-N5) comprising derived and/or modified sequence from LASV(LM776-SLE-2012;Clade IV)__AIT17824__GPCmut12 (opt4)
aggagagucccgcagucggcguccagcggcucugcuuguucgugugugugucguugcaggccuuauucaagcuuaccaugggccagaucgugaccuucuuccaggaggugccccacgugaucgaggaggugaugaacaucgugcugaucgcccugagcauccuggccgugcugaagggccuguacaacuucgccaccugcggccuggugggccuggugaccuuccugcugcugugcggcagaagcugcaccaccagcguguacaagggcguguacgagcugcagacccuggagcugaacauggagacccugaacaugugcaugccccugagcugcaccaagaacaacagccaccacuacaucauggugggcaacgagaccggccuggagcugacccugaccaacaccagcaucaucaaccacaaguucugcaaccugagcgacgcccacaagaagaaccuguacgaccacgcccugaugagcaucaucagcaccuuccaccugagcauccccaacuucaaccaguacgaggccaugagcugcgacuucaacggcggcaagaucagcgugcaguacaaccugagccacagcuacgccggcgacgccgccaaccacugcggcaccguggccaacggcgugcugcagaccuucaugagaauggccuggggcggcagcuacaucgcccuggacagcggccacggcaagugggacugcaucaugaccagcuaccaguaccugaucauccagaacaccaccugggaggaccacugccaguucagcagacccagccccaucggcuaccugggccugcugagccagagaaccagagacaucuacaucagcagaagacugcugggcaccuucaccuggacccugagcgacagcgagggcaaggacacccccggcggcuacugccugaccagauggaugcugaucgaggccgagcugaagugcuucggcaacaccgccguggccaagugcaacgagaagcacgacgaggaguucugcgacaugcugagacuguucgacuucugcaagcaggccauccagagacugaaggccgaggcccagaugagcauccagcugaucaacaaggccgugaacgcccugaucaacgaccagcugaucaugaagaaccaccugagagacaucaugggcauccccuacugcaacuacagcaaguacugcuaccugaaccacaccaccaccggcaagaccagccugcccaagugcugccuggugagcaacggcagcuaccugaacgagacccacuucagcgacgacaucgagcagcaggccgacaacaugaucaccgagaugcugcagaaggaguacauggagagacagggcaagaccccccugggccugguggaccuguucguguucagcaccagcuucuaccugaucagcaucuuccugcaccuggugaagauccccacccacagacacaucgugggcaagagcugccccaagccccacagacugaaccacaugggcaucugcagcugcggccuguacaagcagcccggcgugcccgugagauggaagagaugaggacuaguaauaaggaaacuguaugaaugucugugggcaggaagugaagagauccuucuguaaagguuuuuggaauuaugucugcugaauaauaaacuuuuuugaaauaauaaaucugguagaaaaaugagaucucaaaggcucuuuucagagccaccaaaaaaaaaaaaaaaaaaaaaaaaaaaaaaaaaaaaaaaaaaaaaaaaaaaaaaaaaaaaaaaaagaauu

SEQ ID NO: 40931 - RNA, 1781 nt, Artificial Sequence
  mRNA product Design b-4 (hSL-A64-N5) comprising derived and/or modified sequence from LASV(Mad39;Clade IV)__ANH09722__GPCmut12 (opt4)
aggagagucccgcagucggcguccagcggcucugcuuguucgugugugugucguugcaggccuuauucaagcuuaccaugggccagaucgugaccuucuuccaggaggugccccacgugaucgaggaggugaugaacaucgugcugaucgcccugagcauccuggccgugcugaagggccuguacaacguggccaccugcggccugaucggccuggugaccuuccugcugcugugcggcagaagcugcaccaccacccuguacaagggcguguacgagcugcaggcccuggagcugaacauggagacccugaacaugugcaugccccugagcugcaccaagaacaacagccaccacuacaucagagugggcaacgagaccggccuggagcugacccugaccaacaccagccugaucaaccacaaguucugcaaccugagcgacgcccacaagaagaaccuguacgaccacgcccugaugagcaucaucagcaccuuccaccugagcauccccaacuucaaccaguacgaggccaugagcugcgacuucaacgacggcaagaucagcgugcaguacaaccugagccacaccuacgccggcgacaccgccaaccacugcggcaccguggccaacggcgugcugcagaccuucaugagaauggccuggggcggcagcuacaucgcccuggacagcggcagaggcggcugggacugcaucaugaccagcuaccaguaccugaucauccagaacaccaccugggaggaccacugccaguucagcagacccagccccaucggcuaccugggccugcugagccagagaaccagagacaucuacaucagcagaagacugcugggcaccuucaccuggacccugagcgacagcgagggcaaggacacccccggcggcuacugccugaccagauggaugcugaucgaggccgagcugaagugcuucggcaacaccgccguggccaagugcaacgagaagcacgacgaggaguucugcgacaugcugagacuguucgacuucugcaagcaggccauccagagacugaaggccgaggcccagaugagcauccagcugaucaacaaggccgugaacgcccugaucaacgaccagcugaucaugaagaaccaccugagagacaucaugggcauccccuacugcaacuacagcaaguacugcuaccugaaccacaccgugaccggcaagaccagccugcccaagugcugccuggugagcaacggcagcuaccugaacgagacccacuucagcgacgacaucgagcagcaggccgacaacaugaucaccgagaugcugcagaaggaguacauggagagacagggcaagaccccccugggccugguggaccuguucguguucagcaccagcuucuaccugaucagcaucuuccugcaccuggugaagauccccacccacagacacguggugggcaagcccugccccaagccccacagacugaaccacaugggcaucugcagcugcggcuucuacaagcagcccggcgugcccgugagauggaagagaugaggacuaguaauaaggaaacuguaugaaugucugugggcaggaagugaagagauccuucuguaaagguuuuuggaauuaugucugcugaauaauaaacuuuuuugaaauaauaaaucugguagaaaaaugagaucucaaaggcucuuuucagagccaccaaaaaaaaaaaaaaaaaaaaaaaaaaaaaaaaaaaaaaaaaaaaaaaaaaaaaaaaaaaaaaaaagaauu

SEQ ID NO: 40932 - RNA, 1781 nt, Artificial Sequence
  mRNA product Design b-4 (hSL-A64-N5) comprising derived and/or modified sequence from LASV(Z0947-SLE-2011;Clade IV)__AIT17840__GPCmut12 (opt4)
aggagagucccgcagucggcguccagcggcucugcuuguucgugugugugucguugcaggccuuauucaagcuuaccaugggccagaucgugaccuucuuccaggaggugccccacgugaucgaggaggugaugaacaucgugcugaucgcccugagcauccuggccgugcugaagggccuguacaacuucgccaccugcggccuggugggccuggugaccuuccugcugcugugcggcagaagcugcaccaucagccuguacaagggcguguacgagcugcagacccuggagcugaacauggagacccugaacaugugcaugccccugagcugcaccaagaacaacagccaccacuacaucauggugggcaacgagaccggccuggagcugacccugaccaacaccagcaucaucaaccacaaguucugcaaccugagcgacgcccacaagaagaaccuguacgaccacgcccugaugagcaucaucagcaccuuccaccugagcauccccaacuucaaccaguacgaggccaugagcugcgacuucaacggcggcaagaucagcgugcaguacaaccugagccacagcuacgccggcgacgccgccaaccacugcggcaccguggccaacggcgugcugcagaccuucaugagaauggccuggggcggcagcuacaucgcccuggacagcggcagagacagaugggacugcaucaugaccagcuaccaguaccugaucauccagaacaccaccugggaggaccacugccaguucagcagacccagccccaucggcuaccugggccugcugagccagagaaccagagacaucuacaucagcagaagacugcugggcaccuucaccuggacccugagcgacagcgagggcaaggacacccccggcggcuacugccugaccagauggaugcugaucgaggccgagcugaagugcuucggcaacaccgccguggccaagugcaacgagaagcacgacgaggaguucugcgacaugcugagacuguucgacuucugcaagcaggccauccagagacugaaggccgaggcccagaugagcauccagcugaucaacaaggccgugaacgcccugaucaacgaccagcugaucaugaagaaccaccugagagacaucaugggcauccccuacugcaacuacagcaaguacugcuaccugaaccacaccaccaccggcaagaccagccugcccaagugcugccuggugagcaacggcagcuaccugaacgagacccacuucagcgacgacaucgagcagcaggccgacaacaugaucaccgagaugcugcagaaggaguacauggagagacagggcaagaccccccugggccugguggaccuguucguguucagcaccagcuucuaccugaucagcaucuuccugcaccuggugaagauccccacccacagacacaucgugggcaagcccugccccaagccccacagacugaaccacaugggcaucugcagcugcggccuguacaagcagcccggcgugcccgugaaguggaagagaugaggacuaguaauaaggaaacuguaugaaugucugugggcaggaagugaagagauccuucuguaaagguuuuuggaauuaugucugcugaauaauaaacuuuuuugaaauaauaaaucugguagaaaaaugagaucucaaaggcucuuuucagagccaccaaaaaaaaaaaaaaaaaaaaaaaaaaaaaaaaaaaaaaaaaaaaaaaaaaaaaaaaaaaaaaaaagaauu

SEQ ID NO: 40933 - RNA, 1781 nt, Artificial Sequence
  mRNA product Design b-4 (hSL-A64-N5) comprising derived and/or modified sequence from LASV(Josiah;Clade IV)__NP_694870__GPCmut12 (opt5)
aggagagucccgcagucggcguccagcggcucugcuuguucgugugugugucguugcaggccuuauucaagcuuaccaugggccagaucgugaccuucuuucaagaggucccccacguuauugaagaggugaugaacaucgugcugauugcccucagcguccuggcugugcuuaaggggcuguacaauuucgccacaugcggacucguuggccuggugacguuucuucugcucugugggagauccugcaccacaucucuguauaaaggagucuacgaacugcagacccucgagcugaacauggaaacacuuaauauguguaugccucugagcugcaccaagaacaauucccaucacuauaucauggugggcaacgagacagggcucgagcugacccuuacgaauaccucuauuaucaaccauaaauucuguaaucugagcgacgcgcacaagaaaaaccucuacgaucaugcucugauguccaucauuucuacauuucaccugagcaucccgaauuucaaccaguaugaagccauguccugcgacuuuaauggaggcaagauuagcguucaguacaaccucucucacuccuaugccggcgaugcugccaaucauugugggaccguggcuaacggaguccugcaaacauucaugcggauggccuggggcgggagcuacaucgcgcuugacucuggacgcggcaacugggauugcauuaugaccuccuaccaguaucugaucauucagaauacgacaugggaggaccacugucaguuuagcagacccucuccuaucggguaccucggacugcuuucccaacggacccgcgauaucuauauuagcagacggcugcucggcacauucaccuggacccuguccgacucugaaggcaaggauacacccgggggauacugccugacgcgcuggaugcucaucgaggccgagcugaaauguuuuggcaacaccgcuguggccaagugcaaugaaaaacaugacgaggaguucugcgauaugcuuagacuguuugacuucuguaagcaggcuauucagcggcucaaagccgaagcgcagaugagcauccaacugauuaacaaggccgugaaugcucuuaucaacgaucagcugaucaugaagaaucaccuccgcgacauuauggggaucccuuauugcaacuacuccaaauauuguuaccugaaucacacaaccacaggaagaaccagccugcccaagugcugucucgucucuaacggcuccuaccugaaugaaacgcauuucagcgacgauauugagcagcaagccgacaacaugaucacagagaugcuucagaaagaauauauggagcggcaggggaagaccccucugggacucguugaucuguuuguguucucuaccagcuuuuaccugauuuccaucuuccuucaccucgugaaaaucccgacacaucgccacauugucggcaagucuugccccaaaccucauagacugaaucacaugggcaucuguagcugcgggcuguauaagcagcccggagugccuguuaaguggaaacggugaggacuaguaauaaggaaacuguaugaaugucugugggcaggaagugaagagauccuucuguaaagguuuuuggaauuaugucugcugaauaauaaacuuuuuugaaauaauaaaucugguagaaaaaugagaucucaaaggcucuuuucagagccaccaaaaaaaaaaaaaaaaaaaaaaaaaaaaaaaaaaaaaaaaaaaaaaaaaaaaaaaaaaaaaaaaagaauu

SEQ ID NO: 40934 - RNA, 1778 nt, Artificial Sequence
  mRNA product Design b-4 (hSL-A64-N5) comprising derived and/or modified sequence from LASV(LP;Clade I)__AAF86701__GPCmut12 (opt5)
aggagagucccgcagucggcguccagcggcucugcuuguucgugugugugucguugcaggccuuauucaagcuuaccaugggccagaucauuaccuucuuucaagaggugccccacgucaucgaagagguuaugaacauugugcugaucgcccucagccugcuugcuauucugaaggggcucuacaauaucgccacaugcggaaucauuggccugguggcguuccuuuuucugugugggaaauccugcucucucacgcugaagggaggcuaugaacugcagacccucgagcugaacauggaaacacuuaauauguguaugccucugagcugcaccaaaaacuccucucaucacuacaucagagucgggaaugagacaggacucgagcugacccuuacaaacaccagcauuaucaaucauaaguucuguaaccuguccgacgcucacaaaaagaaucucuaugaucaugcccugaugucuauuaucagcacguuucaccuguccauuccgaacuucaaucaguacgaagccaugagcugcgacuuuaacggcggcaagaucucugugcaguauaaucucucccacagcuacgcuggggaugccgcugagcauuguggaaccguugccaacggcgugcugcaaacauucaugcggauggcguggggagggcgcuauaucgcccuugacucuggcaaagggaauugggauugcauuaugaccuccuaccaguaccugaucauucagaacacaaccugggaagaccacugucaguuuagcagacccucuccuaucggauaucucggccugcuuucccaacggacgcgcgauauuuacaucagcagacggcugcucggcacauucaccuggacacuguccgacucugaggggaacgagacccccggaggcuauugccugacccgcuggaugcucaucgaagcugagcugaaguguuuugggaauacagccgucgcuaaaugcaacgaaaagcaugaugaggaguucugcgacaugcuuagacuguuugauuucuguaaacaggccauucggcgccucaaggcggaagcccagaugagcauccagcugauuaauaaggcugugaacgcccuuaucaaugaccaacugauuaugaaaaaccaccucagagauaucaugggaaucccuuacugcaauuauuccaaguacuguuaucugaaccacacgagcucuggccggaccucccugcccaaaugcugucucauuagcaaugggucuuaccugaacgagacacaguucagcgacgacaucgaacagcaagcugauaauaugauuaccgagaugcuucagaaggaauacaucgagcgccagggaaaaacaccucugggccucguugacauuuuuaucuucuccaccucuuuuuaucugauuagcaucuuccugcaucuuaucaagauuccgacgcacagacauaucgugggcaaacccugcccuaagccccaccggcucaaccauaugggggucuguuccugcggacuguacaagcacccuggcgugcccacaaaauggaagcgcugaggacuaguaauaaggaaacuguaugaaugucugugggcaggaagugaagagauccuucuguaaagguuuuuggaauuaugucugcugaauaauaaacuuuuuugaaauaauaaaucugguagaaaaaugagaucucaaaggcucuuuucagagccaccaaaaaaaaaaaaaaaaaaaaaaaaaaaaaaaaaaaaaaaaaaaaaaaaaaaaaaaaaaaaaaaaagaauu

SEQ ID NO: 40935 - RNA, 1778 nt, Artificial Sequence
  mRNA product Design b-4 (hSL-A64-N5) comprising derived and/or modified sequence from LASV(803213;Clade II)__AAF86703__GPCmut12 (opt5)
aggagagucccgcagucggcguccagcggcucugcuuguucgugugugugucguugcaggccuuauucaagcuuaccaugggccagaucauuaccuucuuucaagaggugccccacgucaucgaagagguuaugaacauugugcugaucgcccucagccugcuugcuauucugaaggggaucuacaauguggccacaugcggacucuucggccugaucuccuuucuucugcucugugggagaucuugcagcgucacguauaaaggaguguacgaacugcagacccuggagcucaacauggcgaaucugaacauguguaugccucuuuccugcacaaagaauaacucucaucacuauauuaugguuggcaaugaaaccgggcuggagcucacacugaccaacacaagcaucauuaaucauaaauucuguaaccuuuccgacgcucacaagaaaaaucuguacgaucaugcccucaugucuaucauuagcaccuuucaccuguccaucccgaacuucaaucaguaugaggccaugagcugcgacuuuaacggaggcaagauuucugugcaguacaaucugucccacagcuucgcugucgaugccgcuaaccauuguggcacgaucgccaacggggugcuccaaaccuuuaugcggauggcguggggaggcucuuauaucgcccuggacuccgggaagggaaauugggauugcauuaugacaagcuaccaguaccuuaucauucagaacaccacaugggaagaccacugucaguucucucgccccuccccuaucggcuaucuggggcuccugagccaaagaacccgggauauuuacaucucccgcagacuucugggaacguuuacauggacccucucugacagcgagggcaaugaagcucccggcggguauugccugacacgguggaugcugaucgaggccgagcucaaauguuucggaaacaccgcuguugccaagugcaaugaaaaacaugaugaggaauuuugcgacaugcugcgccuuuucgauuucuguaagcaggcgauuaaaagacugaagaccgaggcccagauguccauccagcucauuaacaaggcugugaaugcccugaucaacgaccaacuuauuaugaaaaaucaucugcgggauaucaugggcaucccuuacugcaacuauagccgcuacuguuaucucaaucacacagucacggggaagaccucucugcccagaugcugucugguguccaacggaagcuaccucaaugaaacacacuuuucugacgacauugagcagcaggcugauaacaugaucaccgagaugcugcaaaaagaauacauggaccggcagggcaagacaccucuugggcugguggaucucuucgucuuuagcaccuccuucuaucugauuucuaucuuucugcaccuuguuaaaauuccgacgcaucgccacaucgugggaaagcccugcccuaaaccccauagacucaaucacaugggcauuuguagcugcggccuguacaagcacccuggggugcccgucaaguggaaacggugaggacuaguaauaaggaaacuguaugaaugucugugggcaggaagugaagagauccuucuguaaagguuuuuggaauuaugucugcugaauaauaaacuuuuuugaaauaauaaaucugguagaaaaaugagaucucaaaggcucuuuucagagccaccaaaaaaaaaaaaaaaaaaaaaaaaaaaaaaaaaaaaaaaaaaaaaaaaaaaaaaaaaaaaaaaaagaauu

SEQ ID NO: 40936 - RNA, 1778 nt, Artificial Sequence
  mRNA product Design b-4 (hSL-A64-N5) comprising derived and/or modified sequence from LASV(GA391;Clade III)__CAA36645__GPCmut12 (opt5)
aggagagucccgcagucggcguccagcggcucugcuuguucgugugugugucguugcaggccuuauucaagcuuaccaugggccagaucgugaccuucuuucaagaggucccccacguuauugaagaggugaugaacaucgugcugauugcccucagcauccuggcuauucuuaaggggcuguacaaugucgccacaugcggacucaucggccuggugacguuccuucugcucuccgggagaucuuguagccugaucuauaaaggaaccuacgaacugcagacacucgagcugaacauggaaacccuuaauaugugcaugccucuguccuguacaaagaacaauucucaucacuauauucggguuggcaacgagaccgggcucgagcugacacuuaccaauacgagcauccugaaccauaaauuuugcaaucucuccgacgcgcacaagcgcaaccuguacgaucauucucugaugagcauuaucuccaccuuccaccucagcauuccgaauuuuaaccaguaugaagcuaugucuugugacuucaauggaggcaaaaucacagugcaguacaaccugucccacagcuuugccgucgaugccgcuggccauugcgggacccuugccaauggagugcugcaaacauucaugagaauggcuuggggcgggucuuauauugcccucgacuccggacggggcaacugggauuguaucaugaccagcuaccaguaccugaucauucagaacacgacaugggacgaucacugccaguuuucucgccccuccccuaucggguaucuuggacugcucagccaaagaacccgggacauuuacaucucccgcagacugcugggcacauucaccuggacccucucugauagcgagggcaaugaaacacccgggggauauugucugacgcgguggaugcuuauugaggcggagcugaagugcuuuggcaacaccgccguugcuaaguguaaugaaaaacaugacgaggaguucugcgauaugcuccgccuguuugacuucugcaagcaggccaucagacggcuuaaaacagaagcucagauguccauccagcugauuaacaaggccgugaaugcgcucaucaacgaucaacugauuaugaaaaaucaucugcgcgacaucauggggauuccuuacuguaacuauagcagauacugcuaucucaaucacaccucuacaggaaagaccucccugccccgguguugccuuaucagcaacggcucuuaccugaaugaaacgaaguucagcgacgauaucgagcagcaggccgacaacaugauuacagagaugcuccaaaaagaauacaucgaucgccaggggaagaccccucugggacuggucgaccuuuuuguguucuccaccucuuuuuaucucauuagcaucuuccugcaccuggugaaaauuccgacacacagacauaucgucggcaagcccuguccuaaaccccaccggcucaaucauaugggcauuugcuccugugggcuguacaagcagccuggaguucccgugagauggaaacgcugaggacuaguaauaaggaaacuguaugaaugucugugggcaggaagugaagagauccuucuguaaagguuuuuggaauuaugucugcugaauaauaaacuuuuuugaaauaauaaaucugguagaaaaaugagaucucaaaggcucuuuucagagccaccaaaaaaaaaaaaaaaaaaaaaaaaaaaaaaaaaaaaaaaaaaaaaaaaaaaaaaaaaaaaaaaaagaauu

SEQ ID NO: 40937 - RNA, 1781 nt, Artificial Sequence
  mRNA product Design b-4 (hSL-A64-N5) comprising derived and/or modified sequence from LASV(AV;Clade V)__CCA30314__GPCmut12 (opt5)
aggagagucccgcagucggcguccagcggcucugcuuguucgugugugugucguugcaggccuuauucaagcuuaccaugggccagaucgugaccuucuuucaagaggucccccacguuauugaagaggugaugaacaucgugcugauugcccucagcauccuggcuguccuuaaggggcuguacaauauugccacaugcggacucaucggccugaucacguuccuucugcucugugggagauccugcucuagcaaccuguauaaaggaguguacgaacugcagucccucgaccugaauauggagacccuuaacauguguaugccucugucuugcacaaagaauaacagccaucacuauauucggguuggcaaugauaccgggcucgaacugacacuuaccaacacauccauccugaaucauaaauuuuguaaccucucugacgcgcacaagaaagaucuguacgaccaugcucugaugagcauuaucuccaccuuccaccucagcauuccgaauuuuaaccaguaugaggccaugucuugcgauuucaauggaggcaagaucuccgugcaguacaaccugagccacucuuaugccauugacgcugccaaucauuguggcacggucgcuaacgggauccuucaaaccuuuaugcgcauggccuggggaggcuccuacaucgcgcuggauagcgggagaggaaacugggacugcauuaugacaucuuaccaguaucucaucauucagaauaccacaugggagaaccacugucaguucucccggcccagcccuaucggcuaccuggggcuucugucccaacgcaccagagauauuuauaucucucggcgccuccugggaacguuuacauggacccugagcgacuccgaaggcaaugccacacccggcggguacugccucaccagauggaugcugaucgaggcugaacuuaaguguuucggaaacaccgccguggcuaaaugcaaugagaagcaugaugaggaauuuugcgacaugcugcgccucuucgauuuuuguaaacaggccauuagccggcugaagucugaggcgcagauguccauccagcuuauuaacaaagccguuaaugcucugaucaacgaccaacucauuaugaagaaucaccugagagacaucaugggcaucccuuauugcaacuacagcaaguauuguuaccugaaucacacaauuacggggaaaaccucucuccccaagugcugucuggugagcaacggauccuaccuuaaugaaacacauuucucugaugacaucgagcagcaggccgauaacaugauuaccgaaaugcugcaaaaagaguauauggagcggcagggcaagacaccucucgggcuggucgaccuguucguguuuagcaccuccuucuaccuuaucagcauuuuucuccgccuggugaaaaucccgacgcacagacauauugucggaaagcccugcccuaaaccccaccggcugaaucauaugggcaucuguucuugcggccucuauaagcagccugggguucccgugcgcuggaagagaugaggacuaguaauaaggaaacuguaugaaugucugugggcaggaagugaagagauccuucuguaaagguuuuuggaauuaugucugcugaauaauaaacuuuuuugaaauaauaaaucugguagaaaaaugagaucucaaaggcucuuuucagagccaccaaaaaaaaaaaaaaaaaaaaaaaaaaaaaaaaaaaaaaaaaaaaaaaaaaaaaaaaaaaaaaaaagaauu

SEQ ID NO: 40938 - RNA, 1778 nt, Artificial Sequence
  mRNA product Design b-4 (hSL-A64-N5) comprising derived and/or modified sequence from LASV(Togo/2016/7082;Clade VI)__AMR44577__GPCmut12 (opt5)
aggagagucccgcagucggcguccagcggcucugcuuguucgugugugugucguugcaggccuuauucaagcuuaccaugggccagaucauuaccuucuuucaagaggugccccacgucaucgaagagguuaugaacauugugcugaucgcccucagccugcuugcuauucugaaggggguguacaaugucgccacaugcggaaucaucggccucgugacguuccuguuucuuugugggagauccugcucucugauuuauaaaggaagcuacgaacuccagacccuggagcugaacauggaaacacucaauauguguaugccucuguccugcaccaagaacucuagccaucacuauauccggguuggcaaugagacagggcuugagcugacccucacaaacaccuccauuaucaaucauaaauucuguaaccugucugacgcgcacaagcgcaaucuuuacgaucaugcucugaugagcauucucuccacguuucaccugagcaucccgaacuucaaucaguaugaagccaugucuugcgacuuuaacggaggcaaaauuuccgugcaguacaaucugagccacgccuaugcugucgaugccgcugagcauuguggcaccguggccaacgggguucuccaaacauucaugagaauggcguggggaggcucuuacaucgcccuggacuccgggcggggaaauugggauugcaucaugaccagcuaccaguaucuuauuauccagaacacaaccugggaagaccacugucaguuuucucgccccuccccuauuggcuaccuggggcuccugagccaaagaacgcgggauaucuauauuucccgcagacuucugggaacauucaccuggacacucucugacagcgagggcaacgagacccccggcggguacugccugacccgguggaugcugaucgaagcugagcucaaguguuuuggaaauacagccguggcuaagugcaacgaaaaacaugaugaggaguucugcgacaugcugcgccuuuuugauuucuguaagcaggccauccagagacugaaauccgaagcgcagaugagcauucaacucaucaauaaggccgucaacgcucugauuaaugaccagcuuaucaugaaaaaccaucugcgggauaugaugggcauuccuuauugcaauuacucuaaguauuguuaccucaaccacacguccagcgggcgcaccucucugcccaagugcugucuggugagcaauggauccuaccucaacgagacacacuucucugacgacaucgaacagcaagccgauaauaugaucaccgagaugcugcagaaagaauauauugacagacagggcaagacaccucuugggcugguggaucucuuugucuucagcaccuccuuuuaccugaucagcauuuuccugcaccuuaucaaaauuccgacgcaucggcacaucguuggaaagcccugcccuaaaccccaucgccucaaccacaugggcauuuguucuugcggccuguauaagcagccuggggugcccacaagauggaaacggugaggacuaguaauaaggaaacuguaugaaugucugugggcaggaagugaagagauccuucuguaaagguuuuuggaauuaugucugcugaauaauaaacuuuuuugaaauaauaaaucugguagaaaaaugagaucucaaaggcucuuuucagagccaccaaaaaaaaaaaaaaaaaaaaaaaaaaaaaaaaaaaaaaaaaaaaaaaaaaaaaaaaaaaaaaaaagaauu

SEQ ID NO: 40939 - RNA, 1778 nt, Artificial Sequence
  mRNA product Design b-4 (hSL-A64-N5) comprising derived and/or modified sequence from LASV(KAK-428;Clade n.d. (VII))__ANH09740__GPCmut12 (opt5)
aggagagucccgcagucggcguccagcggcucugcuuguucgugugugugucguugcaggccuuauucaagcuuaccaugggccagaucgugaccuucuuucaagaggucccccacguuauugaagaggugaugaacaucgugcugauugcccucagccugcuugcuauccugaaggggcucuacaauuucgccacaugcggagucauuggccugaucacguuucuucugcucugugggagauccugcucugcgaccuauaaaggacaguacgaacugcagacacuggagcucaacauggaaagccugaauauguguaugccucuuuccugcaccaagaacaauucucaucacuauauccgggcuggcaacaauacagggcuggagcucacccugacaaacaccagcauuaucucccauaaauucuguaaucuuucugacgcccacaagaaaaaccuguacgaucauacgcucaugagcauuaucaccacauuucaccuguccauuccgaauuucaaccaguaugaggccaugagcugcgacuuuaauggaggcaagaucucuauucaauacaaccugucccacagcuaugcuggcgaugccgcucagcauugugggaccguggccaauggaguucuccagacauucaugcgcauggcguggggcgggucuuaccuggcccuugacuccggaagacggggcugggauugcaucaucagcucuuaccaguaucugauuauccaaaacaccacgugggacgaucacugucaguuuucccgccccagcccuauuggguaccucggauucgugucccagaagacaagagacaucuauauuucucggcgccugcuuggcaccuuuacauggacccugagcgauuccgaaggccaugacaugcccgggggauacugccucaccagauggaugcugaucgaggcugaucugaaauguuucggcaacacagccgucgcuaagugcaaugaaaaacacgacgaggaguuuugcgauauguggcgccucuucgacuucuguaagcaggccauccaacggcugaaagcggaagcccagaugaacauucagcuuaucaauaaggcugugaacgcccugauuaaugaccaacucaugaugaagaaccaccugagagauaucauggggauuccuuauugcaauuacagcaaauuuuguuaucuuaacaauacgaccacaggacggaccucucugccccgcugcugucucaucuccaacggcagcuaccugaaugagacacauuucucugacgauaucgaacagcaggcugacaacaugauuaccgagaugcugcagaaggaauacauggauagacaagggaaaacgccucucggacugguugaccuuuuuguguucagcacauccuuuuaucugaucaccauuuuccuccaccuggucaagaucccgacccaucggcacauugugggcaaacccugcccuaagccccaucgccugaaucacaugggcaucuguucuugcgggcuuuacaaacagccuggagugcccgucagauggaagcggugaggacuaguaauaaggaaacuguaugaaugucugugggcaggaagugaagagauccuucuguaaagguuuuuggaauuaugucugcugaauaauaaacuuuuuugaaauaauaaaucugguagaaaaaugagaucucaaaggcucuuuucagagccaccaaaaaaaaaaaaaaaaaaaaaaaaaaaaaaaaaaaaaaaaaaaaaaaaaaaaaaaaaaaaaaaaagaauu

SEQ ID NO: 40940 - RNA, 1778 nt, Artificial Sequence; identical to SEQ ID NO: 40934
  mRNA product Design b-4 (hSL-A64-N5) comprising derived and/or modified sequence from LASV(Pinneo-NIG-1969;Clade I)__AIT17836__GPCmut12 (opt5)

SEQ ID NO: 40941 - RNA, 1778 nt, Artificial Sequence
  mRNA product Design b-4 (hSL-A64-N5) comprising derived and/or modified sequence from LASV(ISTH0009-NIG-2011;Clade II)__AIT17404__GPCmut12 (opt5)
aggagagucccgcagucggcguccagcggcucugcuuguucgugugugugucguugcaggccuuauucaagcuuaccaugggccagaucauuaccuucuuucaagaggugccccacgucaucgaagagguuaugaacauugugcugaucgcccucagccugcuugcuauucugaaggggaucuacaauguggccacaugcggacucuucggccuggucuccuuucuucugcucugugggagaucuugcagcacgaccuauaaaggaguguacgaacugcagacacuggagcucgacauggcgucccugaacauguguaugccucuuucuugcaccaagaauaacagccaucacuauaucaugguuggcaaugaaacagggcuggagcucacccugacaaacaccuccauuaucaaucauaaauucuguaaccuuucugaugcucacaagaaaaaucuguacgaccaugcccucaugagcauuaucuccacguuucaccugagcauuccgaacuucaaucaguaugaggccaugucuugcgauuuuaacggaggcaagaucuccgugcaguacaaucugagccacgcuuaugccgucgacgcugccaaccauuguggcaccauugcgaauggggugcuccaaacauucaugcggauggccuggggaggcucuuacaucgcucuggauuccgggaagggaagcugggacugcaucaugaccucuuaccaguaucuuauuauccagaacacaaccugggaagaucacugucaguuuucccgccccagcccuauuggcuaccuggggcuccugucccaaagaacgcgggacaucuauauuucucgcagacuucugggaacauucaccuggacacucagcgauuccgagggcaacgaaacccccggcggguacugccugacccgguggaugcugaucgaggccgagcucaaauguuuuggaaauacagcuguugccaagugcaacgaaaaacaugacgaggaguucugcgauaugcugcgccuuuuugacuucuguaagcaggcgaucagacggcugaaaacggaagcccagaugagcauucagcucaucaauaaggcugugaacgcccugauuaaugaucaacuuaucaugaagaaccaucugcgcgacauuaugggcaucccuuauugcaauuacucuaaauauuguuaccucaaccacaccgucacagggaagaccucccugcccagaugcugucuggugagcaauggaucuuaccucaacgaaacacacuucagcgacgauaucgagcagcaggcugacaauaugauuaccgagcugcuucaaaaagaauauauggaucggcagggcaagacgccucuggggcucguggaccuguuugucuucuccacaucuuuuuaccugaucagcauuuuccuucaccucaucaaaauuccgacccaucgccacaucaccggaaagcccugcccuaaaccccauagacugaaccacaugggcauuuguuccugcggccuguauaagcacccugggguucccgugaaguggaaacggugaggacuaguaauaaggaaacuguaugaaugucugugggcaggaagugaagagauccuucuguaaagguuuuuggaauuaugucugcugaauaauaaacuuuuuugaaauaauaaaucugguagaaaaaugagaucucaaaggcucuuuucagagccaccaaaaaaaaaaaaaaaaaaaaaaaaaaaaaaaaaaaaaaaaaaaaaaaaaaaaaaaaaaaaaaaaagaauu

SEQ ID NO: 40942 - RNA, 1778 nt, Artificial Sequence
  mRNA product Design b-4 (hSL-A64-N5) comprising derived and/or modified sequence from LASV(ISTH2010-NIG-2012;Clade II)__AIT17482__GPCmut12 (opt5)
aggagagucccgcagucggcguccagcggcucugcuuguucgugugugugucguugcaggccuuauucaagcuuaccaugggccagaucauuaccuucuuucaagaggugccccacgucaucgaagagguuaugaacauugugcugaucgcccucagccugcuugcuauucugaaggggaucuacaauguggccacaugcggacucuucggccuggucuccuuucuucugcucugugggagaucuugcagcacgaccuauaaaggaguguacgaacugcagacacuggagcucgacauggcgucccugaacauguguaugccucuuucuugcaccaagaauaacagccaucacuauaucaugguuggcaaugaaacagggcuggagcucacccugacaaacaccuccauuaucaaucauaaauucuguaaccuuucugaugcucacaagaaaaaucuguacgaccaugcccucaugagcauuaucuccacguuucaccugagcauuccgaacuucaaucaguaugaggccaugucuugcgauuuuaacggaggcaagaucuccgugcaguacaaucugagccacgcuuaugccgucgacgcugccaaccauuguggcaccauugcgaauggggugcuccaaacauucaugcggauggccuggggaggcucuuacaucgcucuggauuccgggaagggaagcugggacugcaucaugaccucuuaccaguaucuuauuauccagaacauuacaugggaagaucacugucaguuuucccgccccagcccuaucggcuaccuggggcuccugucccaaagaacccgggacauuuauaucucucgcagacuucugggaacguucacauggacccucagcgauuccgagggcaacgaaacacccggcggguacugccugacccgguggaugcugaucgaggccgagcucaaauguuuuggaaauaccgcuguugccaagugcaacgaaaaacaugacgaggaguucugcgauaugcugcgccuuuuugacuucuguaagcaggcgauuagacggcugaaaacagaagcccagaugagcauccagcucauuaauaaggcugugaacgcccugaucaaugaucaacuuauuaugaagaaccaucugcgcgacaucaugggcaucccuuauugcaauuacucuaaauauuguuaccucaaccacacggucaccgggaagacaucccugcccagaugcugucuggugagcaauggaucuuaccucaacgaaacccacuucagcgacgauauugagcagcaggcugacaauaugaucacagagcugcuucaaaaagaauauauugaucggcagggcaagaccccucuggggcucguggaccuguuugucuucuccacgucuuuuuaccugaucagcauuuuccuucaccucguuaaaaucccgacacaucgccacguggugggaaagcccugcccuaaaccccauagacugaaccacaugggcauuuguuccugcggccuguauaagcacccugggguccccgugaaguggaaacggugaggacuaguaauaaggaaacuguaugaaugucugugggcaggaagugaagagauccuucuguaaagguuuuuggaauuaugucugcugaauaauaaacuuuuuugaaauaauaaaucugguagaaaaaugagaucucaaaggcucuuuucagagccaccaaaaaaaaaaaaaaaaaaaaaaaaaaaaaaaaaaaaaaaaaaaaaaaaaaaaaaaaaaaaaaaaagaauu

SEQ ID NO: 40943 - RNA, 1778 nt, Artificial Sequence
  mRNA product Design b-4 (hSL-A64-N5) comprising derived and/or modified sequence from LASV(Lassa virus/H.sapiens-wt/NGA/2015/ISTH_0543;Clade II)__AVO03639__GPCmut12 (opt5)
aggagagucccgcagucggcguccagcggcucugcuuguucgugugugugucguugcaggccuuauucaagcuuaccaugggccagaucauuaccuucuuucaagaggugccccacgucaucgaagagguuaugaacauugugcugaucgcccucagccugcuugcuauucugaaggggaucuacaauguggccacaugcggacucuucggccuggucuccuuucuucugcucugugggagaucuugcagcacgaccuauaaaggaguguacgaacugcagacacuggagcucgacauggcgaaccugaauauguguaugccucuuuccugcaccaagaacaauucucaucacuauaucaugguuggcaacgaaacagggcuggagcucacccugacaaauaccagcauuaucaaccauaaauucuguaaucuuuccgaugcucacaagaaaaaccuguacgaccaugcccucaugucuauuaucagcacguuucaccuguccauuccgaauuucaaccaguaugaggccaugagcugcgauuuuaauggaggcaagaucucugugcaguacaaccugucccacaccuaugcugucgacgccgcuaaucauuguggcacaauugccaacggggugcuccaaaccuucaugcggauggcguggggaggcagcuacaucgcccuggauucugggaagggauccugggacugcaucaugacaagcuaccaguaucuuguuauucagaacaccacgugggaagaucacugucaguuuucucgccccuccccuaucggcuaccuggggcuccugagccaaagaacacgggacauuuauaucucccgcagacuucugggaaccuucacauggacccucucugauagcgagggcaaugaaacccccggcggguacugccugacacgguggaugcugauugaggcugagcucaaauguuuuggaaacacggccguggcuaagugcaaugaaaaacaugacgaggaguucugcgauaugcugcgccuuuuugacuucuguaagcaggccaucagacggcugaaaaccgaagcgcagauguccauccagcucauuaacaaggccgucaaugcucugaucaacgaucaacuuauuaugaagaaucaucugcgcgacaucaugggcauuccuuauugcaacuacagcaaauauuguuaccucaaucacacagugaccgggaagacaucucugcccagaugcugucugguguccaacggaagcuaccucaaugaaacccacuucucugacgauaucgagcagcaggccgacaacaugaucacggagcugcuucaaaaagaauauauugaucggcagggcaagacaccucuggggcucgucgaccuguuuguuuucagcaccuccuuuuaccugaucucuauuuuccuucaccucgugaaaaucccgacccaucgccacauuacaggaaagcccugcccuaaaccccauagacugaaucacaugggcaucuguagcugcggccuguauaagcacccuggggugcccgucaaguggaaacggugaggacuaguaauaaggaaacuguaugaaugucugugggcaggaagugaagagauccuucuguaaagguuuuuggaauuaugucugcugaauaauaaacuuuuuugaaauaauaaaucugguagaaaaaugagaucucaaaggcucuuuucagagccaccaaaaaaaaaaaaaaaaaaaaaaaaaaaaaaaaaaaaaaaaaaaaaaaaaaaaaaaaaaaaaaaaagaauu

SEQ ID NO: 40944 - RNA, 1778 nt, Artificial Sequence
  mRNA product Design b-4 (hSL-A64-N5) comprising derived and/or modified sequence from LASV(Lassa virus/H.sapiens-wt/NGA/2016/ISTH_0009;Clade II)__AVO03571__GPCmut12 (opt5)
aggagagucccgcagucggcguccagcggcucugcuuguucgugugugugucguugcaggccuuauucaagcuuaccaugggccagaucauuaccuucuuucaagaggugccccacgucaucgaagagguuaugaacauugugcugaucgcccucagccugcuugcuauucugaaggggaucuacaauguggccacaugcggacuccugggccuugucuccuuccugcuccugugugggagaucuugcagcacgaccuauaaaggaguguacgaacugcagacacucgagcuggacauggcgucccuuaacauguguaugccucugucuugcaccaagaauaacagccaucacuauaucaugguuggcaaugaaacagggcucgagcugacccuuacaaacaccuccauuaucaaucauaaauuuuguaaccugucugaugcucacaagaaaaaucucuacgaccaugcccugaugagcauuaucuccacguuccaccugagcauuccgaacuuuaaucaguaugaggccaugucuugcgauuucaacggaggccggaucuccgugcaguacaaucucagccacucuuaugcugucgacgccgcuaaccauuguggcaccauugccaauggggugcugcaaacauuuaugcgcauggcguggggaggcuccuacaucgcccuugauagcgggaagggaucuugggacugcaucaugaccuccuaccaguaucugauuauccagaacacaaccugggaagaucacugucaguucagcagacccuccccuauuggcuaccucgggcugcuuucucaacggacgcgcgacaucuauauuagcagacggcugcucggaacauuuaccuggacacuguccgauagcgagggcaacgaaacccccggcggguacugccugacccgcuggaugcucaucgaggcugagcugaaguguuucggaaauacagccguugcuaaaugcaacgaaaagcaugacgaggaauuuugcgauaugcuuagacuguucgacuuuuguaaacaggccauccggcgccucaagacggaggcgcagaugucuauucagcugaucaauaaagccgugaacgcucuuauuaaugaucaacugaucaugaagaaccaccucagagacauuaugggcaucccuuauugcaauuacuccaaguauuguuaccugaaccacaccgucacagggaaaaccagccugccccggugcugucucgugucuaauggaagcuaccugaacgaaacacauuucuccgacgauaucgagcagcaggccgacaauaugauuaccgagcuucugcaaaaggaauauaucgaucgccagggcaaaacgccucucgggcugguggaccuguucgucuuuucuaccagcuucuaccuuauuuccaucuuucuccaccugguuaagauuccgacacauagacacaucaccggaaaacccugcccuaagccccaucggcugaaccacaugggcauuuguagcugcggccucuauaaucacccuggggugcccgugaaauggaagcgcugaggacuaguaauaaggaaacuguaugaaugucugugggcaggaagugaagagauccuucuguaaagguuuuuggaauuaugucugcugaauaauaaacuuuuuugaaauaauaaaucugguagaaaaaugagaucucaaaggcucuuuucagagccaccaaaaaaaaaaaaaaaaaaaaaaaaaaaaaaaaaaaaaaaaaaaaaaaaaaaaaaaaaaaaaaaaagaauu

SEQ ID NO: 40945 - RNA, 1778 nt, Artificial Sequence
  mRNA product Design b-4 (hSL-A64-N5) comprising derived and/or modified sequence from LASV(Lassa virus/H.sapiens-wt/NGA/2016/ISTH_0017;Clade II)__AVO03567__GPCmut12 (opt5)
aggagagucccgcagucggcguccagcggcucugcuuguucgugugugugucguugcaggccuuauucaagcuuaccaugggccagaucauuaccuucuuucaagaggugccccacgucaucgaagagguuaugaacauugugcugaucgcccucagccugcuugcuauucugaaggggaucuacaauguggccacaugcggacucuucggccuggucuccuuucuucugcucugugggagaucuugcagcacgaccuauaaaggaguguacgaacugcagacacuggagcucgacauggcgucccugaacauguguaugccucuuucuugcaccaagaauaacagccaucacuauaucaugguuggcaaugaaacagggcuggagcucacccugacaaacaccuccauuaucaaucauaaauucuguaaccuuucugaugcucacaagaaaaaucuguacgaccaugcccucaugagcauuaucuccacguuucaccugagcauuccgaacuucaaucaguaugaggccaugucuugcgauuuuaacggaggcaagaucuccgugcaguacaaucugagccacaccuaugcuauugacgccgcuaaccauuguggcacaaucgccaaugggguccuccaaaccuucaugcggauggcguggggaggcucuuacaucgcccuggauuccgggaagggaagcugggacugcauuaugacaucuuaccaguaucuuaucauucagaacaccacgugggaagaucacugucaguuuucccgccccagcccuaucggcuaccuggggcuccugucccaaagaacacgggacauuuauaucucucgcagacuucugggaaccuucacauggacccucagcgauuccgagggcaacgaaacccccggcggguacugccugacacgguggaugcugaucgaggcugagcucaaauguuuuggaaauacggccguggcuaagugcaacgaaaaacaugacgaggaguucugcgauaugcugcgccuuuuugacuucuguaagcaggccauuagacggcugaaaaccgaagcgcagaugagcauccagcucauuaauaaggccguuaacgcucugaucaaugaucaacuuauuaugaagaaccaucugcgcgacaucaugggcaucccuuauugcaauuacucuaaauauuguuaccucaaccacacagugaccgggaagacaucccugcccagaugcugucuggucagcaauggaucuuaccucaacgaaacccacuucagcgacgauauugagcagcaggccgacaauaugaucacggagcugcuucaaaaagaauauauggaucggcagggcaagacaccucuggggcucguggaccuguuuguguucuccaccucuuuuuaccugauuagcaucuuccuucaccucguccgcauuccgacccauagacacguuaucggaaaacccugcccuaagccccaucggcugaaccacaugggcauuuguuccugcggccuguauaaacacccuggggugcccgugaaguggaagcgcugaggacuaguaauaaggaaacuguaugaaugucugugggcaggaagugaagagauccuucuguaaagguuuuuggaauuaugucugcugaauaauaaacuuuuuugaaauaauaaaucugguagaaaaaugagaucucaaaggcucuuuucagagccaccaaaaaaaaaaaaaaaaaaaaaaaaaaaaaaaaaaaaaaaaaaaaaaaaaaaaaaaaaaaaaaaaagaauu

SEQ ID NO: 40946 - RNA, 1778 nt, Artificial Sequence
  mRNA product Design b-4 (hSL-A64-N5) comprising derived and/or modified sequence from LASV(Lassa virus/H.sapiens-wt/NGA/2018/ISTH_0959;Clade II)__AVV65099__GPCmut12 (opt5)
aggagagucccgcagucggcguccagcggcucugcuuguucgugugugugucguugcaggccuuauucaagcuuaccaugggccagaucauuaccuucuuucaagaggugccccacgucaucgaagagguuaugaacauugugcugaucgcccucagccugcuugcuauucugaaggggaucuacaauguggucacaugcggacucuucggccugguguccuuucuucugcucugugggagaucuugcagcacgaccuauaaaggaguuuacgaacugcagacacuggagcucgacauggccucccugaacauguguaugccucuuucuugcaccaagaauaacagccaucacuauaucauggugggcaaugaaacagggcuggagcucacccugacaaacaccuccauuaucaaucauaaauucuguaaccuuucugaugcgcacaagaaaaaucuguacgaccaugcucucaugagcauuaucuccacguuucaccugagcauuccgaacuucaaucaguaugaggccaugucuugcgauuuuaacggaggcaagaucuccguccaguacaaucugagccacgccuaugcuauugacgccgcuaaccauuguggcaccaucgccaauggggugcuccaaacauucaugcggauggcguggggaggcucuuacaucgcccuggauuccgggaagggaagcugggacugcauuaugaccucuuaccaguaucuuaucauucagaacacaaccugggaagaucacugucaguuuucccgccccagcccuaucggcuaccuggggcuccugucccaaagaacgcgggacauuuauaucucucgcagacuucugggaacauucaccuggacacucagcgauuccgagggcaacgaaacccccggcggguacugccugacccgguggaugcugaucgaggcugagcucaaauguuuuggaaauacagccguugcuaagugcaacgaaaaacaugacgaggaguucugcgauaugcugcgccuuuuugacuucuguaagcaggccauuagacggcugaaaacggaagcgcagaugagcauccagcucauuaauaaggccgugaacgcucugaucaaugaucaacuuauuaugaagaaccaucugcgcgacaucaugggcaucccuuauugcaauuacucuaaauauuguuaccucaaccacaccgucacagggaagaccucccugcccagaugcugucuggugagcaauggaucuuaccucaacgaaacacacuucagcgacgauauugagcagcaggccgacaauaugaucaccgagcugcuucaaaaagaauauauugaucggcagggcaagacgccucuggggcucguggaccuguuugucuucuccacaucuuuuuaccugaucagcauuuuccuucaccucguuaaaaucccgacccaucgccacgugauuggaaagcccugcccuaaaccccauagacugaaccacaugggcaucuguuccugcggccuguauaagcacccuggggugcccgucaaguggaaacggugaggacuaguaauaaggaaacuguaugaaugucugugggcaggaagugaagagauccuucuguaaagguuuuuggaauuaugucugcugaauaauaaacuuuuuugaaauaauaaaucugguagaaaaaugagaucucaaaggcucuuuucagagccaccaaaaaaaaaaaaaaaaaaaaaaaaaaaaaaaaaaaaaaaaaaaaaaaaaaaaaaaaaaaaaaaaagaauu

SEQ ID NO: 40947 - RNA, 1778 nt, Artificial Sequence
  mRNA product Design b-4 (hSL-A64-N5) comprising derived and/or modified sequence from LASV(LASV003-NIG-2008;Clade II)__AIT17580__GPCmut12 (opt5)
aggagagucccgcagucggcguccagcggcucugcuuguucgugugugugucguugcaggccuuauucaagcuuaccaugggccagaucauuaccuucuuucaagaggugccccacgucaucgaagagguuaugaacauugugcugaucgcccucagccugcuugcuauucugaaggggaucuacaauguggccacaugcggacucuucggccuggucuccuuucuucugcucugugggagaucuugcagcacgaccuauaaaggaguguacgaacugcagacacuggagcucgacauggcgucccugaacauguguaugccucuuucuugcaccaagaauaacagccaucacuauaucaugguuggcaaugaaacagggcuggagcucacccugacaaacaccuccauuaucaaucauaaauucuguaaccuuucugaugcucacaagaaaaaucuguacgaccaugcccucaugagcauuaucuccacguuucaccugagcauuccgaacuucaaucaguaugaggccaugucuugcgauuuuaacggaggcaagaucuccgugcaguacaaucugagccacaccuaugcugucgacgccgcuaaccauuguggcacaauugccaauggggugcuccaaaccuucaugcggauggcguggggaggcucuuacaucgcccuggauuccgggaagggaagcugggacugcaucaugacaucuuaccaguaucuuauuauccagaacaccacgugggaagaucacugucaguuuucccgccccagcccuauuggcuaccuggggcuccugucccaaagaacacgggacaucuauauuucucgcagacuucugggaaccuucacauggacccucagcgauuccgagagcaacgaaacccccggcggcuacugccugacacgguggaugcugaucgaggcugagcucaaauguuuugggaauacggccguugcuaagugcaacgaaaaacaugacgaggaguucugcgauaugcugcgccuuuuugacuucuguaagcaggccaucagacggcugaaagcggaagcccagaugucuauucagcucaucaauaaggcugugaacgcccugauuaaugaucaacuuaucaugaagaaccaucugcgcgacauuaugggaaucccuuauugcaauuacuccaaauauuguuaccucaaccacaccgucacaggcagaaccagccugccccggugcugucuggugucuaaugggagcuaccucaacgaaacacacuucuccgacgauaucgagcagcaggcugacaauaugauuaccgagcugcuucaaaaggaauauauggaucgccagggaaaaacgccucugggccucguggaccuguuugucuucucuaccagcuuuuaccugaucuccauuuuccuucaccucguuaagaucccgacacauagacacgugauugggaaacccugcccuaagccccaucggcugaaccacaugggaaucuguagcugcggccuguauaaacacccuggcgugcccgucaaguggaagcgcugaggacuaguaauaaggaaacuguaugaaugucugugggcaggaagugaagagauccuucuguaaagguuuuuggaauuaugucugcugaauaauaaacuuuuuugaaauaauaaaucugguagaaaaaugagaucucaaaggcucuuuucagagccaccaaaaaaaaaaaaaaaaaaaaaaaaaaaaaaaaaaaaaaaaaaaaaaaaaaaaaaaaaaaaaaaaagaauu

SEQ ID NO: 40948 - RNA, 1778 nt, Artificial Sequence
  mRNA product Design b-4 (hSL-A64-N5) comprising derived and/or modified sequence from LASV(LASV035-NIG-2009;Clade II)__AIT17588__GPCmut12 (opt5)
aggagagucccgcagucggcguccagcggcucugcuuguucgugugugugucguugcaggccuuauucaagcuuaccaugggccagaucauuaccuucuuucaagaggugccccacgucaucgaagagguuaugaacauugugcugaucgcccucagccugcuugcuauucugaaggggaucuacaauguggccacaugcggacucuucggccuggucuccuuucuucugcucugugggagaucuugcagcacgaccuauaaaggaguguacgaacugcagacacuggagcucgacauggcgucccugaacauguguaugccucuuucuugcaccaagaauaacagccaucacuauaucaugguuggcaaugaaacagggcuggagcucacccugacaaacaccuccauuaucaaucauaaauucuguaaccuuucugaugcucacaagaaaaaucuguacgaccaugcccucaugagcauuaucuccacguuucaccugagcauuccgaacuucaaucaguaugaggccaugucuugcgauuuuaacggaggcaagaucuccgugcaguacaaucugagccacgcuuaugccgucgacgcugccaaccauuguggcaccauugcgaauggggugcuccaaacauucaugcggauggccuggggaggcucuuacaucgcucuggauuccgggaagggaagcugggacugcaucaugaccucuuaccaguaucuuauuauccagaacacaaccugggaagaucacugucaguuuucccgccccagcccuauuggcuaccuggggcuccugucccaaagaacgcgggacaucuauauuucucgcagacuucugggaacauucaccuggacacucagcgauuccgagggcaacgaaacccccggcggguacugccugacccgguggaugcugaucgaggccgagcucaaauguuuuggaaauacagcuguugccaagugcaacgaaaaacaugacgaggaguucugcgauaugcugcgccuuuuugacuucuguaagcaggcgaucagacggcugaaagccgaagcucagaugagcauucagcucaucaauaaggccgugaacgcucugauuaaugaucaacuuaucaugaagaaccaucugcgcgacauuaugggcaucccuuauugcaauuacucuaaauauuguuaccucaaccacacggucaccgggaagacaucccugcccagaugcugucuggugagcaauggaucuuaccucaacgaaacccacuucagcgacgauaucgagcagcaggccgacaauaugauuacagagcugcuucaaaaagaauauaucgaucggcagggcaagaccccucuggggcucguggaccuguuugucuucuccacgucuuuuuaccugauuagcaucuuccuucaccucguuaaaauuccgacacaucgccacgugaucggaaagcccugcccuaaaccccauagacugaaccacaugggcauuuguuccugcggccuguauaagcacccuggggugcccgucaaguggaaacggugaggacuaguaauaaggaaacuguaugaaugucugugggcaggaagugaagagauccuucuguaaagguuuuuggaauuaugucugcugaauaauaaacuuuuuugaaauaauaaaucugguagaaaaaugagaucucaaaggcucuuuucagagccaccaaaaaaaaaaaaaaaaaaaaaaaaaaaaaaaaaaaaaaaaaaaaaaaaaaaaaaaaaaaaaaaaagaauu

SEQ ID NO: 40949 - RNA, 1778 nt, Artificial Sequence
  mRNA product Design b-4 (hSL-A64-N5) comprising derived and/or modified sequence from LASV(LASV1000-NIG-2009;Clade II)__AIT17782__GPCmut12 (opt5)
aggagagucccgcagucggcguccagcggcucugcuuguucgugugugugucguugcaggccuuauucaagcuuaccaugggccagaucauuaccuucuuucaagaggugccccacgucaucgaagagguuaugaacauugugcugaucgcccucagccugcuugcuauucugaaggggaucuacaauguggccacaugcggacucuucggccuggucuccuuucuucugcucugugggagaucuugcagcacgaccuauaaaggaguguacgaacugcagacacuggagcucgacauggcgucccugaacauguguaugccucuuucuugcaccaagaauaacagccaucacuauaucaugguuggcaaugaaacagggcuggagcucacccugacaaacaccuccauuaucaaucauaaauucuguaaccuuucugaugcucacaagaaaaaucuguacgaccaugcccucaugagcauuaucuccacguuucaccugagcauuccgaacuucaaucaguaugaggccaugucuugcgauuuuaacggaggcaagaucuccgugcaguacaaucugagccacaccuaugcugucgacgccgcuaaccauuguggcacaauugccaauggggugcuccaaaccuucaugcggauggcguggggaggcucuuacaucgcccuggauuccgggaagggaagcugggacugcaucaugacaucuuaccaguaucuuauuauccagaacaccacgugggaagaucacugucaguuuucccgccccagcccuauuggcuaccuggggcuccugucccaaagaacacgggacaucuauauuucucgcagacuucugggaaccuucacauggacccucagcgauuccgagggcaacgaaacccccggcggguacugccugacacgguggaugcugaucgaggcugagcucaaauguuuuggaaauacggccguugcuaagugcaacgaaaaacaugacgaggaguucugcgauaugcugcgccuuuuugacuucuguaagcaggccaucaaaagacugaagaccgaagcgcagaugagcauucagcucaucaauaaggccgugaacgcucugauuaaugaucaacuuaucaugaaaaaccaucugcgggacauuaugggcaucccuuauugcaauuacucuaaguauuguuaccucaaccacacagucaccgggaaaacaucccugccccgcugcugucuggugagcaauggaucuuaccucaacgaaacccacuucagcgacgauaucgagcagcaggccgacaauaugauuacggagcugcuucaaaaggaauauaucgauagacagggcaaaacaccucuggggcucguggaccuguuugucuucuccaccucuuuuuaccugauuagcaucuuccuucaccucguuaagauuccgacccaucggcacguggugggaaaacccugcccuaagccccaucgccugaaccacaugggcaucuguuccugcggccuguauaagcacccugggguccccgugaaauggaagagaugaggacuaguaauaaggaaacuguaugaaugucugugggcaggaagugaagagauccuucuguaaagguuuuuggaauuaugucugcugaauaauaaacuuuuuugaaauaauaaaucugguagaaaaaugagaucucaaaggcucuuuucagagccaccaaaaaaaaaaaaaaaaaaaaaaaaaaaaaaaaaaaaaaaaaaaaaaaaaaaaaaaaaaaaaaaaagaauu

SEQ ID NO: 40950 - RNA, 1778 nt, Artificial Sequence
  mRNA product Design b-4 (hSL-A64-N5) comprising derived and/or modified sequence from LASV(LASV221-NIG-2010;Clade II)__AIT17624__GPCmut12 (opt5)
aggagagucccgcagucggcguccagcggcucugcuuguucgugugugugucguugcaggccuuauucaagcuuaccaugggccagaucauuaccuucuuucaagaggugccccacgucaucgaagagguuaugaacauugugcugaucgcccucagccugcuugcuauucugaaggggaucuacaauguggccacaugcggacucuucggccuggucuccuuucuucugcucugugggagaucuugcagcacgaccuauaaaggaguguacgaacugcagacacuggagcucgacauggcgucccugaacauguguaugccucuuucuugcaccaagaauaacagccaucacuauaucaugguuggcaaugaaacagggcuggagcucacccugacaaacaccuccauuaucaaucauaaauucuguaaccuuucugaugcucacaagaaaaaucuguacgaccaugcccucaugagcauuaucuccacguuucaccugagcauuccgaacuucaaucaguaugaggccaugucuugcgauuuuaacggaggcaagaucuccgugcaguacaaucugagccacaccuaugcuauugacgccgcuaaccauuguggcacaaucgccaaugggguccuccaaaccuucaugcggauggcguggggaggcucuuacaucgcccuggauuccgggaagggaagcugggacugcauuaugacaucuuaccaguaucuuaucauucagaacaccacgugggaagaucacugucaguuuucccgccccagcccuaucggcuaccuggggcuccugucccaaagaacacgggacauuuauaucucucgcagacuucugggaaccuucacauggacccucagcgauuccgagggcaacgaaacccccggcggguacugccugacacgguggaugcugaucgaggcugagcucaaauguuuuggaaauacggccguggcuaagugcaacgaaaaacaugacgaggaguucugcgauaugcugcgccuuuuugacuucuguaagcaggccauuagacggcugaaaaccgaagcgcagaugagcauccagcucauuaauaaggccguuaacgcucugaucaaugaucaacuuauuaugaagaaccaucugcgcgacaucaugggcaucccuuauugcaauuacucuaaauauuguuaccucaaccacacagugaccgggaagacaucccugcccagaugcugucuggucagcaauggaucuuaccucaacgaaacccacuucagcgacgauauugagcagcaggccgacaauaugaucacggagaugcugcaaaaagaauauauggaucggcagggcaagacaccucuugggcugguggaccucuuuguguucuccaccucuuuuuaccugauuagcaucuuccugcaccuugucaaaauuccgacccaucgccacguuaucggaaagcccugcccuaaaccccauagacucaaccacaugggcauuuguuccugcggccuguauaagcacccuggggugcccgugaaguggaaacggugaggacuaguaauaaggaaacuguaugaaugucugugggcaggaagugaagagauccuucuguaaagguuuuuggaauuaugucugcugaauaauaaacuuuuuugaaauaauaaaucugguagaaaaaugagaucucaaaggcucuuuucagagccaccaaaaaaaaaaaaaaaaaaaaaaaaaaaaaaaaaaaaaaaaaaaaaaaaaaaaaaaaaaaaaaaaagaauu

SEQ ID NO: 40951 - RNA, 1778 nt, Artificial Sequence
  mRNA product Design b-4 (hSL-A64-N5) comprising derived and/or modified sequence from LASV(LASV237-NIG-2010;Clade II)__AIT17638__GPCmut12 (opt5)
aggagagucccgcagucggcguccagcggcucugcuuguucgugugugugucguugcaggccuuauucaagcuuaccaugggccagaucauuaccuucuuucaagaggugccccacgucaucgaagagguuaugaacauugugcugaucgcccucagccugcuugcuauucugaaggggaucuacaauguggccacaugcggacucuucggccuggucuccuuucuucugcucugugggagaucuugcagcacgaccuauaaaggaguguacgaacugcagacacuggagcucgacauggcgucccugaacauguguaugccucuuucuugcaccaagaauaacagccaucacuauaucaugguuggcaaugaaacagggcuggagcucacccugacaaacaccuccauuaucaaucauaaauucuguaaccuuucugaugcucacaagaaagaccuguacgaucaugcccucaugagcauuaucuccacguuucaccugagcauuccgaauuucaaccaguaugaggccaugucuugcgacuuuaauggaggcaagaucuccgugcaguacaaccugagccacaccuaugcugucgaugccgcuaaucauuguggcacaauugccaacggggugcuccaaaccuucaugcggauggcguggggaggcucuuacaucgcccuggacuccgggaagggaagcugggauugcaucaugacaucuuaccaguaucuuauuauccagaauaccacgugggaagaccacugucaguuuucccgccccagcccuauuggcuaccuggggcuccugucccaaagaacacgggauaucuauauuucucgcagacuucugggaaccuucacauggacccucagcgacuccgagggcaacgaaacccccggcggguacugccugacacgguggaugcugaucgaggcugagcucaaauguuuuggaaacacggccguugcuaagugcaaugaaaaacaugaugaggaguucugcgacaugcugcgccuuuuugauuucuguaagcaggccaucagacggcugaaaaccgaagcgcagaugagcauucagcucaucaacaaggccgugaaugcucugauuaacgaccaacuuaucaugaagaaucaucugcgcgacauuaugggcaucccuuauugcaacuacucuaaauauuguuaccucaaucacacagucaccgggaagacaucccugcccagaugcugucuggugagcaacggaucuuaccucaaugaaacccacuucagcgaugacaucgagcagcaggccgauaacaugauuacggagcugcuucaaaaagaauauauggaccggcagggcaagacaccucuggggcucguggaucuguuugucuucuccaccucuuuuuaccugaucagcauuuuccuucaccucaucaaaauuccgacccaucgccacaucacaggaaagcccugcccuaaaccccauagacugaaucacaugggcauuuguuccugcggccuguauaagcacccugggguucccgugaaguggaaacggugaggacuaguaauaaggaaacuguaugaaugucugugggcaggaagugaagagauccuucuguaaagguuuuuggaauuaugucugcugaauaauaaacuuuuuugaaauaauaaaucugguagaaaaaugagaucucaaaggcucuuuucagagccaccaaaaaaaaaaaaaaaaaaaaaaaaaaaaaaaaaaaaaaaaaaaaaaaaaaaaaaaaaaaaaaaaagaauu

SEQ ID NO: 40952 - RNA, 1778 nt, Artificial Sequence
  mRNA product Design b-4 (hSL-A64-N5) comprising derived and/or modified sequence from LASV(LASV253-NIG-2011;Clade II)__AIT17670__GPCmut12 (opt5)
aggagagucccgcagucggcguccagcggcucugcuuguucgugugugugucguugcaggccuuauucaagcuuaccaugggccagaucauuaccuucuuucaagaggugccccacgucaucgaagagguuaugaacauugugcugaucgcccucagccugcuugcuauucugaaggggaucuacaauguggccacaugcggacucuucggccuggucuccuuucuucugcucugugggagaucuugcagcacgaccuauaaaggaguguacgaacugcagacacuggagcucgacauggcgucccugaacauguguaugccucuuucuugcaccaagaauaacagccaucacuauaucaugguuggcaaugaaacagggcuggagcucacccugacaaacaccuccauuaucaaucauaaauucuguaaccuuucugaugcucacaagaaaaaucuguacgaccaugcccucaugagcauuaucuccacguuucaccugagcauuccgaacuucaaucaguaugaggccaugucuugcgauuuuaacggaggcaagaucuccgugcaguacaaucugagccacaccuaugcugucgacgccgcuaaccauuguggcacaauugccaauggggugcuccaaaccuucaugcggauggcguggggaggcucuuacaucgcccuggauuccgggaagggaagcugggacugcaucaugacaucuuaccaguaucuuauuauccagaacaccacgugggaagaucacugucaguuuucccgccccagcccuauuggcuaccuggggcuccugucccaaagaacacgggacaucuauauuucucgcagacuucugggaaccuucacauggacccucagcgauuccgagggcaacgaaacccccggcggguacugccugacacgguggaugcugaucgaggcugagcucaaauguuuuggaaauacggccguugcuaagugcaacgaaaaacaugacgaggaguucugcgauaugcugcgccuuuuugacuucuguaagcaggccaucagacggcugaaagcggaagcccagaugagcauucagcucaucaauaaggcugugaacgcccugauuaaugaucaacuuaucaugaagaaccaucugcgcgacauuaugggcaucccuuauugcaauuacucuaaauauuguuaccucaaccacaccgucacagggagaaccucccugccccggugcugucuggugagcaauggaucuuaccucaacgaaacacacuucagcgacgauaucgagcagcaggcugacaauaugauuaccgagcugcuucaaaaggaauauaucgaucgccagggcaaaacgccucuggggcucguggaccuguuugucuucuccacaucuuuuuaccugauuagcaucuuccuucaccucguuaagauuccgacccauagacacaucauuggaaaacccugcccuaagccccaucggcugaaccacaugggcaucuguuccugcggccuguauaaacacccuggggugcccgugaaguggaagcgcugaggacuaguaauaaggaaacuguaugaaugucugugggcaggaagugaagagauccuucuguaaagguuuuuggaauuaugucugcugaauaauaaacuuuuuugaaauaauaaaucugguagaaaaaugagaucucaaaggcucuuuucagagccaccaaaaaaaaaaaaaaaaaaaaaaaaaaaaaaaaaaaaaaaaaaaaaaaaaaaaaaaaaaaaaaaaagaauu

SEQ ID NO: 40953 - RNA, 1778 nt, Artificial Sequence
  mRNA product Design b-4 (hSL-A64-N5) comprising derived and/or modified sequence from LASV(LASV254-NIG-2011;Clade II)__AIT17674__GPCmut12 (opt5)
aggagagucccgcagucggcguccagcggcucugcuuguucgugugugugucguugcaggccuuauucaagcuuaccaugggccagaucauuaccuucuuucaagaggugccccacgucaucgaagagguuaugaacauugugcugaucgcccucagccugcuugcuauucugaaggggaucuacaauguggccacaugcggacucuucggccuggucuccuuucuucugcucugugggagaucuugcagcacgaccuauaaaggaguguacgaacugcagacacuggagcucgacaugaccaaccugaauauguguaugccucuuuccugcacaaagaacaauucucaucacuauaucaugguuggcaacgaaaccgggcuggagcucacacugaccaauacgagcauuaucaaccauaaauucuguaaucuuuccgaugcgcacaagaaaaaccuguacaaucaugcucucaugucuauuaucagcaccuuucaccuguccauuccgaacuucaaucaguaugaggccaugagcugcgacuuuaacggaggcaagaucucugugcaguacaaucugucccacagcuaugccgucgaugcugccaaccauuguggcacaauugcuaacggggugcuccaaaccuucaugcggauggccuggggaggcucuuacaucgcgcuggacuccgggaagggaaauugggauugcaucaugacaagcuaccaguaucuuauuauccagaacaccacgugggaagaccacugucaguuuucucgccccuccccuauuggcuaccuggggcuccugagccaaagaacacgggauaucuauauuucccgcagacuucugggaaccuucacauggacccucucugacagcgagggcaaugaaacccccggcggguacugccugacacgguggaugcugaucgaggccgagcucaaauguuuuggaaacacggcuguugccaagugcaaugaaaaacaugaugaggaguucugcgacaugcugcgccuuuuugauuucuguaagcaggcuaucagacggcugaaaaccgaagcccaggcgaacauucagcucaucaauaaggccgugaacgcucugauuaaugaccaacuuaucaugaagaaccaucugcgcgauauuaugggcaucccuuauugcaauuacuccaaauauuguuaccucaaccacacagucaccgggaagacaagccugcccagaugcugucuggugucuaauggauccuaccucaacgaaacccacuucagcgacgacaucgagcagcaggccgauaauaugauuacggagcugcuucaaaaagaauauauggaccggcagggcaagacaccucuggggcucguggaucuguuugucuucucuaccagcuuuuaccugaucuccauuuuccuucaccucguuaaaaucccgacccaucgccacgugauuggaaagcccugcccuaaaccccauagacugaaccacaugggcaucuguucuugcggccuguauaagcacccuggggugcccgucaaguggaaacggugaggacuaguaauaaggaaacuguaugaaugucugugggcaggaagugaagagauccuucuguaaagguuuuuggaauuaugucugcugaauaauaaacuuuuuugaaauaauaaaucugguagaaaaaugagaucucaaaggcucuuuucagagccaccaaaaaaaaaaaaaaaaaaaaaaaaaaaaaaaaaaaaaaaaaaaaaaaaaaaaaaaaaaaaaaaaagaauu

SEQ ID NO: 40954 - RNA, 1778 nt, Artificial Sequence
  mRNA product Design b-4 (hSL-A64-N5) comprising derived and/or modified sequence from LASV(Nig08-A19;Clade III)__ADU56618__GPCmut12 (opt5)
aggagagucccgcagucggcguccagcggcucugcuuguucgugugugugucguugcaggccuuauucaagcuuaccaugggccagaucgugaccuucuuucaagaggucccccacguuauugaagaggugaugaacaucgugcugauugcccucagcauccuggcuauucuuaaggggcuguacaauaucgccacaugcggacucaucggccuggucacguuccuucugcucuccgggagaucuuguagcaugaccuauaaaggaguguacgaacugcagacacuggagcucaacaugaauacccugaacaugugcaugccucuuuccuguacaaagaauaacucucaucacuauauuaugguuggcaaugaaaccgggcuggagcucacacugaccaacacgagccuucugcaucacaaauuuugcaaucucuccgacgcgcauaagaaaaaccuguacgaucacacccugaugucuaucauuagcacauuccaccucuccaucccgaauuuuaaccaguaugaggcuaugagcugugacuucaauggaggcaagauuaccgugcaguacaaccugucucauuccuaugccaucgaugccgcuaaucacugcggcacagucgccaacggggugcuucaaaccuuuaugcggauggcuuggggaggcagcuacauugcccuggacucugggcgcggaaagugggauuguaucaugacguccuaccaguaucucaucauucagaacacaaccugggaagaccauugccaguucagcagacccucuccuaucggcuaccuggggcuucugucccaacggacacgcgauauuuauaucagcagacggcuccugggaaccuuuaccuggacacuguccgacucugagggcaaugaaacgcccggcggguacugucucacccgcuggaugcugauugaggcggagcuuaaaugcuucggaaacacagccguugcuaaguguaaugaaaaacacgaugaggaauuuugcgacaugcugagacucuucgauuuuugcaagcaggccauccggcgccugaaagcugaggcccagaugagcauccagcuuauuaacaaggcggugaaugcccugaucaacgaccaacucauuaugaagaaucaccugagagauaucaugggcauuccuuauuguaacuacuccaaauauugcuaccugaaucauaccagcacagggcggaccucucucccccgcuguugccuggucuccaacggaagcuaccuuaaugaaacgcacuucucugacgacaucgagcagcaggcugauaacaugaucacagagaugcugcaaaaggaauaucucgacagacagggcaaaaccccucuggggcugguggaucuuuucguguuuagcaccuccuucuaccucauuucuaucuuucugcaucuggucaagauuccgacacaccggcauaucguuggaaaacccuguccuaagccccaccgccucaaucacaugggcauuugcagcuguggccuguauaaacagccuggggugcccgugagauggaagcggugaggacuaguaauaaggaaacuguaugaaugucugugggcaggaagugaagagauccuucuguaaagguuuuuggaauuaugucugcugaauaauaaacuuuuuugaaauaauaaaucugguagaaaaaugagaucucaaaggcucuuuucagagccaccaaaaaaaaaaaaaaaaaaaaaaaaaaaaaaaaaaaaaaaaaaaaaaaaaaaaaaaaaaaaaaaaagaauu

SEQ ID NO: 40955 - RNA, 1781 nt, Artificial Sequence
  mRNA product Design b-4 (hSL-A64-N5) comprising derived and/or modified sequence from LASV(G1180-SLE-2010;Clade IV)__AIT17168__GPCmut12 (opt5)
aggagagucccgcagucggcguccagcggcucugcuuguucgugugugugucguugcaggccuuauucaagcuuaccaugggccagaucgugaccuucuuucaagaggucccccacguuauugaagaggugaugaacaucgugcugauugcccucagcauccuggcuguccuuaaggggcuguacaauuucgccacaugcggacucgugggccugcuuacguuucugcuccugugugggagauccugcaccgcgucucgguauaaaggaguuuacgaacugcagacacucgagcugaacauggaaacccuuaauauguguaugccucugagcugcacaaagaacaauucccaucacuauauuauggugggcaacgagaccgggcucgagcugacacuuaccaauacgucuaucaucaaccauaaauucuguaaucugagcgacgcucacaagaaaaaccucuacgaucaugcccugauguccauuaucucuaccuuucaccugagcauuccgaauuucaaccaguaugaagccauguccugcgacuuuaauggaggcaagaucagcguccaguacaaccucucucacuccuaugcuggcgaugccgcuaaucauugugggacaguggccaacggaguucugcaaaccuucaugcgcauggcguggggcgggagcuacauugcccuugacucuggacacggcuccugggauugcaucaugacaagcuaccaguaucugauuauccagaacaccacgugggaggaccauugucaguuuucuagacccuccccuaucggguaccucggacugcuuagccaacggacacgcgauauuuauaucuccagacggcugcucggcaccuucacauggacccugucugacagcgaaggcaaggauacccccgggggauacugccugacacgcuggaugcucauugaggcugagcugaaauguuuuggcaauacggccguggcuaagugcaacgaaaaacacgacgaggaguucugcgauaugcuuagacuguuugacuucuguaagcaggccauccagcggcucaaagcggaagcccagauguccauucaacugaucaauaaggcugucaacgcccuuaucaaugaucagcugauuaugaagaaccaccuccgcgacaucauggggauuccuuauugcaauuacagcaaauauuguuaccugaaccauaccacaaccggaaagacaucucugcccaaaugcugucucguguccaauggcagcuaccugaacgaaacccacuucucugacgauaucgagcagcaagcugacaauaugauuacggagaugcuucagaaggaauauauggagagacaggggaaaacaccucugggacucguggaucuguuugucuucagcaccuccuuuuaccugaucucuaucuuccuucaucucguuaagauuccgacccaccggcauaucgugggcaaaagcugccccaagccucaccgccugaaccacaugggcauuuguuccugcgggcuguauaagcagcccggagugccugucaaauggaagagaugaggacuaguaauaaggaaacuguaugaaugucugugggcaggaagugaagagauccuucuguaaagguuuuuggaauuaugucugcugaauaauaaacuuuuuugaaauaauaaaucugguagaaaaaugagaucucaaaggcucuuuucagagccaccaaaaaaaaaaaaaaaaaaaaaaaaaaaaaaaaaaaaaaaaaaaaaaaaaaaaaaaaaaaaaaaaagaauu

SEQ ID NO: 40956 - RNA, 1781 nt, Artificial Sequence
  mRNA product Design b-4 (hSL-A64-N5) comprising derived and/or modified sequence from LASV(G1442-SLE-2011;Clade IV)__AIT17180__GPCmut12 (opt5)
aggagagucccgcagucggcguccagcggcucugcuuguucgugugugugucguugcaggccuuauucaagcuuaccaugggccagaucgugaccuucuuucaagaggucccccacguuauugaagaggugaugaacaucgugcugauugcccucagcauccuggcuguccuuaaggggcuguacaauguggccacaugcggacucauuggccugguuacguuccuucugcucugugggagauccugcaccacaacccuguauaaaggaguguacgaacugcagacacucgagcugaacauggaaacccuuaauauguguaugccucugucuugcacaaagaacaauagccaucacuauauccgggucggcaacgagaccgggcucgagcugacgcuuaccaauacauccaucauuaaccauaaauuuuguaaucugucugacgcgcacaagaaaaaccucuacgaucaugcucugaugagcaucauuuccaccuuccaccugucuaucccgaauuuuaaccaguaugaagccaugagcugcgacuucaauggaggcaagauuuccgugcaguacaaccucagccacucuuaugccggcgaugcugccaaucauugugggacaguugcuaacggagugcugcaaaccuuuaugcgcauggccuggggcggguccuacaucgcgcuugacagcggaagaggcaacugggauugcauuaugacgucuuaccaguaucugaucauccagaauacaaccugggacgaucacugucaguucucccggcccagcccuauuggguaccucggacugcuuucucaacgcacaagagacgucuauaucucccggcgccugcucggcaccuuuaccuggacacugagcgauuccgagggcaaggacacgcccgggggauacugccugaccagauggaugcucauugaagccgagcugaaauguuucggcaacacagcuguggccaagugcaaugagaaacaugaugaagaguuuugcgacaugcuucggcuguucgauuuuuguaagcaggcuauccagcgccucaaagccgaagcgcagaugucuauucaacugaucaacaaggccgugaaugcucuuaucaacgaccagcugauuaugaagaaucaccucagagacaucauggggauuccuuauugcaacuacagcaaauauuguuaccugaauaacaccgccacaggaaagaccucccugcccaaaugcugucucaucagcaauggcucuuaccugaacgagacgcacuucuccgaugacauugaacaggaggcugauaauaugaucacagagaugcuucaaaaggaauauauggagcggcaggggaaaaccccucugggacucgucgaccuguucguuuuuagcaccucuuucuaccugaucagcauuuuucuucaucucgugaagaucccgacacaccgccauauugugggcaaauccugccccaagccucacagacugaaccauaugggcaucuguucuugcgggcuguauaagcagcccggagucccugugcgguggaaacgcugaggacuaguaauaaggaaacuguaugaaugucugugggcaggaagugaagagauccuucuguaaagguuuuuggaauuaugucugcugaauaauaaacuuuuuugaaauaauaaaucugguagaaaaaugagaucucaaaggcucuuuucagagccaccaaaaaaaaaaaaaaaaaaaaaaaaaaaaaaaaaaaaaaaaaaaaaaaaaaaaaaaaaaaaaaaaagaauu

SEQ ID NO: 40957 - RNA, 1781 nt, Artificial Sequence
  mRNA product Design b-4 (hSL-A64-N5) comprising derived and/or modified sequence from LASV(G3010-SLE-2013;Clade IV)__AIT17344__GPCmut12 (opt5)
aggagagucccgcagucggcguccagcggcucugcuuguucgugugugugucguugcaggccuuauucaagcuuaccaugggccagaucgugaccuucuuucaagaggucccccacguuauugaagaggugaugaacaucgugcugauugcccucagcauccuggcuguccuuaaggggcuguacaauuucgccacaugcggacucgugggccugguuacguuucuucugcucugugggagauccugcaccacaucucuguauaaaggaguguacgaacugcagacccucgagcugaacauggaaacacuuaauauguguaugccucugagcugcaccaagaacaauucccaucacuauauuauggucggcaacgagacagggcucgagcugacccuuacgaauaccucuaucaucaaccauaaauucuguaaucugagcgacgcgcacaagaaaaaccucuacaaucaugcucugauguccauuaucucuacauuucaccugagcauuccgaacuucaaucaguaugaagccauguccugcgauuuuaacggaggcaagaucagcgugcaguacaaucucucucacuccuaugccggcgacgcugccagccauugugggaccguugcuaacggagugcugcaaacauucaugcggauggccuggggcgggucuuacauugcgcuugauuccggauacggcaagugggacugcaucaugaccagcuaucaguaccugauuauccagaacacgacaugggaggaucacugucaguuuucucgccccuccccuaucggguaucucggacugcuuagccaaagaacccgggacauuuacaucucccgcagacugcucggcacauucaccuggacccugucugauagcgaaggcaaagacacacccgggggauauugccugacgcgguggaugcucauugaggccgagcugaaguguuuuggcaauaccgcugucgccaaaugcaacgaaaagcaugaugaggaguucugcgacaugcuucgccuguuugauuucuguaaacaggcuauccagagacucaagacagaagcccagauguccauucaacugaucaauaaggcggugaacgcccuuaucaaugaccagcugauuaugaaaaaccaccuccgggauaucauggggauuccuuacugcaauuauagcaaguacuguuaccugaaccacaccacaaccggaaaaacgucucugcccaagugcugucucguguccaauggcagcuaucugaacgaaacacauuucucugacgacaucgagcagcaagcugauaauaugauuaccgagaugcuucagaaagaauacauggagcgccaggggaagaccccucugggacucgucgaccuguuuguuuucagcacauccuuuuaucugaucucuaucuuccuucaccucgugaaaauuccgacccauagacacaucgugggcaagagcugccccaagccucaucggcugaaccacaugggcauuuguuccugcgggcuguacaaacagcccggagucccugugcgcuggaagagaugaggacuaguaauaaggaaacuguaugaaugucugugggcaggaagugaagagauccuucuguaaagguuuuuggaauuaugucugcugaauaauaaacuuuuuugaaauaauaaaucugguagaaaaaugagaucucaaaggcucuuuucagagccaccaaaaaaaaaaaaaaaaaaaaaaaaaaaaaaaaaaaaaaaaaaaaaaaaaaaaaaaaaaaaaaaaagaauu

SEQ ID NO: 40958 - RNA, 1781 nt, Artificial Sequence
  mRNA product Design b-4 (hSL-A64-N5) comprising derived and/or modified sequence from LASV(G502-SLE-2009;Clade IV)__AIT17126__GPCmut12 (opt5)
aggagagucccgcagucggcguccagcggcucugcuuguucgugugugugucguugcaggccuuauucaagcuuaccaugggccagaucgugaccuucuuucaagaggucccccacguuauugaagaggugaugaacaucgugcugauugcccucagcauccuggcuguccuuaaggggcuguacaauuucgccacaugcggacucgugggccugcuuacguuucugcuccugugugggagauccugcaccacaggacuguauaaaggcguuuacgaacuccagacccuggagcuuaacauggaaacacugaauauguguaugccucucucuugcaccaagaacaauagccaucacuauauuaugguggggaacgagacaggacuggagcuuacccugacgaauaccuccaucaucaaccauaaauucuguaaucucucugacgcgcacaagaaaaaccuguacgaucaugcucugaugagcauuaucuccacauuucaccucucuauuccgaauuucaaccaguaugaagccaugagcugcgacuuuaauggcggcaagaucuccguccaguacaaccugagccacucuuaugccggggaugcugccgaccauuguggaaccguggcuaauggcguucuucaaacauucaugcggauggccuggggaggguccuacauugcgcuggauagcggccgcgggagaugggacugcaucaugaccucuuaccaguaucucauuauccagaacacgacaugggaggaucacugucaguuuucccggcccagcccuaucggauaccugggccuucugucucaacgcaccagagacauuuauaucucccggcgccuccugggcacauucaccuggacccugagcgauuccgaagggaaggacacacccggaggcuacugccucacgagauggaugcugauugaggccgagcuuaaauguuuugggaacaccgcuguggccaagugcaaugaaaaacaugaugaggaguucugcgacaugcugcggcucuuugauuucuguaagcaggcuauccagcgccugaaagccgaagcgcagaugucuauucaacuuaucaacaaggccgucaaugcucugaucaacgaccagcucgugaugaagaaucaccugagagacauuaugggaaucccuuauugcaacuacagccgguauuguuaccugaaucacacaaccacaggccgcaccucccuccccaaaugcugucuggugagcaacgggucuuaccuuaaugaaacgcauuucuccgaugacauugagcagcaagccgauaacaugaucacagagaugcugcagaaggaauauauggagagacagggaaaaaccccucucggccuggucgaccuguuuguuuucagcaccucuuuuuaccuuauuagcaucuuccuccaccuggugaagaucccgacacaucggcacauugugggcaaauccugccccaagccucaucgccugaaucacauggggaucuguucuugcggacucuauaaacagcccggcgucccugugaaguggaagagaugaggacuaguaauaaggaaacuguaugaaugucugugggcaggaagugaagagauccuucuguaaagguuuuuggaauuaugucugcugaauaauaaacuuuuuugaaauaauaaaucugguagaaaaaugagaucucaaaggcucuuuucagagccaccaaaaaaaaaaaaaaaaaaaaaaaaaaaaaaaaaaaaaaaaaaaaaaaaaaaaaaaaaaaaaaaaagaauu

SEQ ID NO: 40959 - RNA, 1781 nt, Artificial Sequence
  mRNA product Design b-4 (hSL-A64-N5) comprising derived and/or modified sequence from LASV(G733-SLE-2010;Clade IV)__AIT17154__GPCmut12 (opt5)
aggagagucccgcagucggcguccagcggcucugcuuguucgugugugugucguugcaggccuuauucaagcuuaccaugggccagaucgugaccuucuuucaagaggucccccacguuauugaagaggugaugaacaucgugcugauugcccucagcauccuggcuguccuuaaggggcuguacaauuucgccacaugcggaauugugggccucguuuccuuucugcuucugugugggagaucuugcacgaccagccucuauaaaggaguguacgaacugcagacacuggagcucaacauggaaacccugaauauguguaugccucuuuccugcacaaagaacaauucucaucacuauaucauggucggcaacgagaccgggcuggagcucacacugaccaauacgagcaucauuaaccauaaauucuguaaucuuuccgacgcgcacaagaaaaaccuguacgaucaugcucucaugucuaucauuagcaccuuucaccuguccaucccgaauuucaaccaguaugaagccaugagcugcgacuuuaauggaggcaagauuucugugcaguacaaccugucccacagcuaugccggcgaugcugccaaucauugugggacaaucgcuaacggaguucuccaaaccuucaugcggauggccuggggcgggucuuacauugcgcuggacuccggacgcgauagaugggacugcaucaugacaagcuaccaguaucuuaucauucagaacaccacgugggaggaucacugucaguuuucucggcccuccccuaucggcuaccuggggcuccugagccaacgcacaagagacauuuauaucucccggcgccuucugggaaccuucacauggacccucucugauagcgaaggcaaggacacccccggcggguacugccugacaagauggaugcugauugaggccgagcucaaauguuuuggaaauacggcuguggccaagugcaacgaaaaacaugaugaggaguucugcgacaugcugcggcuuuuugauuucuguaagcaggcuauccagcgccugaaagccgaagcgcagauguccauccaacucauuaauaaggccgucaacgcucugaucaaugaccagcuuauuaugaagaaccaccugagagacaucaugggcauuccuuauugcaauuacagcaaauauuguuaccucaaccacaccacaaccgggaagacaucucugcccaaaugcugucugguguccaauggaagcuaccucaacgaaacccauuucucugaugacaucgagcagcaagccgauaauaugaucacggagaugcugcagaaggaauauauggagcggcagggcaaaacaccucuugggcugguggaccucuuugucuucagcaccuccuuuuaccugauuucuaucuuccugcaccuuguuaagauuccgacccaucgccacguggugggaaaaagcugccccaagccucauagacucaaccacaugggcaucuguuccugcggccuguaugggcagcccggagucccugugaaguggaaacggugaggacuaguaauaaggaaacuguaugaaugucugugggcaggaagugaagagauccuucuguaaagguuuuuggaauuaugucugcugaauaauaaacuuuuuugaaauaauaaaucugguagaaaaaugagaucucaaaggcucuuuucagagccaccaaaaaaaaaaaaaaaaaaaaaaaaaaaaaaaaaaaaaaaaaaaaaaaaaaaaaaaaaaaaaaaaagaauu

SEQ ID NO: 40960 - RNA, 1781 nt, Artificial Sequence
  mRNA product Design b-4 (hSL-A64-N5) comprising derived and/or modified sequence from MOPV/LASV reassortant(IGS-1;Clade IV)__AFY05576__GPCmut12 (opt5)
aggagagucccgcagucggcguccagcggcucugcuuguucgugugugugucguugcaggccuuauucaagcuuaccaugggccagaucgugaccuucuuucaagaggucccccacguuauugaagaggugaugaacaucgugcugauugcccucagcguccuggcugugcuuaaggggcuguacaauuucgccacaugcggacucguuggccuggugacguuucuucugcucugugggagauccugcaccacaucucuguauaaaggagucuacgaacugcagacccucgagcugaacauggaaacacuuaauauguguaugccucugagcugcaccaagaacaauucccaucacuauaucauggugggcaacgagacagggcucgagcugacccuuacgaauaccucuauuaucaaccauaaauucuguaaucugagcgacgcgcacaagaaaaaccucuacgaucaugcucugauguccaucauuucuacauuucaccugagcaucccgaauuucaaccaguaugaagccauguccugcgacuuuaauggaggcaagauuagcguucaguacaaccucucucacuccuaugccggcgaugcugccaaucauugugggaccguggcuaacggaguccugcaaacauucaugcggauggccuggggcgggagcuacaucgcgcuugacucuggacgcggcaacugggauugcauuaugaccuccuaccaguaucugaucauucagaauacgacaugggaggaccacugucaguuuagcagacccucuccuaucggguaccucggacugcuuucccaacggacccgcgauaucuauauuagcagacggcugcucggcacauucaccuggacccuguccgacucugaaggcgaggauacacccgggggauacugccugacgcgcuggaugcucaucgaggccgaacugaaguguuuuggcaacaccgcuguggccaaaugcaaugagaagcaugacgaagaguucugcgauaugcuuagacuguuugacuucuguaaacaggcuauucagcggcucaaggccgaagcgcagaugagcauccaacugauuaacaaagccgugaaugcucuuaucaacgaucagcugaucaugaagaaucaccuccgcgacauuauggggaucccuuauugcaacuacuccaaguauuguuaccugaaucacacaaccacaggaagaaccagccugcccaaaugcugucucgucucuaacggcuccuaccugaaugagacgcauuucagcgacgauauugagcagcaagccgacaacaugaucacagaaaugcuucagaaggaguauauggaacggcaggggaaaaccccucugggacucguugaucuguuuguguucucuaccagcuuuuaccugauuuccaucuuccuucaccucgugaagaucccgacacaucgccacauugucggcaaaucuugccccaagccucauagacugaaucacaugggcaucuguagcugcgggcuguauaaacagcccggagugccuguuaaguggaagcggugaggacuaguaauaaggaaacuguaugaaugucugugggcaggaagugaagagauccuucuguaaagguuuuuggaauuaugucugcugaauaauaaacuuuuuugaaauaauaaaucugguagaaaaaugagaucucaaaggcucuuuucagagccaccaaaaaaaaaaaaaaaaaaaaaaaaaaaaaaaaaaaaaaaaaaaaaaaaaaaaaaaaaaaaaaaaagaauu

SEQ ID NO: 40961 - RNA, 1781 nt, Artificial Sequence
  mRNA product Design b-4 (hSL-A64-N5) comprising derived and/or modified sequence from LASV(LM765-SLE-2012;Clade IV)__AIT17814__GPCmut12 (opt5)
aggagagucccgcagucggcguccagcggcucugcuuguucgugugugugucguugcaggccuuauucaagcuuaccaugggccagaucgugaccuucuuucaagaggucccccacguuauugaagaggugaugaacaucgugcugauugcccucagcauccuggcuguccuuaaggggcuguacaauuucgccacaugcggacucgugggccugguuacguuucuucugcucugugggagauccugcaccacaucucuguauaaaggaguguacgaacugcagacccucgagcugaacauggaaacacuuaauauguguaugccucugagcugcaccaagaacaauucccaucacuauauuauggucggcaacgagacagggcucgagcugacccuuacgaauaccucuaucaucgaccauaaauucuguaaccugagcgaugcgcaccggaagaaucucuacgaccaugcucugauguccauuaucucuacauuucaccugagcauuccgaacuucaaucaguaugaagccauguccugcgauuuuaacggaggcaaaaucagcgugcaguacaaucucucucacuccuaugccaaggacgcugccgaucauuguggcaccguugcuaacggggugcugcaaacauucaugcgcauggccuggggaggcagcuacauugcgcuugacucugggagaggacggugggauugcaucaugaccuccuaccaguaucugauuauccagaauacgacaugggaggaccacugucaguuuagccgccccucuccuaucggcuaccucgggcugcuuucccaaagaacccgggauauuuauaucagccgcagacugcucggaacauucaccuggacccuguccgacucugaaggcaaggauacacccggcggguacugccugacgcgguggaugcucauugaggccgagcugaaauguuuuggaaacaccgcugucgccaagugcaacgaaaaacaugacgaggaguucugcgauaugcuucgccuguuugacuucuguaagcaggcuauccagagacucaaagccgaagcgcagaugagcauucaacugaucaauaaggccgugaacgcucuuaucaaugaccagcugauuaugaagaaccaccuccgggauaucaugggcauuccuuauugcaauuacuccaaauauuguuaccugaaccacacaaccacagggaagaccagccugcccaaaugcugucucgugucuaauggauccuaccugaacgaaacgcauuucagcgacgauaucgagcagcaagccgacaauaugauuacagagaugcuucagaaggaauauauggagcgccagggcaaaaccccucuggggcucgucgaucuguuuguuuucucuaccagcuuuuaccugaucuccaucuuccuucaccucgugaagauuccgacacauagacacaucgugggaaaacccugcccuaagccccaucggcugaaccacaugggcauuuguucuugcggccuguauaagcagccugggguccccgugaaauggaagcgcugaggacuaguaauaaggaaacuguaugaaugucugugggcaggaagugaagagauccuucuguaaagguuuuuggaauuaugucugcugaauaauaaacuuuuuugaaauaauaaaucugguagaaaaaugagaucucaaaggcucuuuucagagccaccaaaaaaaaaaaaaaaaaaaaaaaaaaaaaaaaaaaaaaaaaaaaaaaaaaaaaaaaaaaaaaaaagaauu

SEQ ID NO: 40962 - RNA, 1781 nt, Artificial Sequence
  mRNA product Design b-4 (hSL-A64-N5) comprising derived and/or modified sequence from LASV(LM776-SLE-2012;Clade IV)__AIT17824__GPCmut12 (opt5)
aggagagucccgcagucggcguccagcggcucugcuuguucgugugugugucguugcaggccuuauucaagcuuaccaugggccagaucgugaccuucuuucaagaggucccccacguuauugaagaggugaugaacaucgugcugauugcccucagcauccuggcuguccuuaaggggcuguacaauuucgccacaugcggacucgugggccugguuacguuucuucugcucugugggagauccugcaccacaucuguguauaaaggagucuacgaacugcagacccuggagcucaacauggaaacacugaauauguguaugccucuuagcugcaccaagaacaauucccaucacuauauuauggugggcaacgagacagggcuggagcucacccugacgaauaccucuaucaucaaccauaaauucuguaaucuuagcgacgcgcacaagaaaaaccuguacgaucaugcucucauguccauuaucucuacauuucaccugagcauuccgaauuucaaccaguaugaagccauguccugcgacuuuaauggaggcaagaucagcguucaguacaaccugucucacuccuaugccggcgaugcugccaaucauugugggaccguggcuaacggaguccuccaaacauucaugcggauggccuggggcgggagcuacauugcgcuggacucuggacacggcaagugggauugcaucaugaccuccuaccaguaucuuauuauccagaacacgacaugggaggaccauugucaguuuagccgccccucuccuaucggguaccugggacuccugucccaaagaacccgggauauuuauaucagccgcagacuucugggcacauucaccuggacccucuccgacucugaaggcaaagauacacccgggggauacugccugacgcgguggaugcugauugaggccgagcucaaguguuuuggcaauaccgcuguggccaaaugcaacgaaaagcacgacgaggaguucugcgauaugcugcgccuuuuugacuucuguaaacaggcuauccagagacugaaggccgaagcgcagaugagcauucaacucaucaauaaggccgugaacgcucugaucaaugaucagcuuauuaugaaaaaccaucugcgggacaucauggggauuccuuauugcaauuacuccaaguauuguuaccucaaccacacaaccacaggaaaaaccagccugcccaagugcugucuggucucuaauggcuccuaccucaacgaaacgcacuucagcgacgauaucgagcagcaagccgacaauaugauuacagagaugcugcagaaagaauauauggagcgccaggggaagaccccucuuggacugguugaucucuuuguguucucuaccagcuuuuaccugaucuccaucuuccugcaucuugugaaaauuccgacacacagacauaucgucggcaagucuugccccaagccucaccggcucaaccacaugggcauuuguagcugcgggcuguauaaacagcccggagugccuguucgcuggaagagaugaggacuaguaauaaggaaacuguaugaaugucugugggcaggaagugaagagauccuucuguaaagguuuuuggaauuaugucugcugaauaauaaacuuuuuugaaauaauaaaucugguagaaaaaugagaucucaaaggcucuuuucagagccaccaaaaaaaaaaaaaaaaaaaaaaaaaaaaaaaaaaaaaaaaaaaaaaaaaaaaaaaaaaaaaaaaagaauu

SEQ ID NO: 40963 - RNA, 1781 nt, Artificial Sequence
  mRNA product Design b-4 (hSL-A64-N5) comprising derived and/or modified sequence from LASV(Mad39;Clade IV)__ANH09722__GPCmut12 (opt5)
aggagagucccgcagucggcguccagcggcucugcuuguucgugugugugucguugcaggccuuauucaagcuuaccaugggccagaucgugaccuucuuucaagaggucccccacguuauugaagaggugaugaacaucgugcugauugcccucagcauccuggcuguccuuaaggggcuguacaauguggccacaugcggacucauuggccugguuacguuccuucugcucugugggagauccugcaccacaacccuguauaaaggaguguacgaacugcaggcgcucgagcugaacauggaaacacuuaauauguguaugccucugucuugcaccaagaacaauagccaucacuauauccgggucggcaacgagacagggcucgagcugacccuuacgaauaccucccugaucaaccauaaauuuuguaaucucucugacgcucacaagaaaaaccuguacgaucaugcccugaugagcauuaucuccacauuccaccucucuauuccgaauuuuaaccaguaugaagccaugagcugcgacuucaaugauggaaagaucuccgugcaguacaaccugagccacaccuaugcuggcgacacagccaaucauuguggcaccguugcuaacggggugcuucaaacguuuaugcgcauggccuggggaggcucuuacauugcgcuggauuccgggagaggaggcugggacugcaucaugacaagcuaccaguaucucauuauccagaacaccacaugggaggaucacugucaguucucucggcccuccccuaucggguaccugggacuucugagccaacgcaccagagacauuuauaucucucggcgccuccugggcaccuuuacauggacgcuguccgauagcgaaggcaaggacacccccgggggauacugccucacaagauggaugcugauugaggccgagcuuaaauguuucggcaauaccgcugucgccaagugcaacgaaaaacaugaugaggaauuuugcgacaugcugcgccucuucgauuuuuguaagcaggcuauccagcggcugaaagccgaggcgcagauguccauucaacuuaucaauaaggccgugaacgcucugaucaaugaccagcucauuaugaagaaccaccugagagacaucauggggauuccuuauugcaauuacucuaaauauuguuaccugaaccacacagugaccggaaagacgagccuccccaaaugcugucuggucuccaauggcagcuaccuuaacgaaacacauuucucugaugacaucgagcagcaagccgauaauaugauuaccgagaugcugcagaaggaauauauggagcggcaggggaaaaccccucucggacugguugaccuguucguguuuuccaccagcuucuaccuuaucucuaucuuucuccaccuggugaagauuccgacacaucgccacgucgugggcaaacccugcccuaagccccauagacugaaccacaugggcaucuguagcugcggguucuauaagcagccuggaguucccgugcgguggaaacgcugaggacuaguaauaaggaaacuguaugaaugucugugggcaggaagugaagagauccuucuguaaagguuuuuggaauuaugucugcugaauaauaaacuuuuuugaaauaauaaaucugguagaaaaaugagaucucaaaggcucuuuucagagccaccaaaaaaaaaaaaaaaaaaaaaaaaaaaaaaaaaaaaaaaaaaaaaaaaaaaaaaaaaaaaaaaaagaauu

SEQ ID NO: 40964 - RNA, 1781 nt, Artificial Sequence
  mRNA product Design b-4 (hSL-A64-N5) comprising derived and/or modified sequence from LASV(Z0947-SLE-2011;Clade IV)__AIT17840__GPCmut12 (opt5)
aggagagucccgcagucggcguccagcggcucugcuuguucgugugugugucguugcaggccuuauucaagcuuaccaugggccagaucgugaccuucuuucaagaggucccccacguuauugaagaggugaugaacaucgugcugauugcccucagcauccuggcuguccuuaaggggcuguacaauuucgccacaugcggacucgugggccugguuacguuucuucugcucugugggagauccugcaccauuucucuguauaaaggaguguacgaacugcagacacucgagcugaacauggaaacccuuaauauguguaugccucugagcugcacaaagaacaauucccaucacuauaucauggucggcaacgagaccgggcucgagcugacacuuaccaauacgucuaucauuaaccauaaauucuguaaucugagcgacgcgcacaagaaaaaccucuacgaucaugcucugauguccaucauuucuaccuuucaccugagcaucccgaauuucaaccaguaugaagccauguccugcgacuuuaauggaggcaagauuagcgugcaguacaaccucucucacuccuaugccggcgaugcugccaaucauugugggacaguugcuaacggagugcugcaaaccuucaugcggauggccuggggcgggagcuacaucgcgcuugacucuggacgcgauagaugggacugcauuaugacauccuaccaguaucugaucauccagaacaccacgugggaggaucacugucaguuuagccggcccucuccuauuggcuaccucgggcugcuuucccaacgcacaagagacaucuauauuagccggcgccugcucggaaccuucacauggacccuguccgauucugaaggcaaggacacccccggcggguacugccugacaagauggaugcucaucgaggccgagcugaaauguuuuggaaauacggcugucgccaagugcaacgaaaaacaugaugaggaguucugcgacaugcuucggcuguuugauuucuguaagcaggcuauucagcgccucaaagccgaagcgcagaugagcauccaacugaucaauaaggccgugaacgcucuuauuaaugaccagcugaucaugaagaaccaccucagagacauuaugggcaucccuuauugcaauuacuccaaauauuguuaccugaaccacaccacaaccgggaagacaagccugcccaaaugcugucucgugucuaauggauccuaccugaacgaaacccauuucagcgaugacauugagcagcaagccgauaauaugaucacggagaugcuucagaaggaauauauggagcggcagggcaaaacaccucuggggcucgucgaccuguuuguuuucucuaccagcuuuuaccugaucuccauuuuccuucaccucgugaagaucccgacccaucgccacauugugggaaaacccugcccuaagccccauagacugaaccacaugggcaucuguucuugcggccuguauaagcagccugggguccccgugaaauggaagcggugaggacuaguaauaaggaaacuguaugaaugucugugggcaggaagugaagagauccuucuguaaagguuuuuggaauuaugucugcugaauaauaaacuuuuuugaaauaauaaaucugguagaaaaaugagaucucaaaggcucuuuucagagccaccaaaaaaaaaaaaaaaaaaaaaaaaaaaaaaaaaaaaaaaaaaaaaaaaaaaaaaaaaaaaaaaaagaauu

SEQ ID NO: 40965 - RNA, 1812 nt, Artificial Sequence
  mRNA product Design b-4 (hSL-A100) comprising derived and/or modified sequence from LASV(Josiah;Clade IV)__NP_694870__GPCmut12 (opt1)
aggagagucccgcagucggcguccagcggcucugcuuguucgugugugugucguugcaggccuuauucaagcuuaccaugggccagaucgugaccuucuuccaggaggucccccacgugaucgaggaggugaugaacaucguccugaucgcccucagcgugcuggccgugcugaaggggcucuacaacuucgcgaccugcggccuggucgggcuggugacguuccuccugcugugcggccgcuccugcaccaccagccucuacaaggggguguacgagcugcagacccuggagcucaacauggagacgcugaacaugugcaugccgcuguccugcaccaagaacaacagccaccacuacaucauggucggcaacgagaccggccucgagcugacgcugaccaacaccuccaucaucaaccacaaguucugcaaccucagcgacgcccacaagaagaaccuguacgaccacgcccugauguccaucaucagcaccuuccaccucuccauccccaacuucaaccaguacgaggccaugagcugcgacuucaacgggggcaagaucuccgugcaguacaaccugagccacuccuacgccggggacgcggccaaccacugcggcacgguggccaacgggguccugcagaccuucaugcggauggccuggggcggcagcuacaucgcgcucgacuccgggcgcggcaacugggacugcaucaugaccagcuaccaguaccugaucauccagaacaccacgugggaggaccacugccaguucucccggcccagccccaucggguaccugggccuccugucccagcgcacccgggacaucuacaucagccgccggcugcucggcaccuucaccuggacgcugagcgacuccgaggggaaggacaccccgggcggguacugccugacccgcuggaugcucaucgaggccgagcugaagugcuucggcaacaccgccguggccaagugcaacgagaagcacgacgaggaguucugcgacaugcugcggcuguucgacuucugcaagcaggccauccagcgccugaaggcggaggcccagaugagcauccagcugaucaacaaggccgugaacgcccucaucaacgaccagcugaucaugaagaaccaccuccgggacaucauggggauccccuacugcaacuacuccaaguacugcuaccucaaccacacgaccaccggccgcaccagccugcccaagugcugccuggucuccaacggcagcuaccucaacgagacgcacuucuccgacgacaucgagcagcaggccgacaacaugaucaccgagaugcugcagaaggaguacauggagcggcaggggaagacgccccugggccucguggaccuguucguguucagcaccuccuucuaccugaucagcaucuuccugcaccucgucaagaucccgacccaccgccacaucguggggaaguccugccccaagccccaccggcugaaccacaugggcaucugcagcugcgggcuguacaagcagcccggcgugccggucaaguggaagcgcugaggacuaguaauaaggaaacuguaugaaugucugugggcaggaagugaagagauccuucuguaaagguuuuuggaauuaugucugcugaauaauaaacuuuuuugaaauaauaaaucugguagaaaaaugagaucucaaaggcucuuuucagagccaccaaaaaaaaaaaaaaaaaaaaaaaaaaaaaaaaaaaaaaaaaaaaaaaaaaaaaaaaaaaaaaaaaaaaaaaaaaaaaaaaaaaaaaaaaaaaaaaaaaaaa

SEQ ID NO: 40966 - RNA, 1809 nt, Artificial Sequence
  mRNA product Design b-4 (hSL-A100) comprising derived and/or modified sequence from LASV(LP;Clade I)__AAF86701__GPCmut12 (opt1)
aggagagucccgcagucggcguccagcggcucugcuuguucgugugugugucguugcaggccuuauucaagcuuaccaugggccagaucaucaccuucuuccaggaggugccccacgucaucgaggaggugaugaacaucgugcugaucgcccucagccugcuggccauccucaaggggcuguacaacaucgcgaccugcggcaucaucgggcuggucgccuuccucuuccugugcggcaaguccugcagccugacgcucaagggcggguacgagcugcagacccuggagcucaacauggagacccugaacaugugcaugccgcuguccugcacgaagaacagcucccaccacuacauccgcgugggcaacgagaccgggcucgagcugacccugaccaacacgagcaucaucaaccacaaguucugcaaccucuccgacgcccacaagaagaaccuguacgaccacgcccugaugagcaucaucuccaccuuccaccucagcauccccaacuucaaccaguacgaggccauguccugcgacuucaacggcgggaagaucagcgugcaguacaaccugucccacagcuacgcgggcgacgccgccgagcacugcgggaccgucgccaacggcgugcugcagaccuucaugcggauggcguggggcgggcgcuacaucgcccucgacuccggcaaggggaacugggacugcaucaugacgagcuaccaguaccugaucauccagaacaccaccugggaggaccacugccaguucucccggcccagccccaucggcuaccugggccuccugucccagcgcacccgggacaucuacaucagccgccggcugcucgggacguucaccuggacccugagcgacuccgagggcaacgagacccccgggggcuacugccugacgcgcuggaugcucaucgaggccgagcugaagugcuucgggaacaccgccguggccaagugcaacgagaagcacgacgaggaguucugcgacaugcugcggcuguucgacuucugcaagcaggcgauccgccggcugaaggccgaggcccagaugagcauccagcugaucaacaaggccgucaacgcccucaucaacgaccagcugaucaugaagaaccaccuccgcgacaucaugggcauccccuacugcaacuacuccaaguacugcuaccucaaccacaccagcuccggccggaccagccugcccaagugcugccugaucuccaacgggagcuaccucaacgagacgcaguucuccgacgacaucgagcagcaggcggacaacaugaucaccgagaugcugcagaaggaguacaucgagcgccagggcaagaccccgcuggggcucguggacaucuucaucuucagcaccuccuucuaccugaucagcaucuuccugcaccugaucaagaucccgacgcaccggcacaucgugggcaagcccugccccaagccccaccgccucaaccacaugggggucugcuccugcggccuguacaagcacccgggcgugcccaccaaguggaagcggugaggacuaguaauaaggaaacuguaugaaugucugugggcaggaagugaagagauccuucuguaaagguuuuuggaauuaugucugcugaauaauaaacuuuuuugaaauaauaaaucugguagaaaaaugagaucucaaaggcucuuuucagagccaccaaaaaaaaaaaaaaaaaaaaaaaaaaaaaaaaaaaaaaaaaaaaaaaaaaaaaaaaaaaaaaaaaaaaaaaaaaaaaaaaaaaaaaaaaaaaaaaaaaaaa

SEQ ID NO: 40967 - RNA, 1809 nt, Artificial Sequence
  mRNA product Design b-4 (hSL-A100) comprising derived and/or modified sequence from LASV(803213;Clade II)__AAF86703__GPCmut12 (opt1)
aggagagucccgcagucggcguccagcggcucugcuuguucgugugugugucguugcaggccuuauucaagcuuaccaugggccagaucaucaccuucuuccaggaggugccccacgucaucgaggaggugaugaacaucgugcugaucgcccucagccugcuggccauccucaaggggaucuacaacgucgcgaccugcggccuguucgggcugaucuccuuccuccugcugugcggccgcagcugcuccgugacguacaaggggguguacgagcuccagacccuggagcugaacauggccaaccucaacaugugcaugccgcugagcugcaccaagaacaacucccaccacuacaucauggucggcaacgagacgggccuggagcucacccugaccaacaccagcaucaucaaccacaaguucugcaaccuguccgacgcccacaagaagaaccucuacgaccacgcccugaugagcaucaucuccacguuccaccugagcauccccaacuucaaccaguacgaggccauguccugcgacuucaacgggggcaagaucagcgugcaguacaaccucucccacagcuucgcgguggacgccgccaaccacugcgggaccaucgccaacggcguccugcagaccuucaugcggauggcguggggcggguccuacaucgcccuggacagcggcaaggggaacugggacugcaucaugaccuccuaccaguaccucaucauccagaacacgaccugggaggaccacugccaguucagccgccccucccccaucggcuaccuggggcugcucagccagcggacccgcgacaucuacaucagccggcgccugcugggcaccuucacguggacccucuccgacagcgagggcaacgaggcccccgggggcuacugccugacccgguggaugcugaucgaggccgagcucaagugcuucgggaacaccgccguggcgaagugcaacgagaagcacgacgaggaguucugcgacaugcugcgccuguucgacuucugcaagcaggccaucaagcggcucaagacggaggcccagauguccauccagcugaucaacaaggccgugaacgcccugaucaacgaccagcucaucaugaagaaccaccuccgcgacaucaugggcauccccuacugcaacuacagccgguacugcuaccugaaccacaccgucaccgggaagaccucccugccccgcugcugccuggugagcaacggcuccuaccugaacgagacgcacuucagcgacgacaucgagcagcaggcggacaacaugaucaccgagaugcuccagaaggaguacauggaccggcagggcaagaccccgcuggggcugguggaccucuucgucuucuccaccagcuucuaccugaucuccaucuuccugcaccuggugaagaucccgacgcaccgccacaucgugggcaagcccugccccaagccccaccggcucaaccacauggggaucugcagcugcggccuguacaagcacccggggguccccgugaaguggaagcgcugaggacuaguaauaaggaaacuguaugaaugucugugggcaggaagugaagagauccuucuguaaagguuuuuggaauuaugucugcugaauaauaaacuuuuuugaaauaauaaaucugguagaaaaaugagaucucaaaggcucuuuucagagccaccaaaaaaaaaaaaaaaaaaaaaaaaaaaaaaaaaaaaaaaaaaaaaaaaaaaaaaaaaaaaaaaaaaaaaaaaaaaaaaaaaaaaaaaaaaaaaaaaaaaaa

SEQ ID NO: 40968 - RNA, 1809 nt, Artificial Sequence
  mRNA product Design b-4 (hSL-A100) comprising derived and/or modified sequence from LASV(GA391;Clade III)__CAA36645__GPCmut12 (opt1)
aggagagucccgcagucggcguccagcggcucugcuuguucgugugugugucguugcaggccuuauucaagcuuaccaugggccagaucgugaccuucuuccaggaggucccccacgugaucgaggaggugaugaacaucguccugaucgcccucagcauccuggccauccugaaggggcucuacaacguggcgaccugcggccugaucgggcuggugacguuccuccugcuguccggccgcagcugcucccucaucuacaaggggaccuacgagcugcagacccuggagcucaacauggagacccugaacaugugcaugccgcugagcugcaccaagaacaacucccaccacuacauccgggucggcaacgagaccggccucgagcugacccugacgaacaccagcauccucaaccacaaguucugcaaccuguccgacgcccacaagcgcaaccuguacgaccacagccucauguccaucaucagcaccuuccaccuguccauccccaacuucaaccaguacgaggccaugagcugcgacuucaacgggggcaagaucaccgugcaguacaaccugucccacagcuucgccguggacgccgcggggcacugcggcacgcucgccaacgggguccugcagaccuucaugcggauggccuggggcggcuccuacaucgcccuggacagcgggcgcggcaacugggacugcaucaugaccuccuaccaguaccucaucauccagaacaccacgugggacgaccacugccaguucagccggcccucccccaucggguaccugggccugcucagccagcgcacccgggacaucuacaucagccgccggcugcugggcaccuucaccuggacgcucuccgacagcgaggggaacgagaccccgggcggguacugccugacccgcuggaugcugaucgaggcggagcucaagugcuucggcaacaccgccguggccaagugcaacgagaagcacgacgaggaguucugcgacaugcugcggcuguucgacuucugcaagcaggccauccgccggcucaagacggaggcccagauguccauccagcugaucaacaaggcggugaacgcccugaucaacgaccagcucaucaugaagaaccaccuccgcgacaucauggggauccccuacugcaacuacagccgguacugcuaccugaaccacaccuccaccggcaagaccagccugccccgcugcugccugaucuccaacggcagcuaccugaacgagacgaaguucuccgacgacaucgagcagcaggccgacaacaugaucaccgagaugcuccagaaggaguacaucgaccggcaggggaagacgccccugggccuggucgaccuguucguguucagcaccuccuucuaccucaucagcaucuuccugcaccuggugaagaucccgacccaccgccacaucgucgggaagcccugccccaagccccaccggcucaaccacaugggcaucugcuccugcgggcuguacaagcagccgggcgugcccgugcgcuggaagcggugaggacuaguaauaaggaaacuguaugaaugucugugggcaggaagugaagagauccuucuguaaagguuuuuggaauuaugucugcugaauaauaaacuuuuuugaaauaauaaaucugguagaaaaaugagaucucaaaggcucuuuucagagccaccaaaaaaaaaaaaaaaaaaaaaaaaaaaaaaaaaaaaaaaaaaaaaaaaaaaaaaaaaaaaaaaaaaaaaaaaaaaaaaaaaaaaaaaaaaaaaaaaaaaaa

SEQ ID NO: 40969 - RNA, 1812 nt, Artificial Sequence
  mRNA product Design b-4 (hSL-A100) comprising derived and/or modified sequence from LASV(AV;Clade V)__CCA30314__GPCmut12 (opt1)
aggagagucccgcagucggcguccagcggcucugcuuguucgugugugugucguugcaggccuuauucaagcuuaccaugggccagaucgugaccuucuuccaggaggucccccacgugaucgaggaggugaugaacaucguccugaucgcccucagcauccuggccgugcugaaggggcucuacaacaucgcgaccugcggccugaucgggcugaucacguuccuccugcugugcggccgcuccugcagcuccaaccucuacaaggggguguacgagcugcagagccuggaccucaacauggagacccugaacaugugcaugccgcuguccugcaccaagaacaacagccaccacuacauccgggucggcaacgacacgggccucgagcugacccugaccaacaccuccauccucaaccacaaguucugcaaccugagcgacgcccacaagaaggaccuguacgaccacgcccucauguccaucaucagcacguuccaccuguccauccccaacuucaaccaguacgaggccaugagcugcgacuucaacgggggcaagaucuccgugcaguacaaccugagccacuccuacgccaucgacgcggccaaccacugcgggaccguggccaacggcauccuccagaccuucaugcgcauggccuggggcgggagcuacaucgcgcuggacuccggccgggggaacugggacugcaucaugaccagcuaccaguaccugaucauccagaacacgaccugggagaaccacugccaguucucccgccccagccccaucggcuaccucgggcugcugagccagcggacccgcgacaucuacaucucccggcgccuccugggcaccuucacguggacccugagcgacuccgagggcaacgccacccccgggggcuacugccucacccgguggaugcugaucgaggccgagcugaagugcuucgggaacacggccgucgccaagugcaacgagaagcacgacgaggaguucugcgacaugcuccgccuguucgacuucugcaagcaggcgaucagccggcugaaguccgaggcccagaugagcauccagcucaucaacaaggccgugaacgcccugaucaacgaccagcugaucaugaagaaccaccuccgcgacaucaugggcauccccuacugcaacuacuccaaguacugcuaccugaaccacaccaucaccgggaagaccagccugcccaagugcugccucguguccaacggcagcuaccugaacgagacgcacuucuccgacgacaucgagcagcaggccgacaacaugaucaccgagaugcugcagaaggaguacauggagcggcagggcaagaccccgcucgggcuggucgaccuguucguguucagcaccuccuucuaccugaucagcaucuuccuccgccuggugaagaucccgacgcaccggcacaucgucggcaagcccugccccaagccccaccgccugaaccacauggggaucugcuccugcggccucuacaagcagccgggggugcccgugcgguggaagcgcugaggacuaguaauaaggaaacuguaugaaugucugugggcaggaagugaagagauccuucuguaaagguuuuuggaauuaugucugcugaauaauaaacuuuuuugaaauaauaaaucugguagaaaaaugagaucucaaaggcucuuuucagagccaccaaaaaaaaaaaaaaaaaaaaaaaaaaaaaaaaaaaaaaaaaaaaaaaaaaaaaaaaaaaaaaaaaaaaaaaaaaaaaaaaaaaaaaaaaaaaaaaaaaaaa

SEQ ID NO: 40970 - RNA, 1809 nt, Artificial Sequence
  mRNA product Design b-4 (hSL-A100) comprising derived and/or modified sequence from LASV(Togo/2016/7082;Clade VI)__AMR44577__GPCmut12 (opt1)
aggagagucccgcagucggcguccagcggcucugcuuguucgugugugugucguugcaggccuuauucaagcuuaccaugggccagaucaucaccuucuuccaggaggugccccacgucaucgaggaggugaugaacaucgugcugaucgcccucagccugcuggccauccucaagggggucuacaacguggcgaccugcggcaucaucgggcuggugacguuccuguuccucugcggccgcuccugcagccugaucuacaagggguccuacgagcugcagacccucgagcugaacauggagacccugaacaugugcaugccgcucagcugcacgaagaacuccagccaccacuacauccgggucggcaacgagaccggccuggagcugacccucaccaacacguccaucaucaaccacaaguucugcaaccugagcgacgcccacaagcgcaaccuguacgaccacgcccucauguccauccugagcaccuuccaccuguccauccccaacuucaaccaguacgaggccaugagcugcgacuucaacgggggcaagaucuccgugcaguacaaccucagccacgccuacgcgguggacgccgccgagcacugcgggaccgucgccaacggcgugcugcagaccuucaugcggauggcguggggcggguccuacaucgcccuggacagcggccgcgggaacugggacugcaucaugacguccuaccaguaccucaucauccagaacaccaccugggaggaccacugccaguucagccggcccucccccaucggcuaccuggggcugcucagccagcgcacccgggacaucuacaucagccgccggcugcugggcacguucaccuggacccucuccgacagcgagggcaacgagacccccgggggcuacugccugacgcgcuggaugcugaucgaggccgagcucaagugcuucgggaacaccgccguggccaagugcaacgagaagcacgacgaggaguucugcgacaugcugcggcuguucgacuucugcaagcaggcgauccagcgccucaaguccgaggcccagaugagcauccagcugaucaacaaggccgucaacgcccugaucaacgaccagcucaucaugaagaaccaccuccgggacaugaugggcauccccuacugcaacuacuccaaguacugcuaccugaaccacaccagcuccgggcgcaccagccugcccaagugcugccugguguccaacggcagcuaccugaacgagacgcacuucuccgacgacaucgagcagcaggccgacaacaugaucaccgagaugcuccagaaggaguacaucgaccggcagggcaagaccccgcuggggcugguggaccucuucgucuucagcaccuccuucuaccugaucagcaucuuccugcaccugaucaagaucccgacgcaccgccacaucgugggcaagcccugccccaagccccaccggcucaaccacauggggaucugcuccugcggccuguacaagcagccgggggugcccacccgcuggaagcggugaggacuaguaauaaggaaacuguaugaaugucugugggcaggaagugaagagauccuucuguaaagguuuuuggaauuaugucugcugaauaauaaacuuuuuugaaauaauaaaucugguagaaaaaugagaucucaaaggcucuuuucagagccaccaaaaaaaaaaaaaaaaaaaaaaaaaaaaaaaaaaaaaaaaaaaaaaaaaaaaaaaaaaaaaaaaaaaaaaaaaaaaaaaaaaaaaaaaaaaaaaaaaaaaa

SEQ ID NO: 40971 - RNA, 1809 nt, Artificial Sequence
  mRNA product Design b-4 (hSL-A100) comprising derived and/or modified sequence from LASV(KAK-428;Clade n.d. (VII))__ANH09740__GPCmut12 (opt1)
aggagagucccgcagucggcguccagcggcucugcuuguucgugugugugucguugcaggccuuauucaagcuuaccaugggccagaucgugaccuucuuccaggaggucccccacgugaucgaggaggugaugaacaucguccugaucgcccucagccugcuggccauccucaaggggcuguacaacuucgcgaccugcggcgugaucgggcugaucacguuccuccugcugugcggccgcuccugcagcgccaccuacaaggggcaguacgagcuccagacccuggagcugaacauggagucccucaacaugugcaugccgcugagcugcacgaagaacaacucccaccacuacauccgggccggcaacaacaccggccuggagcucacccugaccaacacgagcaucaucucccacaaguucugcaaccugagcgacgcccacaagaagaaccucuacgaccacacccugauguccaucaucaccaccuuccaccugagcauccccaacuucaaccaguacgaggccauguccugcgacuucaacgggggcaagaucagcauccaguacaaccucucccacagcuacgcgggggacgccgcccagcacugcggcacgguggccaacgggguccugcagaccuucaugcgcauggcguggggcggcuccuaccuggcccucgacagcgggcggcgcggcugggacugcaucaucuccagcuaccaguaccugaucauccagaacaccaccugggacgaccacugccaguucucccggcccagccccaucggguaccugggcuucgugagccagaagacgcgcgacaucuacaucucccggcgccuccugggcaccuucaccuggacccugagcgacuccgaggggcacgacaugccgggcggguacugccucacgcgguggaugcugaucgaggccgaccugaagugcuucggcaacaccgccguggccaagugcaacgagaagcacgacgaggaguucugcgacauguggcgccucuucgacuucugcaagcaggcgauccagcggcugaaggccgaggcccagaugaacauccagcugaucaacaaggccgucaacgcccucaucaacgaccagcugaugaugaagaaccaccuccgcgacaucauggggauccccuacugcaacuacagcaaguucugcuaccugaacaacaccaccacgggccggaccucccugccccgcugcugccugaucagcaacggcuccuaccucaacgagacccacuucagcgacgacaucgagcagcaggcggacaacaugaucaccgagaugcugcagaaggaguacauggaccggcaggggaagacgccccugggccucguggaccuguucguguucuccaccagcuucuaccugaucaccaucuuccuccaccuggucaagaucccgacccaccgccacaucguggggaagcccugccccaagccccaccggcugaaccacaugggcaucugcuccugcgggcuguacaagcagccgggcgugcccguccgcuggaagcggugaggacuaguaauaaggaaacuguaugaaugucugugggcaggaagugaagagauccuucuguaaagguuuuuggaauuaugucugcugaauaauaaacuuuuuugaaauaauaaaucugguagaaaaaugagaucucaaaggcucuuuucagagccaccaaaaaaaaaaaaaaaaaaaaaaaaaaaaaaaaaaaaaaaaaaaaaaaaaaaaaaaaaaaaaaaaaaaaaaaaaaaaaaaaaaaaaaaaaaaaaaaaaaaaa

SEQ ID NO: 40972 - RNA, 1809 nt, Artificial Sequence; identical to SEQ ID NO: 40966
  mRNA product Design b-4 (hSL-A100) comprising derived and/or modified sequence from LASV(Pinneo-NIG-1969;Clade I)__AIT17836__GPCmut12 (opt1)

SEQ ID NO: 40973 - RNA, 1809 nt, Artificial Sequence
  mRNA product Design b-4 (hSL-A100) comprising derived and/or modified sequence from LASV(ISTH0009-NIG-2011;Clade II)__AIT17404__GPCmut12 (opt1)
aggagagucccgcagucggcguccagcggcucugcuuguucgugugugugucguugcaggccuuauucaagcuuaccaugggccagaucaucaccuucuuccaggaggugccccacgucaucgaggaggugaugaacaucgugcugaucgcccucagccugcuggccauccucaaggggaucuacaacgucgcgaccugcggccuguucgggcugguguccuuccuccugcugugcggccgcagcugcuccacgaccuacaaggggguguacgagcuccagacccuggagcuggacauggccagccucaacaugugcaugccgcuguccugcacgaagaacaacagccaccacuacaucauggucggcaacgagaccggccuggagcucacccugaccaacacguccaucaucaaccacaaguucugcaaccugagcgacgcccacaagaagaaccucuacgaccacgcccugauguccaucaucagcaccuuccaccuguccauccccaacuucaaccaguacgaggccaugagcugcgacuucaacgggggcaagaucuccgugcaguacaaccucagccacgcguacgccguggacgccgccaaccacugcgggaccaucgcgaacggcguccugcagaccuucaugcggauggccuggggcggguccuacaucgcccuggacagcggcaagggguccugggacugcaucaugacgagcuaccaguaccucaucauccagaacaccaccugggaggaccacugccaguucucccgccccagccccaucggcuaccuggggcugcucagccagcggacccgcgacaucuacaucucccggcgccugcugggcacguucaccuggacccucagcgacuccgagggcaacgagacccccgggggcuacugccugacgcgguggaugcugaucgaggccgagcucaagugcuucgggaacaccgccguggcgaagugcaacgagaagcacgacgaggaguucugcgacaugcugcgccuguucgacuucugcaagcaggccauccggcgccucaagaccgaggcccagaugagcauccagcugaucaacaaggccgugaacgcccugaucaacgaccagcucaucaugaagaaccaccuccgggacaucaugggcaucccguacugcaacuacuccaaguacugcuaccugaaccacaccgucacggggaagaccagccugccccgcugcugccugguguccaacggcagcuaccugaacgagacccacuucuccgacgacaucgagcagcaggcggacaacaugaucaccgagcuccugcagaaggaguacauggaccggcagggcaagacgccccuggggcucguggaccuguucgucuucagcaccuccuucuaccugaucagcaucuuccugcaccucaucaagaucccgacccaccgccacaucaccggcaagcccugccccaagccccaccggcugaaccacauggggaucugcuccugcggccuguacaagcacccgggggugcccgugaaguggaagcgcugaggacuaguaauaaggaaacuguaugaaugucugugggcaggaagugaagagauccuucuguaaagguuuuuggaauuaugucugcugaauaauaaacuuuuuugaaauaauaaaucugguagaaaaaugagaucucaaaggcucuuuucagagccaccaaaaaaaaaaaaaaaaaaaaaaaaaaaaaaaaaaaaaaaaaaaaaaaaaaaaaaaaaaaaaaaaaaaaaaaaaaaaaaaaaaaaaaaaaaaaaaaaaaaaa

SEQ ID NO: 40974 - RNA, 1809 nt, Artificial Sequence
  mRNA product Design b-4 (hSL-A100) comprising derived and/or modified sequence from LASV(ISTH2010-NIG-2012;Clade II)__AIT17482__GPCmut12 (opt1)
aggagagucccgcagucggcguccagcggcucugcuuguucgugugugugucguugcaggccuuauucaagcuuaccaugggccagaucaucaccuucuuccaggaggugccccacgucaucgaggaggugaugaacaucgugcugaucgcccucagccugcuggccauccucaaggggaucuacaacgucgcgaccugcggccuguucgggcugguguccuuccuccugcugugcggccgcagcugcuccacgaccuacaaggggguguacgagcuccagacccuggagcuggacauggccagccucaacaugugcaugccgcuguccugcacgaagaacaacagccaccacuacaucauggucggcaacgagaccggccuggagcucacccugaccaacacguccaucaucaaccacaaguucugcaaccugagcgacgcccacaagaagaaccucuacgaccacgcccugauguccaucaucagcaccuuccaccuguccauccccaacuucaaccaguacgaggccaugagcugcgacuucaacgggggcaagaucuccgugcaguacaaccucagccacgcguacgccguggacgccgccaaccacugcgggaccaucgcgaacggcguccugcagaccuucaugcggauggccuggggcggguccuacaucgcccuggacagcggcaagggguccugggacugcaucaugacgagcuaccaguaccucaucauccagaacaucaccugggaggaccacugccaguucucccgccccagccccaucggcuaccuggggcugcucagccagcggacccgcgacaucuacaucucccggcgccugcugggcaccuucacguggacccucagcgacuccgagggcaacgagacccccgggggcuacugccugacccgguggaugcugaucgaggccgagcucaagugcuucgggaacacggccguggcgaagugcaacgagaagcacgacgaggaguucugcgacaugcugcgccuguucgacuucugcaagcaggccauccggcgccucaagaccgaggcccagaugagcauccagcugaucaacaaggccgugaacgcccugaucaacgaccagcucaucaugaagaaccaccuccgggacaucaugggcauccccuacugcaacuacuccaaguacugcuaccugaaccacaccgucaccgggaagacgagccugccccgcugcugccugguguccaacggcagcuaccugaacgagacccacuucuccgacgacaucgagcagcaggcggacaacaugaucaccgagcuccugcagaaggaguacaucgaccggcagggcaagaccccgcuggggcucguggaccuguucgucuucagcacguccuucuaccugaucagcaucuuccugcaccucgugaagaucccgacccaccgccacguggucggcaagcccugccccaagccccaccggcugaaccacauggggaucugcuccugcggccuguacaagcacccgggggugcccgugaaguggaagcgcugaggacuaguaauaaggaaacuguaugaaugucugugggcaggaagugaagagauccuucuguaaagguuuuuggaauuaugucugcugaauaauaaacuuuuuugaaauaauaaaucugguagaaaaaugagaucucaaaggcucuuuucagagccaccaaaaaaaaaaaaaaaaaaaaaaaaaaaaaaaaaaaaaaaaaaaaaaaaaaaaaaaaaaaaaaaaaaaaaaaaaaaaaaaaaaaaaaaaaaaaaaaaaaaaa

SEQ ID NO: 40975 - RNA, 1809 nt, Artificial Sequence
  mRNA product Design b-4 (hSL-A100) comprising derived and/or modified sequence from LASV(Lassa virus/H.sapiens-wt/NGA/2015/ISTH_0543;Clade II)__AVO03639__GPCmut12 (opt1)
aggagagucccgcagucggcguccagcggcucugcuuguucgugugugugucguugcaggccuuauucaagcuuaccaugggccagaucaucaccuucuuccaggaggugccccacgucaucgaggaggugaugaacaucgugcugaucgcccucagccugcuggccauccucaaggggaucuacaacgucgcgaccugcggccuguucgggcugguguccuuccuccugcugugcggccgcagcugcuccacgaccuacaaggggguguacgagcuccagacccuggagcuggacauggccaaccucaacaugugcaugccgcugagcugcacgaagaacaacucccaccacuacaucauggucggcaacgagaccggccuggagcucacccugaccaacacgagcaucaucaaccacaaguucugcaaccuguccgacgcccacaagaagaaccucuacgaccacgcccugaugagcaucaucuccaccuuccaccugagcauccccaacuucaaccaguacgaggccauguccugcgacuucaacgggggcaagaucagcgugcaguacaaccucucccacaccuacgcgguggacgccgccaaccacugcgggaccaucgccaacggcguccugcagacguucaugcggauggcguggggcgggagcuacaucgcccuggacuccggcaaggggagcugggacugcaucaugaccuccuaccaguaccucgugauccagaacaccaccugggaggaccacugccaguucagccgccccucccccaucggcuaccuggggcugcucagccagcggacgcgcgacaucuacaucagccggcgccugcugggcaccuucaccuggacccucuccgacagcgagggcaacgagacgcccgggggcuacugccugacccgguggaugcugaucgaggccgagcucaagugcuucgggaacaccgccguggccaagugcaacgagaagcacgacgaggaguucugcgacaugcugcgccuguucgacuucugcaagcaggcgauccggcgccucaagaccgaggcccagauguccauccagcugaucaacaaggccgucaacgcccugaucaacgaccagcucaucaugaagaaccaccuccgggacaucaugggcauccccuacugcaacuacagcaaguacugcuaccugaaccacacggugaccgggaagaccucccugccccgcugcugccuggugagcaacggcuccuaccugaacgagacccacuucagcgacgacaucgagcagcaggccgacaacaugaucacggagcuccugcagaaggaguacaucgaccggcagggcaagaccccgcuggggcucgucgaccuguucguguucuccaccagcuucuaccugaucuccaucuuccugcaccucgugaagaucccgacccaccgccacaucacgggcaagcccugccccaagccccaccggcugaaccacauggggaucugcagcugcggccuguacaagcacccggggguccccgugaaguggaagcgcugaggacuaguaauaaggaaacuguaugaaugucugugggcaggaagugaagagauccuucuguaaagguuuuuggaauuaugucugcugaauaauaaacuuuuuugaaauaauaaaucugguagaaaaaugagaucucaaaggcucuuuucagagccaccaaaaaaaaaaaaaaaaaaaaaaaaaaaaaaaaaaaaaaaaaaaaaaaaaaaaaaaaaaaaaaaaaaaaaaaaaaaaaaaaaaaaaaaaaaaaaaaaaaaaa

SEQ ID NO: 40976 - RNA, 1809 nt, Artificial Sequence
  mRNA product Design b-4 (hSL-A100) comprising derived and/or modified sequence from LASV(Lassa virus/H.sapiens-wt/NGA/2016/ISTH_0009;Clade II)__AVO03571__GPCmut12 (opt1)
aggagagucccgcagucggcguccagcggcucugcuuguucgugugugugucguugcaggccuuauucaagcuuaccaugggccagaucaucaccuucuuccaggaggugccccacgucaucgaggaggugaugaacaucgugcugaucgcccucagccugcuggccauccucaaggggaucuacaacgucgcgaccugcggccugcuggggcucguguccuuccugcugcucugcggccgcagcugcuccacgaccuacaaggggguguacgagcugcagacccuggagcucgacauggccagccugaacaugugcaugccgcuguccugcacgaagaacaacagccaccacuacaucauggucggcaacgagaccggccucgagcugacccugaccaacacguccaucaucaaccacaaguucugcaaccucagcgacgcccacaagaagaaccuguacgaccacgcccugauguccaucaucagcaccuuccaccucuccauccccaacuucaaccaguacgaggccaugagcugcgacuucaacgggggccggaucuccgugcaguacaaccugagccacuccuacgcgguggacgccgccaaccacugcgggaccaucgccaacggcguccugcagaccuucaugcgcauggcguggggcgggagcuacaucgcccucgacuccggcaaggggagcugggacugcaucaugacguccuaccaguaccugaucauccagaacaccaccugggaggaccacugccaguucagccggcccagccccaucggcuaccuggggcuccugucccagcgcacccgggacaucuacaucagccgccggcugcucggcacguucaccuggacccuguccgacagcgagggcaacgagacccccgggggcuacugccugacgcgcuggaugcucaucgaggccgagcugaagugcuucgggaacaccgccguggccaagugcaacgagaagcacgacgaggaguucugcgacaugcugcggcuguucgacuucugcaagcaggcgauccgccggcugaagaccgaggcccagauguccauccagcugaucaacaaggccgugaacgcccucaucaacgaccagcugaucaugaagaaccaccuccgcgacaucaugggcaucccguacugcaacuacagcaaguacugcuaccucaaccacaccgucacggggaagaccucccugccccggugcugccuggugagcaacggcuccuaccucaacgagacccacuucagcgacgacaucgagcagcaggccgacaacaugaucaccgagcugcugcagaaggaguacaucgaccgccagggcaagacgccccucgggcugguggaccuguucgucuucuccaccagcuucuaccugaucuccaucuuccuccaccuggugaagaucccgacccaccggcacaucaccggcaagcccugccccaagccccaccgccugaaccacauggggaucugcagcugcggccucuacaaccacccgggggugcccgucaaguggaagcggugaggacuaguaauaaggaaacuguaugaaugucugugggcaggaagugaagagauccuucuguaaagguuuuuggaauuaugucugcugaauaauaaacuuuuuugaaauaauaaaucugguagaaaaaugagaucucaaaggcucuuuucagagccaccaaaaaaaaaaaaaaaaaaaaaaaaaaaaaaaaaaaaaaaaaaaaaaaaaaaaaaaaaaaaaaaaaaaaaaaaaaaaaaaaaaaaaaaaaaaaaaaaaaaaa

SEQ ID NO: 40977 - RNA, 1809 nt, Artificial Sequence
  mRNA product Design b-4 (hSL-A100) comprising derived and/or modified sequence from LASV(Lassa virus/H.sapiens-wt/NGA/2016/ISTH_0017;Clade II)__AVO03567__GPCmut12 (opt1)
aggagagucccgcagucggcguccagcggcucugcuuguucgugugugugucguugcaggccuuauucaagcuuaccaugggccagaucaucaccuucuuccaggaggugccccacgucaucgaggaggugaugaacaucgugcugaucgcccucagccugcuggccauccucaaggggaucuacaacgucgcgaccugcggccuguucgggcugguguccuuccuccugcugugcggccgcagcugcuccacgaccuacaaggggguguacgagcuccagacccuggagcuggacauggccagccucaacaugugcaugccgcuguccugcacgaagaacaacagccaccacuacaucauggucggcaacgagaccggccuggagcucacccugaccaacacguccaucaucaaccacaaguucugcaaccugagcgacgcccacaagaagaaccucuacgaccacgcccugauguccaucaucagcaccuuccaccuguccauccccaacuucaaccaguacgaggccaugagcugcgacuucaacgggggcaagaucuccgugcaguacaaccucagccacaccuacgcgaucgacgccgccaaccacugcgggaccaucgccaacggcgugcugcagacguucaugcggauggcguggggcggguccuacaucgcccuggacagcggcaagggguccugggacugcaucaugaccagcuaccaguaccucaucauccagaacaccaccugggaggaccacugccaguucucccgccccagccccaucggcuaccuggggcugcucagccagcggacgcgcgacaucuacaucucccggcgccugcugggcaccuucaccuggacccucagcgacuccgagggcaacgagacgcccgggggcuacugccugacccgguggaugcugaucgaggccgagcucaagugcuucgggaacaccgccgucgccaagugcaacgagaagcacgacgaggaguucugcgacaugcugcgccuguucgacuucugcaagcaggcgauccggcgccucaagaccgaggcccagaugagcauccagcugaucaacaaggccgugaacgcccugaucaacgaccagcucaucaugaagaaccaccuccgggacaucaugggcauccccuacugcaacuacuccaaguacugcuaccugaaccacacggugaccgggaagaccagccugccccgcugcugccuggucuccaacggcagcuaccugaacgagacccacuucuccgacgacaucgagcagcaggccgacaacaugaucacggagcuccugcagaaggaguacauggaccggcagggcaagaccccgcuggggcucguggaccuguucguguucagcaccuccuucuaccugaucagcaucuuccugcaccucguccgcaucccgacccaccggcacgugaucggcaagcccugccccaagccccaccgccugaaccacauggggaucugcuccugcggccuguacaagcacccgggggugcccgucaaguggaagcggugaggacuaguaauaaggaaacuguaugaaugucugugggcaggaagugaagagauccuucuguaaagguuuuuggaauuaugucugcugaauaauaaacuuuuuugaaauaauaaaucugguagaaaaaugagaucucaaaggcucuuuucagagccaccaaaaaaaaaaaaaaaaaaaaaaaaaaaaaaaaaaaaaaaaaaaaaaaaaaaaaaaaaaaaaaaaaaaaaaaaaaaaaaaaaaaaaaaaaaaaaaaaaaaaa

SEQ ID NO: 40978 - RNA, 1809 nt, Artificial Sequence
  mRNA product Design b-4 (hSL-A100) comprising derived and/or modified sequence from LASV(Lassa virus/H.sapiens-wt/NGA/2018/ISTH_0959;Clade II)__AVV65099__GPCmut12 (opt1)
aggagagucccgcagucggcguccagcggcucugcuuguucgugugugugucguugcaggccuuauucaagcuuaccaugggccagaucaucaccuucuuccaggaggugccccacgucaucgaggaggugaugaacaucgugcugaucgcccucagccugcuggccauccucaaggggaucuacaacgucgugaccugcggccuguucgggcugguguccuuccuccugcugugcggccgcagcugcuccacgaccuacaagggggucuacgagcuccagacccuggagcuggacauggcgagccucaacaugugcaugccgcuguccugcacgaagaacaacagccaccacuacaucauggugggcaacgagaccggccuggagcucacccugaccaacacguccaucaucaaccacaaguucugcaaccugagcgacgcccacaagaagaaccucuacgaccacgcccugauguccaucaucagcaccuuccaccuguccauccccaacuucaaccaguacgaggccaugagcugcgacuucaacgggggcaagaucuccgugcaguacaaccucagccacgccuacgcgaucgacgccgccaaccacugcgggaccaucgccaacggcguccugcagaccuucaugcggauggcguggggcggguccuacaucgcccuggacagcggcaagggguccugggacugcaucaugacgagcuaccaguaccucaucauccagaacaccaccugggaggaccacugccaguucucccgccccagccccaucggcuaccuggggcugcucagccagcggacccgcgacaucuacaucucccggcgccugcugggcacguucaccuggacccucagcgacuccgagggcaacgagacccccgggggcuacugccugacgcgguggaugcugaucgaggccgagcucaagugcuucgggaacaccgccguggccaagugcaacgagaagcacgacgaggaguucugcgacaugcugcgccuguucgacuucugcaagcaggcgauccggcgccucaagaccgaggcccagaugagcauccagcugaucaacaaggccgugaacgcccugaucaacgaccagcucaucaugaagaaccaccuccgggacaucaugggcaucccguacugcaacuacuccaaguacugcuaccugaaccacaccgucacggggaagaccagccugccccgcugcugccugguguccaacggcagcuaccugaacgagacccacuucuccgacgacaucgagcagcaggccgacaacaugaucaccgagcuccugcagaaggaguacaucgaccggcagggcaagacgccccuggggcucguggaccuguucgucuucagcaccuccuucuaccugaucagcaucuuccugcaccucgugaagaucccgacccaccgccacgugaucggcaagcccugccccaagccccaccggcugaaccacauggggaucugcuccugcggccuguacaagcacccggggguccccgugaaguggaagcgcugaggacuaguaauaaggaaacuguaugaaugucugugggcaggaagugaagagauccuucuguaaagguuuuuggaauuaugucugcugaauaauaaacuuuuuugaaauaauaaaucugguagaaaaaugagaucucaaaggcucuuuucagagccaccaaaaaaaaaaaaaaaaaaaaaaaaaaaaaaaaaaaaaaaaaaaaaaaaaaaaaaaaaaaaaaaaaaaaaaaaaaaaaaaaaaaaaaaaaaaaaaaaaaaaa

SEQ ID NO: 40979 - RNA, 1809 nt, Artificial Sequence
  mRNA product Design b-4 (hSL-A100) comprising derived and/or modified sequence from LASV(LASV003-NIG-2008;Clade II)__AIT17580__GPCmut12 (opt1)
aggagagucccgcagucggcguccagcggcucugcuuguucgugugugugucguugcaggccuuauucaagcuuaccaugggccagaucaucaccuucuuccaggaggugccccacgucaucgaggaggugaugaacaucgugcugaucgcccucagccugcuggccauccucaaggggaucuacaacgucgcgaccugcggccuguucgggcugguguccuuccuccugcugugcggccgcagcugcuccacgaccuacaaggggguguacgagcuccagacccuggagcuggacauggccagccucaacaugugcaugccgcuguccugcacgaagaacaacagccaccacuacaucauggucggcaacgagaccggccuggagcucacccugaccaacacguccaucaucaaccacaaguucugcaaccugagcgacgcccacaagaagaaccucuacgaccacgcccugauguccaucaucagcaccuuccaccuguccauccccaacuucaaccaguacgaggccaugagcugcgacuucaacgggggcaagaucuccgugcaguacaaccucagccacaccuacgcgguggacgccgccaaccacugcgggaccaucgccaacggcguccugcagacguucaugcggauggcguggggcggguccuacaucgcccuggacagcggcaagggguccugggacugcaucaugaccagcuaccaguaccucaucauccagaacaccaccugggaggaccacugccaguucucccgccccagccccaucggcuaccuggggcugcucagccagcggacgcgcgacaucuacaucucccggcgccugcugggcaccuucaccuggacccucagcgacuccgagagcaacgagacgccgggcggguacugccugacccgguggaugcugaucgaggccgagcucaagugcuucggcaacaccgccguggccaagugcaacgagaagcacgacgaggaguucugcgacaugcugcgccuguucgacuucugcaagcaggcgauccggcgccucaaggccgaggcccagauguccauccagcugaucaacaaggccgugaacgcccugaucaacgaccagcucaucaugaagaaccaccuccgggacaucauggggauccccuacugcaacuacagcaaguacugcuaccugaaccacaccgucacgggccgcaccucccugccccggugcugccuggugagcaacggguccuaccugaacgagacccacuucagcgacgacaucgagcagcaggcggacaacaugaucaccgagcuccugcagaaggaguacauggaccgccagggcaagacgccccugggccucguggaccuguucgucuucuccaccagcuucuaccugaucuccaucuuccugcaccucgugaagaucccgacccaccggcacgugaucgggaagcccugccccaagccccaccgccugaaccacaugggcaucugcagcugcgggcuguacaagcacccgggcguccccgugaaguggaagcggugaggacuaguaauaaggaaacuguaugaaugucugugggcaggaagugaagagauccuucuguaaagguuuuuggaauuaugucugcugaauaauaaacuuuuuugaaauaauaaaucugguagaaaaaugagaucucaaaggcucuuuucagagccaccaaaaaaaaaaaaaaaaaaaaaaaaaaaaaaaaaaaaaaaaaaaaaaaaaaaaaaaaaaaaaaaaaaaaaaaaaaaaaaaaaaaaaaaaaaaaaaaaaaaaa

SEQ ID NO: 40980 - RNA, 1809 nt, Artificial Sequence
  mRNA product Design b-4 (hSL-A100) comprising derived and/or modified sequence from LASV(LASV035-NIG-2009;Clade II)__AIT17588__GPCmut12 (opt1)
aggagagucccgcagucggcguccagcggcucugcuuguucgugugugugucguugcaggccuuauucaagcuuaccaugggccagaucaucaccuucuuccaggaggugccccacgucaucgaggaggugaugaacaucgugcugaucgcccucagccugcuggccauccucaaggggaucuacaacgucgcgaccugcggccuguucgggcugguguccuuccuccugcugugcggccgcagcugcuccacgaccuacaaggggguguacgagcuccagacccuggagcuggacauggccagccucaacaugugcaugccgcuguccugcacgaagaacaacagccaccacuacaucauggucggcaacgagaccggccuggagcucacccugaccaacacguccaucaucaaccacaaguucugcaaccugagcgacgcccacaagaagaaccucuacgaccacgcccugauguccaucaucagcaccuuccaccuguccauccccaacuucaaccaguacgaggccaugagcugcgacuucaacgggggcaagaucuccgugcaguacaaccucagccacgcguacgccguggacgccgccaaccacugcgggaccaucgcgaacggcguccugcagaccuucaugcggauggccuggggcggguccuacaucgcccuggacagcggcaagggguccugggacugcaucaugacgagcuaccaguaccucaucauccagaacaccaccugggaggaccacugccaguucucccgccccagccccaucggcuaccuggggcugcucagccagcggacccgcgacaucuacaucucccggcgccugcugggcacguucaccuggacccucagcgacuccgagggcaacgagacccccgggggcuacugccugacgcgguggaugcugaucgaggccgagcucaagugcuucgggaacaccgccguggcgaagugcaacgagaagcacgacgaggaguucugcgacaugcugcgccuguucgacuucugcaagcaggccauccggcgccucaaggccgaggcccagaugagcauccagcugaucaacaaggccgugaacgcgcugaucaacgaccagcucaucaugaagaaccaccuccgggacaucaugggcauccccuacugcaacuacuccaaguacugcuaccugaaccacaccgucaccgggaagacgagccugccccgcugcugccugguguccaacggcagcuaccugaacgagacccacuucuccgacgacaucgagcagcaggccgacaacaugaucaccgagcuccugcagaaggaguacaucgaccggcagggcaagaccccgcuggggcucguggaccuguucgucuucagcacguccuucuaccugaucagcaucuuccugcaccucgugaagaucccgacccaccgccacgugaucggcaagcccugccccaagccccaccggcugaaccacauggggaucugcuccugcggccuguacaagcacccggggguccccgugaaguggaagcgcugaggacuaguaauaaggaaacuguaugaaugucugugggcaggaagugaagagauccuucuguaaagguuuuuggaauuaugucugcugaauaauaaacuuuuuugaaauaauaaaucugguagaaaaaugagaucucaaaggcucuuuucagagccaccaaaaaaaaaaaaaaaaaaaaaaaaaaaaaaaaaaaaaaaaaaaaaaaaaaaaaaaaaaaaaaaaaaaaaaaaaaaaaaaaaaaaaaaaaaaaaaaaaaaaa

SEQ ID NO: 40981 - RNA, 1809 nt, Artificial Sequence
  mRNA product Design b-4 (hSL-A100) comprising derived and/or modified sequence from LASV(LASV1000-NIG-2009;Clade II)__AIT17782__GPCmut12 (opt1)
aggagagucccgcagucggcguccagcggcucugcuuguucgugugugugucguugcaggccuuauucaagcuuaccaugggccagaucaucaccuucuuccaggaggugccccacgucaucgaggaggugaugaacaucgugcugaucgcccucagccugcuggccauccucaaggggaucuacaacgucgcgaccugcggccuguucgggcugguguccuuccuccugcugugcggccgcagcugcuccacgaccuacaaggggguguacgagcuccagacccuggagcuggacauggccagccucaacaugugcaugccgcuguccugcacgaagaacaacagccaccacuacaucauggucggcaacgagaccggccuggagcucacccugaccaacacguccaucaucaaccacaaguucugcaaccugagcgacgcccacaagaagaaccucuacgaccacgcccugauguccaucaucagcaccuuccaccuguccauccccaacuucaaccaguacgaggccaugagcugcgacuucaacgggggcaagaucuccgugcaguacaaccucagccacaccuacgcgguggacgccgccaaccacugcgggaccaucgccaacggcguccugcagacguucaugcggauggcguggggcggguccuacaucgcccuggacagcggcaagggguccugggacugcaucaugaccagcuaccaguaccucaucauccagaacaccaccugggaggaccacugccaguucucccgccccagccccaucggcuaccuggggcugcucagccagcggacgcgcgacaucuacaucucccggcgccugcugggcaccuucaccuggacccucagcgacuccgagggcaacgagacgcccgggggcuacugccugacccgguggaugcugaucgaggccgagcucaagugcuucgggaacaccgccguggccaagugcaacgagaagcacgacgaggaguucugcgacaugcugcgccuguucgacuucugcaagcaggcgaucaagcggcucaagaccgaggcccagaugagcauccagcugaucaacaaggccgugaacgcccugaucaacgaccagcucaucaugaagaaccaccuccgcgacaucaugggcauccccuacugcaacuacuccaaguacugcuaccugaaccacacggucaccgggaagaccagccugccccggugcugccugguguccaacggcagcuaccugaacgagacccacuucuccgacgacaucgagcagcaggccgacaacaugaucacggagcuccugcagaaggaguacaucgaccgccagggcaagaccccgcuggggcucguggaccuguucgucuucagcaccuccuucuaccugaucagcaucuuccugcaccucgugaagaucccgacccaccggcacguggucggcaagcccugccccaagccccaccgccugaaccacauggggaucugcuccugcggccuguacaagcacccgggggugcccgugaaguggaagcggugaggacuaguaauaaggaaacuguaugaaugucugugggcaggaagugaagagauccuucuguaaagguuuuuggaauuaugucugcugaauaauaaacuuuuuugaaauaauaaaucugguagaaaaaugagaucucaaaggcucuuuucagagccaccaaaaaaaaaaaaaaaaaaaaaaaaaaaaaaaaaaaaaaaaaaaaaaaaaaaaaaaaaaaaaaaaaaaaaaaaaaaaaaaaaaaaaaaaaaaaaaaaaaaaa

SEQ ID NO: 40982 - RNA, 1809 nt, Artificial Sequence
  mRNA product Design b-4 (hSL-A100) comprising derived and/or modified sequence from LASV(LASV221-NIG-2010;Clade II)__AIT17624__GPCmut12 (opt1)
aggagagucccgcagucggcguccagcggcucugcuuguucgugugugugucguugcaggccuuauucaagcuuaccaugggccagaucaucaccuucuuccaggaggugccccacgucaucgaggaggugaugaacaucgugcugaucgcccucagccugcuggccauccucaaggggaucuacaacgucgcgaccugcggccuguucgggcugguguccuuccuccugcugugcggccgcagcugcuccacgaccuacaaggggguguacgagcuccagacccuggagcuggacauggccagccucaacaugugcaugccgcuguccugcacgaagaacaacagccaccacuacaucauggucggcaacgagaccggccuggagcucacccugaccaacacguccaucaucaaccacaaguucugcaaccugagcgacgcccacaagaagaaccucuacgaccacgcccugauguccaucaucagcaccuuccaccuguccauccccaacuucaaccaguacgaggccaugagcugcgacuucaacgggggcaagaucuccgugcaguacaaccucagccacaccuacgcgaucgacgccgccaaccacugcgggaccaucgccaacggcgugcugcagacguucaugcggauggcguggggcggguccuacaucgcccuggacagcggcaagggguccugggacugcaucaugaccagcuaccaguaccucaucauccagaacaccaccugggaggaccacugccaguucucccgccccagccccaucggcuaccuggggcugcucagccagcggacgcgcgacaucuacaucucccggcgccugcugggcaccuucaccuggacccucagcgacuccgagggcaacgagacgcccgggggcuacugccugacccgguggaugcugaucgaggccgagcucaagugcuucgggaacaccgccgucgccaagugcaacgagaagcacgacgaggaguucugcgacaugcugcgccuguucgacuucugcaagcaggcgauccggcgccucaagaccgaggcccagaugagcauccagcugaucaacaaggccgugaacgcccugaucaacgaccagcucaucaugaagaaccaccuccgggacaucaugggcauccccuacugcaacuacuccaaguacugcuaccugaaccacacggugaccgggaagaccagccugccccgcugcugccuggucuccaacggcagcuaccugaacgagacccacuucuccgacgacaucgagcagcaggccgacaacaugaucacggagaugcuccagaaggaguacauggaccggcagggcaagaccccgcuggggcugguggaccucuucguguucagcaccuccuucuaccugaucagcaucuuccugcaccuggucaagaucccgacccaccgccacgugaucggcaagcccugccccaagccccaccggcucaaccacauggggaucugcuccugcggccuguacaagcacccgggggugcccgucaaguggaagcgcugaggacuaguaauaaggaaacuguaugaaugucugugggcaggaagugaagagauccuucuguaaagguuuuuggaauuaugucugcugaauaauaaacuuuuuugaaauaauaaaucugguagaaaaaugagaucucaaaggcucuuuucagagccaccaaaaaaaaaaaaaaaaaaaaaaaaaaaaaaaaaaaaaaaaaaaaaaaaaaaaaaaaaaaaaaaaaaaaaaaaaaaaaaaaaaaaaaaaaaaaaaaaaaaaa

SEQ ID NO: 40983 - RNA, 1809 nt, Artificial Sequence
  mRNA product Design b-4 (hSL-A100) comprising derived and/or modified sequence from LASV(LASV237-NIG-2010;Clade II)__AIT17638__GPCmut12 (opt1)
aggagagucccgcagucggcguccagcggcucugcuuguucgugugugugucguugcaggccuuauucaagcuuaccaugggccagaucaucaccuucuuccaggaggugccccacgucaucgaggaggugaugaacaucgugcugaucgcccucagccugcuggccauccucaaggggaucuacaacgucgcgaccugcggccuguucgggcugguguccuuccuccugcugugcggccgcagcugcuccacgaccuacaaggggguguacgagcuccagacccuggagcuggacauggccagccucaacaugugcaugccgcuguccugcacgaagaacaacagccaccacuacaucauggucggcaacgagaccggccuggagcucacccugaccaacacguccaucaucaaccacaaguucugcaaccugagcgacgcccacaagaaggaccucuacgaccacgcccugauguccaucaucagcaccuuccaccuguccauccccaacuucaaccaguacgaggccaugagcugcgacuucaacgggggcaagaucuccgugcaguacaaccucagccacaccuacgcgguggacgccgccaaccacugcgggaccaucgccaacggcguccugcagacguucaugcggauggcguggggcggguccuacaucgcccuggacagcggcaagggguccugggacugcaucaugaccagcuaccaguaccucaucauccagaacaccaccugggaggaccacugccaguucucccgccccagccccaucggcuaccuggggcugcucagccagcggacgcgcgacaucuacaucucccggcgccugcugggcaccuucaccuggacccucagcgacuccgagggcaacgagacgcccgggggcuacugccugacccgguggaugcugaucgaggccgagcucaagugcuucgggaacaccgccguggccaagugcaacgagaagcacgacgaggaguucugcgacaugcugcgccuguucgacuucugcaagcaggcgauccggcgccucaagaccgaggcccagaugagcauccagcugaucaacaaggccgugaacgcccugaucaacgaccagcucaucaugaagaaccaccuccgggacaucaugggcauccccuacugcaacuacuccaaguacugcuaccugaaccacacggucaccgggaagaccagccugccccgcugcugccugguguccaacggcagcuaccugaacgagacccacuucuccgacgacaucgagcagcaggccgacaacaugaucacggagcuccugcagaaggaguacauggaccggcagggcaagaccccgcuggggcucguggaccuguucgucuucagcaccuccuucuaccugaucagcaucuuccugcaccucaucaagaucccgacccaccgccacaucacgggcaagcccugccccaagccccaccggcugaaccacauggggaucugcuccugcggccuguacaagcacccgggggugcccgugaaguggaagcgcugaggacuaguaauaaggaaacuguaugaaugucugugggcaggaagugaagagauccuucuguaaagguuuuuggaauuaugucugcugaauaauaaacuuuuuugaaauaauaaaucugguagaaaaaugagaucucaaaggcucuuuucagagccaccaaaaaaaaaaaaaaaaaaaaaaaaaaaaaaaaaaaaaaaaaaaaaaaaaaaaaaaaaaaaaaaaaaaaaaaaaaaaaaaaaaaaaaaaaaaaaaaaaaaaa

SEQ ID NO: 40984 - RNA, 1809 nt, Artificial Sequence
  mRNA product Design b-4 (hSL-A100) comprising derived and/or modified sequence from LASV(LASV253-NIG-2011;Clade II)__AIT17670__GPCmut12 (opt1)
aggagagucccgcagucggcguccagcggcucugcuuguucgugugugugucguugcaggccuuauucaagcuuaccaugggccagaucaucaccuucuuccaggaggugccccacgucaucgaggaggugaugaacaucgugcugaucgcccucagccugcuggccauccucaaggggaucuacaacgucgcgaccugcggccuguucgggcugguguccuuccuccugcugugcggccgcagcugcuccacgaccuacaaggggguguacgagcuccagacccuggagcuggacauggccagccucaacaugugcaugccgcuguccugcacgaagaacaacagccaccacuacaucauggucggcaacgagaccggccuggagcucacccugaccaacacguccaucaucaaccacaaguucugcaaccugagcgacgcccacaagaagaaccucuacgaccacgcccugauguccaucaucagcaccuuccaccuguccauccccaacuucaaccaguacgaggccaugagcugcgacuucaacgggggcaagaucuccgugcaguacaaccucagccacaccuacgcgguggacgccgccaaccacugcgggaccaucgccaacggcguccugcagacguucaugcggauggcguggggcggguccuacaucgcccuggacagcggcaagggguccugggacugcaucaugaccagcuaccaguaccucaucauccagaacaccaccugggaggaccacugccaguucucccgccccagccccaucggcuaccuggggcugcucagccagcggacgcgcgacaucuacaucucccggcgccugcugggcaccuucaccuggacccucagcgacuccgagggcaacgagacgcccgggggcuacugccugacccgguggaugcugaucgaggccgagcucaagugcuucgggaacaccgccguggccaagugcaacgagaagcacgacgaggaguucugcgacaugcugcgccuguucgacuucugcaagcaggcgauccggcgccucaaggccgaggcccagaugagcauccagcugaucaacaaggccgugaacgcccugaucaacgaccagcucaucaugaagaaccaccuccgggacaucaugggcaucccguacugcaacuacuccaaguacugcuaccugaaccacaccgucacggggcgcaccagccugccccggugcugccugguguccaacggcagcuaccugaacgagacccacuucuccgacgacaucgagcagcaggcggacaacaugaucaccgagcuccugcagaaggaguacaucgaccgccagggcaagacgccccuggggcucguggaccuguucgucuucagcaccuccuucuaccugaucagcaucuuccugcaccucgugaagaucccgacccaccggcacaucaucggcaagcccugccccaagccccaccgccugaaccacauggggaucugcuccugcggccuguacaagcacccgggggugcccgucaaguggaagcggugaggacuaguaauaaggaaacuguaugaaugucugugggcaggaagugaagagauccuucuguaaagguuuuuggaauuaugucugcugaauaauaaacuuuuuugaaauaauaaaucugguagaaaaaugagaucucaaaggcucuuuucagagccaccaaaaaaaaaaaaaaaaaaaaaaaaaaaaaaaaaaaaaaaaaaaaaaaaaaaaaaaaaaaaaaaaaaaaaaaaaaaaaaaaaaaaaaaaaaaaaaaaaaaaa

SEQ ID NO: 40985 - RNA, 1809 nt, Artificial Sequence
  mRNA product Design b-4 (hSL-A100) comprising derived and/or modified sequence from LASV(LASV254-NIG-2011;Clade II)__AIT17674__GPCmut12 (opt1)
aggagagucccgcagucggcguccagcggcucugcuuguucgugugugugucguugcaggccuuauucaagcuuaccaugggccagaucaucaccuucuuccaggaggugccccacgucaucgaggaggugaugaacaucgugcugaucgcccucagccugcuggccauccucaaggggaucuacaacgucgcgaccugcggccuguucgggcugguguccuuccuccugcugugcggccgcagcugcuccacgaccuacaaggggguguacgagcuccagacccuggagcuggacaugaccaaccucaacaugugcaugccgcugagcugcaccaagaacaacucccaccacuacaucauggucggcaacgagaccggccuggagcucacccugacgaacaccagcaucaucaaccacaaguucugcaaccuguccgacgcccacaagaagaaccucuacaaccacgcccugaugagcaucaucuccaccuuccaccugagcauccccaacuucaaccaguacgaggccauguccugcgacuucaacgggggcaagaucagcgugcaguacaaccucucccacagcuacgccguggacgcggccaaccacugcgggaccaucgccaacggcguccugcagacguucaugcggauggccuggggcggguccuacaucgcgcuggacagcggcaaggggaacugggacugcaucaugaccuccuaccaguaccucaucauccagaacaccaccugggaggaccacugccaguucagccgccccucccccaucggcuaccuggggcugcucagccagcggacgcgcgacaucuacaucagccggcgccugcugggcaccuucaccuggacccucuccgacagcgagggcaacgagacgcccgggggcuacugccugacccgguggaugcugaucgaggccgagcucaagugcuucgggaacaccgccguggccaagugcaacgagaagcacgacgaggaguucugcgacaugcugcgccuguucgacuucugcaagcaggccauccggcgccucaagaccgaggcgcaggccaacauccagcugaucaacaaggccgugaacgcccugaucaacgaccagcucaucaugaagaaccaccuccgggacaucaugggcauccccuacugcaacuacuccaaguacugcuaccugaaccacacggucaccgggaagaccagccugccccgcugcugccugguguccaacggcagcuaccugaacgagacccacuucuccgacgacaucgagcagcaggccgacaacaugaucacggagcuccugcagaaggaguacauggaccggcagggcaagaccccgcuggggcucguggaccuguucgucuucagcaccuccuucuaccugaucagcaucuuccugcaccucgugaagaucccgacccaccgccacgugaucggcaagcccugccccaagccccaccggcugaaccacauggggaucugcuccugcggccuguacaagcacccggggguccccgugaaguggaagcgcugaggacuaguaauaaggaaacuguaugaaugucugugggcaggaagugaagagauccuucuguaaagguuuuuggaauuaugucugcugaauaauaaacuuuuuugaaauaauaaaucugguagaaaaaugagaucucaaaggcucuuuucagagccaccaaaaaaaaaaaaaaaaaaaaaaaaaaaaaaaaaaaaaaaaaaaaaaaaaaaaaaaaaaaaaaaaaaaaaaaaaaaaaaaaaaaaaaaaaaaaaaaaaaaaa

SEQ ID NO: 40986 - RNA, 1809 nt, Artificial Sequence
  mRNA product Design b-4 (hSL-A100) comprising derived and/or modified sequence from LASV(Nig08-A19;Clade III)__ADU56618__GPCmut12 (opt1)
aggagagucccgcagucggcguccagcggcucugcuuguucgugugugugucguugcaggccuuauucaagcuuaccaugggccagaucgugaccuucuuccaggaggucccccacgugaucgaggaggugaugaacaucguccugaucgcccucagcauccuggccauccugaaggggcucuacaacaucgcgaccugcggccugaucgggcuggugacguuccuccugcuguccggccgcagcugcuccaugaccuacaaggggguguacgagcuccagacccuggagcugaacaugaacacccucaacaugugcaugccgcugagcugcaccaagaacaacucccaccacuacaucauggucggcaacgagaccggccuggagcucacccugacgaacaccagccugcuccaccacaaguucugcaaccuguccgacgcccacaagaagaaccuguacgaccacacccucaugagcaucaucuccaccuuccaccugagcauccccaacuucaaccaguacgaggccauguccugcgacuucaacgggggcaagaucacggugcaguacaaccugagccacuccuacgccaucgacgccgcgaaccacugcgggaccguggccaacggcguccuccagaccuucaugcggauggccuggggcgggagcuacaucgcccuggacuccggccgcgggaagugggacugcaucaugaccagcuaccaguaccugaucauccagaacacgaccugggaggaccacugccaguucucccggcccagccccaucggcuaccucgggcugcugucccagcgcacccgggacaucuacaucagccgccggcuccugggcaccuucacguggacccugagcgacuccgagggcaacgagacccccgggggcuacugccucacccgcuggaugcugaucgaggcggagcugaagugcuucgggaacacggccguggccaagugcaacgagaagcacgacgaggaguucugcgacaugcuccggcuguucgacuucugcaagcaggccauccgccggcugaaggccgaggcgcagaugagcauccagcucaucaacaaggccgugaacgcccugaucaacgaccagcugaucaugaagaaccaccuccgcgacaucaugggcauccccuacugcaacuacuccaaguacugcuaccugaaccacaccagcaccgggcggaccucccugccccgcugcugccucgucagcaacggcuccuaccugaacgagacgcacuucagcgacgacaucgagcagcaggccgacaacaugaucaccgagaugcugcagaaggaguaccucgaccggcagggcaagaccccgcuggggcugguggaccuguucguguucuccaccagcuucuaccucaucuccaucuuccugcaccuggucaagaucccgacgcaccgccacaucgugggcaagcccugccccaagccccaccggcucaaccacauggggaucugcagcugcggccuguacaagcagccgggggugcccguccgcuggaagcggugaggacuaguaauaaggaaacuguaugaaugucugugggcaggaagugaagagauccuucuguaaagguuuuuggaauuaugucugcugaauaauaaacuuuuuugaaauaauaaaucugguagaaaaaugagaucucaaaggcucuuuucagagccaccaaaaaaaaaaaaaaaaaaaaaaaaaaaaaaaaaaaaaaaaaaaaaaaaaaaaaaaaaaaaaaaaaaaaaaaaaaaaaaaaaaaaaaaaaaaaaaaaaaaaa

SEQ ID NO: 40987 - RNA, 1812 nt, Artificial Sequence
  mRNA product Design b-4 (hSL-A100) comprising derived and/or modified sequence from LASV(G1180-SLE-2010;Clade IV)__AIT17168__GPCmut12 (opt1)
aggagagucccgcagucggcguccagcggcucugcuuguucgugugugugucguugcaggccuuauucaagcuuaccaugggccagaucgugaccuucuuccaggaggucccccacgugaucgaggaggugaugaacaucguccugaucgcccucagcauccuggccgugcugaaggggcucuacaacuucgcgaccugcggccugguggggcugcucaccuuccugcugcucugcggccgcuccugcaccgccagccgguacaagggggucuacgagcugcagacccuggagcucaacauggagacccugaacaugugcaugccgcuguccugcaccaagaacaacagccaccacuacaucauggugggcaacgagaccggccucgagcugacccugacgaacaccuccaucaucaaccacaaguucugcaaccucagcgacgcccacaagaagaaccuguacgaccacgcccugauguccaucaucagcaccuuccaccucuccauccccaacuucaaccaguacgaggccaugagcugcgacuucaacgggggcaagaucuccgugcaguacaaccugagccacuccuacgcgggggacgccgccaaccacugcggcaccgucgccaacggggugcugcagacguucaugcgcauggcguggggcggcagcuacaucgcccucgacuccgggcacggcagcugggacugcaucaugaccuccuaccaguaccugaucauccagaacaccaccugggaggaccacugccaguucagccggcccucccccaucggguaccugggccuccugagccagcgcacgcgggacaucuacaucagccgccggcugcucggcaccuucaccuggacccuguccgacagcgaggggaaggacacgccgggcggguacugccugacccgcuggaugcucaucgaggccgagcugaagugcuucggcaacaccgccguggccaagugcaacgagaagcacgacgaggaguucugcgacaugcugcggcuguucgacuucugcaagcaggcgauccagcgccugaaggccgaggcccagauguccauccagcugaucaacaaggccgucaacgcccucaucaacgaccagcugaucaugaagaaccaccuccgggacaucauggggauccccuacugcaacuacagcaaguacugcuaccucaaccacaccacgaccggcaagaccucccugcccaagugcugccuggugagcaacggcuccuaccucaacgagacccacuucagcgacgacaucgagcagcaggcggacaacaugaucacggagaugcugcagaaggaguacauggagcgccaggggaagacgccccugggccucguggaccuguucgucuucuccaccagcuucuaccugaucuccaucuuccugcaccucgugaagaucccgacccaccggcacaucgugggcaagagcugccccaagccccaccgccugaaccacauggggaucugcuccugcgggcuguacaagcagcccggcgucccggugaaguggaagcggugaggacuaguaauaaggaaacuguaugaaugucugugggcaggaagugaagagauccuucuguaaagguuuuuggaauuaugucugcugaauaauaaacuuuuuugaaauaauaaaucugguagaaaaaugagaucucaaaggcucuuuucagagccaccaaaaaaaaaaaaaaaaaaaaaaaaaaaaaaaaaaaaaaaaaaaaaaaaaaaaaaaaaaaaaaaaaaaaaaaaaaaaaaaaaaaaaaaaaaaaaaaaaaaaa

SEQ ID NO: 40988 - RNA, 1812 nt, Artificial Sequence
  mRNA product Design b-4 (hSL-A100) comprising derived and/or modified sequence from LASV(G1442-SLE-2011;Clade IV)__AIT17180__GPCmut12 (opt1)
aggagagucccgcagucggcguccagcggcucugcuuguucgugugugugucguugcaggccuuauucaagcuuaccaugggccagaucgugaccuucuuccaggaggucccccacgugaucgaggaggugaugaacaucguccugaucgcccucagcauccuggccgugcugaaggggcucuacaacguggcgaccugcggccugaucgggcuggucacguuccuccugcugugcggccgcuccugcaccaccacccucuacaaggggguguacgagcugcagacgcuggagcucaacauggagacccugaacaugugcaugccgcugagcugcaccaagaacaacucccaccacuacauccgggugggcaacgagacgggccucgagcugacccugaccaacaccagcaucaucaaccacaaguucugcaaccucuccgacgcccacaagaagaaccuguacgaccacgcccugaugagcaucaucuccacguuccaccucagcauccccaacuucaaccaguacgaggccauguccugcgacuucaacgggggcaagaucagcguccaguacaaccugucccacagcuacgccggggacgcggccaaccacugcggcaccguggccaacggggugcugcagaccuucaugcgcauggccuggggcggcuccuacaucgcgcucgacagcgggcggggcaacugggacugcaucaugaccuccuaccaguaccugaucauccagaacacgaccugggacgaccacugccaguucagccgccccucccccaucggguaccugggccuccugagccagcggacccgcgacgucuacaucucccggcgccugcucggcaccuucacguggacccugagcgacagcgaggggaaggacaccccgggcggguacugccugacccgguggaugcucaucgaggccgagcugaagugcuucggcaacacggccguggccaagugcaacgagaagcacgacgaggaguucugcgacaugcugcgccucuucgacuucugcaagcaggccauccagcggcugaaggcggaggcccagauguccauccagcugaucaacaaggccgugaacgcccucaucaacgaccagcugaucaugaagaaccaccuccgcgacaucauggggauccccuacugcaacuacagcaaguacugcuaccugaacaacaccgccaccggcaagaccucccugcccaagugcugccugaucagcaacggcuccuaccucaacgagacgcacuucagcgacgacaucgagcaggaggcggacaacaugaucaccgagaugcugcagaaggaguacauggagcggcaggggaagacgccccugggccucgucgaccuguucguguucuccaccagcuucuaccugaucuccaucuuccugcaccucgugaagaucccgacccaccgccacaucgucggcaagagcugccccaagccccaccggcugaaccacauggggaucugcuccugcgggcuguacaagcagcccggcgugccggugcgcuggaagcggugaggacuaguaauaaggaaacuguaugaaugucugugggcaggaagugaagagauccuucuguaaagguuuuuggaauuaugucugcugaauaauaaacuuuuuugaaauaauaaaucugguagaaaaaugagaucucaaaggcucuuuucagagccaccaaaaaaaaaaaaaaaaaaaaaaaaaaaaaaaaaaaaaaaaaaaaaaaaaaaaaaaaaaaaaaaaaaaaaaaaaaaaaaaaaaaaaaaaaaaaaaaaaaaaa

SEQ ID NO: 40989 - RNA, 1812 nt, Artificial Sequence
  mRNA product Design b-4 (hSL-A100) comprising derived and/or modified sequence from LASV(G3010-SLE-2013;Clade IV)__AIT17344__GPCmut12 (opt1)
aggagagucccgcagucggcguccagcggcucugcuuguucgugugugugucguugcaggccuuauucaagcuuaccaugggccagaucgugaccuucuuccaggaggucccccacgugaucgaggaggugaugaacaucguccugaucgcccucagcauccuggccgugcugaaggggcucuacaacuucgcgaccugcggccugguggggcuggucacguuccuccugcugugcggccgcuccugcaccaccagccucuacaaggggguguacgagcugcagacccuggagcucaacauggagacgcugaacaugugcaugccgcuguccugcaccaagaacaacagccaccacuacaucauggugggcaacgagaccggccucgagcugacgcugaccaacaccuccaucaucaaccacaaguucugcaaccucagcgacgcccacaagaagaaccuguacaaccacgcccugauguccaucaucagcaccuuccaccucuccauccccaacuucaaccaguacgaggccaugagcugcgacuucaacgggggcaagaucuccguccaguacaaccugagccacuccuacgccggggacgcggccagccacugcggcacgguggccaacggggugcugcagaccuucaugcggauggccuggggcggcuccuacaucgcgcucgacagcggguacggcaagugggacugcaucaugaccuccuaccaguaccugaucauccagaacaccacgugggaggaccacugccaguucagccgccccucccccaucggguaccugggccuccugagccagcggacccgcgacaucuacaucagccggcgccugcucggcaccuucaccuggacgcuguccgacagcgaggggaaggacaccccgggcggguacugccugacccgguggaugcucaucgaggccgagcugaagugcuucggcaacaccgccgucgccaagugcaacgagaagcacgacgaggaguucugcgacaugcugcgccucuucgacuucugcaagcaggccauccagcggcugaagacggaggcgcagauguccauccagcugaucaacaaggccgugaacgcccucaucaacgaccagcugaucaugaagaaccaccuccgcgacaucauggggauccccuacugcaacuacagcaaguacugcuaccugaaccacaccaccaccggcaagacgucccugcccaagugcugccuggugagcaacggcuccuaccucaacgagacccacuucagcgacgacaucgagcagcaggccgacaacaugaucaccgagaugcugcagaaggaguacauggagcggcaggggaagacgccccugggccucgucgaccuguucguguucuccaccagcuucuaccugaucuccaucuuccugcaccucgugaagaucccgacccaccgccacaucgucggcaagagcugccccaagccccaccggcugaaccacauggggaucugcuccugcgggcuguacaagcagcccggcgugccggugcgcuggaagcggugaggacuaguaauaaggaaacuguaugaaugucugugggcaggaagugaagagauccuucuguaaagguuuuuggaauuaugucugcugaauaauaaacuuuuuugaaauaauaaaucugguagaaaaaugagaucucaaaggcucuuuucagagccaccaaaaaaaaaaaaaaaaaaaaaaaaaaaaaaaaaaaaaaaaaaaaaaaaaaaaaaaaaaaaaaaaaaaaaaaaaaaaaaaaaaaaaaaaaaaaaaaaaaaaa

SEQ ID NO: 40990 - RNA, 1812 nt, Artificial Sequence
  mRNA product Design b-4 (hSL-A100) comprising derived and/or modified sequence from LASV(G502-SLE-2009;Clade IV)__AIT17126__GPCmut12 (opt1)
aggagagucccgcagucggcguccagcggcucugcuuguucgugugugugucguugcaggccuuauucaagcuuaccaugggccagaucgugaccuucuuccaggaggucccccacgugaucgaggaggugaugaacaucguccugaucgcccucagcauccuggccgugcugaaggggcucuacaacuucgcgaccugcggccugguggggcugcucacguuccugcugcucugcggccgcuccugcaccaccgggcuguacaagggcgucuacgagcugcagacccucgagcugaacauggagacgcugaacaugugcaugccgcucagcugcaccaagaacaacucccaccacuacaucauggugggcaacgagaccgggcuggagcugacgcucaccaacaccagcaucaucaaccacaaguucugcaaccuguccgacgcccacaagaagaaccuguacgaccacgcccucaugagcaucaucuccaccuuccaccugagcauccccaacuucaaccaguacgaggccauguccugcgacuucaacggcgggaagaucagcgugcaguacaaccugucccacagcuacgccggcgacgcggccgaccacugcgggacggucgccaacggcgugcuccagaccuucaugcggauggccuggggcggguccuacaucgcgcuggacagcggccgcgggcggugggacugcaucaugaccuccuaccaguaccugaucauccagaacaccacgugggaggaccacugccaguucagccgccccucccccaucggcuaccucggccugcugagccagcggacccgcgacaucuacaucucccggcgccuccuggggaccuucaccuggacgcugagcgacagcgagggcaaggacacccccgggggcuacugccucacccgguggaugcugaucgaggccgagcugaagugcuucgggaacaccgccguggccaagugcaacgagaagcacgacgaggaguucugcgacaugcuccgccuguucgacuucugcaagcaggccauccagcggcugaaggcggaggcccagauguccauccagcucaucaacaaggccgucaacgcccugaucaacgaccagcuggugaugaagaaccaccuccgcgacaucaugggcauccccuacugcaacuacagccgguacugcuaccugaaccacacgaccaccggccgcaccucccugcccaagugcugccucgugagcaacggguccuaccugaacgagacgcacuucagcgacgacaucgagcagcaggccgacaacaugaucaccgagaugcugcagaaggaguacauggagcggcagggcaagaccccgcucgggcuggucgaccuguucguguucuccaccagcuucuaccugaucuccaucuuccuccaccuggugaagaucccgacgcaccgccacaucgucggcaagagcugccccaagccccaccggcugaaccacauggggaucugcuccugcggccucuacaagcagcccggcgugccggugaaguggaagcgcugaggacuaguaauaaggaaacuguaugaaugucugugggcaggaagugaagagauccuucuguaaagguuuuuggaauuaugucugcugaauaauaaacuuuuuugaaauaauaaaucugguagaaaaaugagaucucaaaggcucuuuucagagccaccaaaaaaaaaaaaaaaaaaaaaaaaaaaaaaaaaaaaaaaaaaaaaaaaaaaaaaaaaaaaaaaaaaaaaaaaaaaaaaaaaaaaaaaaaaaaaaaaaaaaa

SEQ ID NO: 40991 - RNA, 1812 nt, Artificial Sequence
  mRNA product Design b-4 (hSL-A100) comprising derived and/or modified sequence from LASV(G733-SLE-2010;Clade IV)__AIT17154__GPCmut12 (opt1)
aggagagucccgcagucggcguccagcggcucugcuuguucgugugugugucguugcaggccuuauucaagcuuaccaugggccagaucgugaccuucuuccaggaggucccccacgugaucgaggaggugaugaacaucguccugaucgcccucagcauccuggccgugcugaaggggcucuacaacuucgcgaccugcggcaucguggggcuggucuccuuccugcuccugugcggccgcagcugcacgaccucccuguacaaggggguguacgagcuccagacccuggagcugaacauggagacccucaacaugugcaugccgcugagcugcaccaagaacaacucccaccacuacaucauggugggcaacgagaccggccuggagcucacccugacgaacaccagcaucaucaaccacaaguucugcaaccuguccgacgcccacaagaagaaccucuacgaccacgcccugaugagcaucaucuccaccuuccaccugagcauccccaacuucaaccaguacgaggccauguccugcgacuucaacgggggcaagaucagcguccaguacaaccucucccacagcuacgccggggacgcggccaaccacugcggcaccaucgccaacggggugcugcagacguucaugcggauggccuggggcggcuccuacaucgcgcuggacagcgggcgcgaccggugggacugcaucaugaccuccuaccaguaccucaucauccagaacaccaccugggaggaccacugccaguucagccgccccucccccaucggcuaccuggggcugcucagccagcggacgcgcgacaucuacaucagccggcgccugcugggcaccuucaccuggacccucuccgacagcgagggcaaggacacgcccgggggcuacugccugacccgguggaugcugaucgaggccgagcucaagugcuucgggaacaccgccguggccaagugcaacgagaagcacgacgaggaguucugcgacaugcugcgccuguucgacuucugcaagcaggccauccagcggcucaaggcggaggcccagauguccauccagcugaucaacaaggccgucaacgcccugaucaacgaccagcucaucaugaagaaccaccuccgcgacaucaugggcauccccuacugcaacuacagcaaguacugcuaccugaaccacaccacgaccgggaagaccucccugcccaagugcugccuggugagcaacggcuccuaccugaacgagacccacuucagcgacgacaucgagcagcaggccgacaacaugaucacggagaugcuccagaaggaguacauggagcggcagggcaagaccccgcuggggcugguggaccucuucgucuucuccaccagcuucuaccugaucuccaucuuccugcaccuggugaagaucccgacccaccgccacguggucggcaagagcugccccaagccccaccggcucaaccacauggggaucugcuccugcggccuguacgggcagcccggcgugccggugaaguggaagcgcugaggacuaguaauaaggaaacuguaugaaugucugugggcaggaagugaagagauccuucuguaaagguuuuuggaauuaugucugcugaauaauaaacuuuuuugaaauaauaaaucugguagaaaaaugagaucucaaaggcucuuuucagagccaccaaaaaaaaaaaaaaaaaaaaaaaaaaaaaaaaaaaaaaaaaaaaaaaaaaaaaaaaaaaaaaaaaaaaaaaaaaaaaaaaaaaaaaaaaaaaaaaaaaaaa

SEQ ID NO: 40992 - RNA, 1812 nt, Artificial Sequence
  mRNA product Design b-4 (hSL-A100) comprising derived and/or modified sequence from MOPV/LASV reassortant(IGS-1;Clade IV)__AFY05576__GPCmut12 (opt1)
aggagagucccgcagucggcguccagcggcucugcuuguucgugugugugucguugcaggccuuauucaagcuuaccaugggccagaucgugaccuucuuccaggaggucccccacgugaucgaggaggugaugaacaucguccugaucgcccucagcgugcuggccgugcugaaggggcucuacaacuucgcgaccugcggccuggucgggcuggugacguuccuccugcugugcggccgcuccugcaccaccagccucuacaaggggguguacgagcugcagacccuggagcucaacauggagacgcugaacaugugcaugccgcuguccugcaccaagaacaacagccaccacuacaucauggucggcaacgagaccggccucgagcugacgcugaccaacaccuccaucaucaaccacaaguucugcaaccucagcgacgcccacaagaagaaccuguacgaccacgcccugauguccaucaucagcaccuuccaccucuccauccccaacuucaaccaguacgaggccaugagcugcgacuucaacgggggcaagaucuccgugcaguacaaccugagccacuccuacgccggggacgcggccaaccacugcggcacgguggccaacgggguccugcagaccuucaugcggauggccuggggcggcagcuacaucgcgcucgacuccgggcgcggcaacugggacugcaucaugaccagcuaccaguaccugaucauccagaacaccacgugggaggaccacugccaguucucccggcccagccccaucggguaccugggccuccugucccagcgcacccgggacaucuacaucagccgccggcugcucggcaccuucaccuggacgcugagcgacuccgagggggaggacaccccgggcggguacugccugacccgcuggaugcucaucgaggccgagcugaagugcuucggcaacaccgccguggccaagugcaacgagaagcacgacgaggaguucugcgacaugcugcggcuguucgacuucugcaagcaggccauccagcgccugaaggcggaggcccagaugagcauccagcugaucaacaaggccgugaacgcccucaucaacgaccagcugaucaugaagaaccaccuccgggacaucauggggauccccuacugcaacuacuccaaguacugcuaccucaaccacacgaccaccggccgcaccagccugcccaagugcugccuggucuccaacggcagcuaccucaacgagacgcacuucuccgacgacaucgagcagcaggccgacaacaugaucaccgagaugcugcagaaggaguacauggagcggcaggggaagacgccccugggccucguggaccuguucguguucagcaccuccuucuaccugaucagcaucuuccugcaccucgucaagaucccgacccaccgccacaucguggggaaguccugccccaagccccaccggcugaaccacaugggcaucugcagcugcgggcuguacaagcagcccggcgugccggucaaguggaagcgcugaggacuaguaauaaggaaacuguaugaaugucugugggcaggaagugaagagauccuucuguaaagguuuuuggaauuaugucugcugaauaauaaacuuuuuugaaauaauaaaucugguagaaaaaugagaucucaaaggcucuuuucagagccaccaaaaaaaaaaaaaaaaaaaaaaaaaaaaaaaaaaaaaaaaaaaaaaaaaaaaaaaaaaaaaaaaaaaaaaaaaaaaaaaaaaaaaaaaaaaaaaaaaaaaa

SEQ ID NO: 40993 - RNA, 1812 nt, Artificial Sequence
  mRNA product Design b-4 (hSL-A100) comprising derived and/or modified sequence from LASV(LM765-SLE-2012;Clade IV)__AIT17814__GPCmut12 (opt1)
aggagagucccgcagucggcguccagcggcucugcuuguucgugugugugucguugcaggccuuauucaagcuuaccaugggccagaucgugaccuucuuccaggaggucccccacgugaucgaggaggugaugaacaucguccugaucgcccucagcauccuggccgugcugaaggggcucuacaacuucgcgaccugcggccugguggggcuggucacguuccuccugcugugcggccgcuccugcaccaccagccucuacaaggggguguacgagcugcagacccuggagcucaacauggagacgcugaacaugugcaugccgcuguccugcaccaagaacaacagccaccacuacaucauggugggcaacgagaccggccucgagcugacgcugaccaacaccuccaucaucgaccacaaguucugcaaccucagcgacgcccaccggaagaaccuguacgaccacgcccugauguccaucaucagcaccuuccaccucuccauccccaacuucaaccaguacgaggccaugagcugcgacuucaacgggggcaagaucuccguccaguacaaccugagccacuccuacgccaaggacgcggccgaccacugcgggacgguggccaacggcgugcugcagaccuucaugcgcauggccuggggcgggagcuacaucgcgcucgacuccggccgggggcgcugggacugcaucaugaccagcuaccaguaccugaucauccagaacaccacgugggaggaccacugccaguucucccggcccagccccaucggcuaccuggggcuccugucccagcgcacccgggacaucuacaucagccgccggcugcucggcaccuucaccuggacgcugagcgacuccgagggcaaggacacccccgggggcuacugccugacccgcuggaugcucaucgaggccgagcugaagugcuucgggaacaccgccgucgccaagugcaacgagaagcacgacgaggaguucugcgacaugcugcggcuguucgacuucugcaagcaggccauccagcgccugaaggcggaggcccagaugagcauccagcugaucaacaaggccgugaacgcccucaucaacgaccagcugaucaugaagaaccaccuccgggacaucaugggcauccccuacugcaacuacuccaaguacugcuaccucaaccacacgaccaccgggaagaccagccugcccaagugcugccugguguccaacggcagcuaccucaacgagacgcacuucuccgacgacaucgagcagcaggccgacaacaugaucaccgagaugcugcagaaggaguacauggagcgccagggcaagaccccgcuggggcucgucgaccuguucguguucagcaccuccuucuaccugaucagcaucuuccugcaccucgugaagaucccgacgcaccggcacaucgucggcaagcccugccccaagccccaccgccugaaccacauggggaucugcuccugcggccuguacaagcagccgggggugcccgugaaguggaagcggugaggacuaguaauaaggaaacuguaugaaugucugugggcaggaagugaagagauccuucuguaaagguuuuuggaauuaugucugcugaauaauaaacuuuuuugaaauaauaaaucugguagaaaaaugagaucucaaaggcucuuuucagagccaccaaaaaaaaaaaaaaaaaaaaaaaaaaaaaaaaaaaaaaaaaaaaaaaaaaaaaaaaaaaaaaaaaaaaaaaaaaaaaaaaaaaaaaaaaaaaaaaaaaaaa

SEQ ID NO: 40994 - RNA, 1812 nt, Artificial Sequence
  mRNA product Design b-4 (hSL-A100) comprising derived and/or modified sequence from LASV(LM776-SLE-2012;Clade IV)__AIT17824__GPCmut12 (opt1)
aggagagucccgcagucggcguccagcggcucugcuuguucgugugugugucguugcaggccuuauucaagcuuaccaugggccagaucgugaccuucuuccaggaggucccccacgugaucgaggaggugaugaacaucguccugaucgcccucagcauccuggccgugcugaaggggcucuacaacuucgcgaccugcggccugguggggcuggucacguuccuccugcugugcggccgcuccugcaccaccagcguguacaaggggguguacgagcuccagacccuggagcugaacauggagacgcucaacaugugcaugccgcuguccugcaccaagaacaacagccaccacuacaucauggucggcaacgagaccggccuggagcucacgcugaccaacaccuccaucaucaaccacaaguucugcaaccugagcgacgcccacaagaagaaccucuacgaccacgcccugauguccaucaucagcaccuuccaccuguccauccccaacuucaaccaguacgaggccaugagcugcgacuucaacgggggcaagaucuccgugcaguacaaccucagccacuccuacgccggggacgcggccaaccacugcggcacgguggccaacgggguccugcagaccuucaugcggauggccuggggcggcagcuacaucgcgcuggacuccgggcacggcaagugggacugcaucaugaccagcuaccaguaccucaucauccagaacaccacgugggaggaccacugccaguucucccgccccagccccaucggguaccugggccugcucucccagcggacccgcgacaucuacaucagccggcgccugcugggcaccuucaccuggacgcucagcgacuccgaggggaaggacaccccgggcggguacugccugacccgguggaugcugaucgaggccgagcucaagugcuucggcaacaccgccguggccaagugcaacgagaagcacgacgaggaguucugcgacaugcugcgccuguucgacuucugcaagcaggccauccagcggcucaaggcggaggcccagaugagcauccagcugaucaacaaggccgugaacgcccugaucaacgaccagcucaucaugaagaaccaccuccgcgacaucauggggauccccuacugcaacuacuccaaguacugcuaccugaaccacacgaccaccggcaagaccagccugcccaagugcugccuggucuccaacggcagcuaccugaacgagacgcacuucuccgacgacaucgagcagcaggccgacaacaugaucaccgagaugcuccagaaggaguacauggagcggcaggggaagacgccccugggccugguggaccucuucguguucagcaccuccuucuaccugaucagcaucuuccugcaccuggucaagaucccgacccaccgccacaucguggggaaguccugccccaagccccaccggcucaaccacaugggcaucugcagcugcgggcuguacaagcagcccggcgugccgguccgcuggaagcggugaggacuaguaauaaggaaacuguaugaaugucugugggcaggaagugaagagauccuucuguaaagguuuuuggaauuaugucugcugaauaauaaacuuuuuugaaauaauaaaucugguagaaaaaugagaucucaaaggcucuuuucagagccaccaaaaaaaaaaaaaaaaaaaaaaaaaaaaaaaaaaaaaaaaaaaaaaaaaaaaaaaaaaaaaaaaaaaaaaaaaaaaaaaaaaaaaaaaaaaaaaaaaaaaa

SEQ ID NO: 40995 - RNA, 1812 nt, Artificial Sequence
  mRNA product Design b-4 (hSL-A100) comprising derived and/or modified sequence from LASV(Mad39;Clade IV)__ANH09722__GPCmut12 (opt1)
aggagagucccgcagucggcguccagcggcucugcuuguucgugugugugucguugcaggccuuauucaagcuuaccaugggccagaucgugaccuucuuccaggaggucccccacgugaucgaggaggugaugaacaucguccugaucgcccucagcauccuggccgugcugaaggggcucuacaacguggcgaccugcggccugaucgggcuggucacguuccuccugcugugcggccgcuccugcaccaccacccucuacaaggggguguacgagcugcaggcccuggagcucaacauggagacgcugaacaugugcaugccgcugagcugcaccaagaacaacucccaccacuacauccgggugggcaacgagaccggccucgagcugacgcugaccaacaccagccucaucaaccacaaguucugcaaccuguccgacgcccacaagaagaaccuguacgaccacgcccucaugagcaucaucuccaccuuccaccugagcauccccaacuucaaccaguacgaggccauguccugcgacuucaacgacgggaagaucagcguccaguacaaccugucccacacguacgcgggcgacaccgccaaccacugcgggaccguggccaacggcgugcuccagaccuucaugcgcauggccuggggcgggagcuacaucgcgcuggacuccggccgcgggggcugggacugcaucaugacgagcuaccaguaccugaucauccagaacaccaccugggaggaccacugccaguucucccggcccagccccaucggguaccucggccugcugucccagcggacccgcgacaucuacaucagccggcgccuccugggcacguucaccuggacccuguccgacagcgaggggaaggacaccccgggcggguacugccucacgcgguggaugcugaucgaggccgagcugaagugcuucggcaacaccgccgucgccaagugcaacgagaagcacgacgaggaguucugcgacaugcuccgccuguucgacuucugcaagcaggccauccagcggcugaaggcggaggcccagaugagcauccagcucaucaacaaggccgugaacgcccugaucaacgaccagcugaucaugaagaaccaccuccgcgacaucauggggauccccuacugcaacuacuccaaguacugcuaccugaaccacaccgugaccggcaagacgagccugcccaagugcugccucgucuccaacggcagcuaccugaacgagacccacuucuccgacgacaucgagcagcaggccgacaacaugaucaccgagaugcugcagaaggaguacauggagcggcaggggaagacgccccucggccugguggaccuguucguguucagcaccuccuucuaccugaucagcaucuuccuccaccuggucaagaucccgacccaccgccacgugguggggaagcccugccccaagccccaccggcugaaccacaugggcaucugcuccugcggguucuacaagcagccgggcguccccgugcgcuggaagcggugaggacuaguaauaaggaaacuguaugaaugucugugggcaggaagugaagagauccuucuguaaagguuuuuggaauuaugucugcugaauaauaaacuuuuuugaaauaauaaaucugguagaaaaaugagaucucaaaggcucuuuucagagccaccaaaaaaaaaaaaaaaaaaaaaaaaaaaaaaaaaaaaaaaaaaaaaaaaaaaaaaaaaaaaaaaaaaaaaaaaaaaaaaaaaaaaaaaaaaaaaaaaaaaaa

SEQ ID NO: 40996 - RNA, 1812 nt, Artificial Sequence
  mRNA product Design b-4 (hSL-A100) comprising derived and/or modified sequence from LASV(Z0947-SLE-2011;Clade IV)__AIT17840__GPCmut12 (opt1)
aggagagucccgcagucggcguccagcggcucugcuuguucgugugugugucguugcaggccuuauucaagcuuaccaugggccagaucgugaccuucuuccaggaggucccccacgugaucgaggaggugaugaacaucguccugaucgcccucagcauccuggccgugcugaaggggcucuacaacuucgcgaccugcggccugguggggcuggucacguuccuccugcugugcggccgcuccugcaccaucagccucuacaaggggguguacgagcugcagacccuggagcucaacauggagacccugaacaugugcaugccgcuguccugcaccaagaacaacagccaccacuacaucauggugggcaacgagaccggccucgagcugacccugacgaacaccuccaucaucaaccacaaguucugcaaccucagcgacgcccacaagaagaaccuguacgaccacgcccugauguccaucaucagcaccuuccaccucuccauccccaacuucaaccaguacgaggccaugagcugcgacuucaacgggggcaagaucuccguccaguacaaccugagccacuccuacgccggggacgcggccaaccacugcggcaccguggccaacggggugcugcagacguucaugcggauggccuggggcggcagcuacaucgcgcucgacuccgggcgcgaccggugggacugcaucaugaccagcuaccaguaccugaucauccagaacaccaccugggaggaccacugccaguucucccgccccagccccaucggcuaccuggggcuccugucccagcggacgcgcgacaucuacaucagccggcgccugcucggcaccuucaccuggacccugagcgacuccgagggcaaggacacgcccgggggcuacugccugacccgguggaugcucaucgaggccgagcugaagugcuucgggaacaccgccgucgccaagugcaacgagaagcacgacgaggaguucugcgacaugcugcgccucuucgacuucugcaagcaggccauccagcggcugaaggcggaggcccagaugagcauccagcugaucaacaaggccgugaacgcccucaucaacgaccagcugaucaugaagaaccaccuccgcgacaucaugggcauccccuacugcaacuacuccaaguacugcuaccugaaccacaccacgaccgggaagaccagccugcccaagugcugccugguguccaacggcagcuaccucaacgagacccacuucuccgacgacaucgagcagcaggccgacaacaugaucacggagaugcugcagaaggaguacauggagcggcagggcaagaccccgcuggggcucgucgaccuguucguguucagcaccuccuucuaccugaucagcaucuuccugcaccucgugaagaucccgacccaccgccacaucgucggcaagcccugccccaagccccaccggcugaaccacauggggaucugcuccugcggccuguacaagcagccgggggugcccgugaaguggaagcgcugaggacuaguaauaaggaaacuguaugaaugucugugggcaggaagugaagagauccuucuguaaagguuuuuggaauuaugucugcugaauaauaaacuuuuuugaaauaauaaaucugguagaaaaaugagaucucaaaggcucuuuucagagccaccaaaaaaaaaaaaaaaaaaaaaaaaaaaaaaaaaaaaaaaaaaaaaaaaaaaaaaaaaaaaaaaaaaaaaaaaaaaaaaaaaaaaaaaaaaaaaaaaaaaaa

SEQ ID NO: 40997 - RNA, 1812 nt, Artificial Sequence
  mRNA product Design b-4 (hSL-A100) comprising derived and/or modified sequence from LASV(Josiah;Clade IV)__NP_694870__GPCmut12 (opt1)
aggagagucccgcagucggcguccagcggcucugcuuguucgugugugugucguugcaggccuuauucaagcuuaccaugggccagaucgugaccuucuuccaggaggucccccacgugaucgaggaggugaugaacaucguccugaucgcccucagcgugcuggccgugcugaaggggcucuacaacuucgcgaccugcggccuggucgggcuggugaccuuccuccugcugugcggccgcuccugcaccaccagccucuacaaggggguguacgagcugcagacccuggagcucaacauggagacgcugaacaugugcaugccgcuguccugcaccaagaacaacagccaccacuacaucauggucggcaacgagaccggccucgagcugacccugacgaacaccuccaucaucaaccacaaguucugcaaccucagcgacgcccacaagaagaaccuguacgaccacgcccugauguccaucaucagcaccuuccaccucuccauccccaacuucaaccaguacgaggccaugagcugcgacuucaacgggggcaagaucuccgugcaguacaaccugagccacuccuacgccggggacgcggccaaccacugcggcaccguggccaacgggguccugcagacguucaugcggauggccuggggcggcagcuacaucgcgcucgacuccgggcgcggcaacugggacugcaucaugaccagcuaccaguaccugaucauccagaacaccaccugggaggaccacugccaguucucccggcccagccccaucggguaccugggccuccugucccagcgcacgcgggacaucuacaucagccgccggcugcucggcaccuucaccuggacccugagcgacuccgaggggaaggacacgccgggcggguacugccugacccgcuggaugcucaucgaggccgagcugaagugcuucggcaacaccgccguggccaagugcaacgagaagcacgacgaggaguucugcgacaugcugcggcuguucgacuucugcaagcaggccauccagcgccugaaggcggaggcccagaugagcauccagcugaucaacaaggccgugaacgcccucaucaacgaccagcugaucaugaagaaccaccuccgggacaucauggggauccccuacugcaacuacuccaaguacugcuaccucaaccacaccacgaccggccgcaccagccugcccaagugcugccuggucuccaacggcagcuaccucaacgagacccacuucuccgacgacaucgagcagcaggccgacaacaugaucacggagaugcugcagaaggaguacauggagcggcaggggaagacgccccugggccugguggaccucuucguguucagcaccuccuucuaccugaucagcaucuuccugcaccucgucaagaucccgacccaccgccacaucguggggaaguccugccccaagccccaccggcugaaccacaugggcaucugcagcugcgggcuguacaagcagcccggcgugccggucaaguggaagcgcugaggacuaguaauaaggaaacuguaugaaugucugugggcaggaagugaagagauccuucuguaaagguuuuuggaauuaugucugcugaauaauaaacuuuuuugaaauaauaaaucugguagaaaaaugagaucucaaaggcucuuuucagagccaccaaaaaaaaaaaaaaaaaaaaaaaaaaaaaaaaaaaaaaaaaaaaaaaaaaaaaaaaaaaaaaaaaaaaaaaaaaaaaaaaaaaaaaaaaaaaaaaaaaaaa

SEQ ID NO: 40998 - RNA, 1809 nt, Artificial Sequence
  mRNA product Design b-4 (hSL-A100) comprising derived and/or modified sequence from LASV(LP;Clade I)__AAF86701__GPCmut12 (opt1)
aggagagucccgcagucggcguccagcggcucugcuuguucgugugugugucguugcaggccuuauucaagcuuaccaugggccagaucaucaccuucuuccaggaggugccccacgucaucgaggaggugaugaacaucgugcugaucgcccucagccugcuggccauccucaaggggcuguacaacaucgcgaccugcggcaucaucgggcuggucgccuuccucuuccugugcggcaaguccugcagccugacgcucaagggcggguacgagcugcagacccuggagcucaacauggagacccugaacaugugcaugccgcuguccugcaccaagaacagcucccaccacuacauccgcgugggcaacgagacggggcucgagcugacccugaccaacaccagcaucaucaaccacaaguucugcaaccucuccgacgcccacaagaagaaccuguacgaccacgcccugaugagcaucaucuccacguuccaccucagcauccccaacuucaaccaguacgaggccauguccugcgacuucaacggcgggaagaucagcgugcaguacaaccugucccacagcuacgcgggcgacgccgccgagcacugcgggaccgucgccaacggcgugcugcagaccuucaugcggauggcguggggcgggcgcuacaucgcccucgacuccggcaaggggaacugggacugcaucaugaccagcuaccaguaccugaucauccagaacacgaccugggaggaccacugccaguucucccggcccagccccaucggcuaccugggccuccugucccagcgcacccgggacaucuacaucagccgccggcugcucgggaccuucacguggacccugagcgacuccgagggcaacgagacccccgggggcuacugccugacccgcuggaugcucaucgaggccgagcugaagugcuucgggaacacggccguggccaagugcaacgagaagcacgacgaggaguucugcgacaugcugcggcuguucgacuucugcaagcaggcgauccgccggcugaaggccgaggcccagaugagcauccagcugaucaacaaggccgucaacgcccucaucaacgaccagcugaucaugaagaaccaccuccgcgacaucaugggcauccccuacugcaacuacuccaaguacugcuaccucaaccacaccagcuccggccggaccagccugcccaagugcugccugaucuccaacgggagcuaccucaacgagacccaguucuccgacgacaucgagcagcaggcggacaacaugaucacggagaugcugcagaaggaguacaucgagcgccagggcaagaccccgcuggggcugguggacaucuucaucuucagcaccuccuucuaccucaucagcaucuuccugcaccugaucaagaucccgacccaccggcacaucgugggcaagcccugccccaagccccaccgccucaaccacaugggggucugcuccugcggccuguacaagcacccgggcgugcccacgaaguggaagcggugaggacuaguaauaaggaaacuguaugaaugucugugggcaggaagugaagagauccuucuguaaagguuuuuggaauuaugucugcugaauaauaaacuuuuuugaaauaauaaaucugguagaaaaaugagaucucaaaggcucuuuucagagccaccaaaaaaaaaaaaaaaaaaaaaaaaaaaaaaaaaaaaaaaaaaaaaaaaaaaaaaaaaaaaaaaaaaaaaaaaaaaaaaaaaaaaaaaaaaaaaaaaaaaaa

SEQ ID NO: 40999 - RNA, 1809 nt, Artificial Sequence
  mRNA product Design b-4 (hSL-A100) comprising derived and/or modified sequence from LASV(803213;Clade II)__AAF86703__GPCmut12 (opt1)
aggagagucccgcagucggcguccagcggcucugcuuguucgugugugugucguugcaggccuuauucaagcuuaccaugggccagaucaucaccuucuuccaggaggugccccacgucaucgaggaggugaugaacaucgugcugaucgcccucagccugcuggccauccucaaggggaucuacaacgucgcgaccugcggccuguucgggcugaucuccuuccuccugcugugcggccgcagcugcuccgugacguacaaggggguguacgagcuccagacccuggagcugaacauggccaaccucaacaugugcaugccgcugagcugcaccaagaacaacucccaccacuacaucauggucggcaacgagaccggccuggagcucacgcugaccaacaccagcaucaucaaccacaaguucugcaaccuguccgacgcccacaagaagaaccucuacgaccacgcccugaugagcaucaucuccaccuuccaccugagcauccccaacuucaaccaguacgaggccauguccugcgacuucaacgggggcaagaucagcgugcaguacaaccucucccacagcuucgcgguggacgccgccaaccacugcgggacgaucgccaacggcguccugcagaccuucaugcggauggcguggggcggguccuacaucgcccuggacagcggcaaggggaacugggacugcaucaugaccuccuaccaguaccucaucauccagaacaccacgugggaggaccacugccaguucagccgccccucccccaucggcuaccuggggcugcucagccagcggacccgcgacaucuacaucagccggcgccugcugggcaccuucaccuggacgcucuccgacagcgagggcaacgaggcccccgggggcuacugccugacccgguggaugcugaucgaggccgagcucaagugcuucgggaacaccgccguggcgaagugcaacgagaagcacgacgaggaguucugcgacaugcugcgccuguucgacuucugcaagcaggccaucaagcggcucaagaccgaggcccagauguccauccagcugaucaacaaggccgugaacgcccugaucaacgaccagcucaucaugaagaaccaccuccgcgacaucaugggcauccccuacugcaacuacagccgguacugcuaccugaaccacacggucaccgggaagaccucccugccccgcugcugccuggugagcaacggcuccuaccugaacgagacccacuucagcgacgacaucgagcagcaggcggacaacaugaucacggagaugcuccagaaggaguacauggaccggcagggcaagaccccgcuggggcugguggaccuguucgucuucuccaccagcuucuaccucaucuccaucuuccugcaccuggugaagaucccgacccaccgccacaucgugggcaagcccugccccaagccccaccggcucaaccacauggggaucugcagcugcggccuguacaagcacccggggguccccgugaaguggaagcgcugaggacuaguaauaaggaaacuguaugaaugucugugggcaggaagugaagagauccuucuguaaagguuuuuggaauuaugucugcugaauaauaaacuuuuuugaaauaauaaaucugguagaaaaaugagaucucaaaggcucuuuucagagccaccaaaaaaaaaaaaaaaaaaaaaaaaaaaaaaaaaaaaaaaaaaaaaaaaaaaaaaaaaaaaaaaaaaaaaaaaaaaaaaaaaaaaaaaaaaaaaaaaaaaaa

SEQ ID NO: 41000 - RNA, 1809 nt, Artificial Sequence
  mRNA product Design b-4 (hSL-A100) comprising derived and/or modified sequence from LASV(GA391;Clade III)__CAA36645__GPCmut12 (opt1)
aggagagucccgcagucggcguccagcggcucugcuuguucgugugugugucguugcaggccuuauucaagcuuaccaugggccagaucgugaccuucuuccaggaggucccccacgugaucgaggaggugaugaacaucguccugaucgcccucagcauccuggccauccugaaggggcucuacaacguggcgaccugcggccugaucgggcuggugaccuuccuccugcuguccggccgcagcugcucccucaucuacaaggggaccuacgagcugcagacccuggagcucaacauggagacccugaacaugugcaugccgcugagcugcacgaagaacaacucccaccacuacauccgggucggcaacgagaccggccucgagcugacccugaccaacacgagcauccucaaccacaaguucugcaaccuguccgacgcccacaagcgcaaccuguacgaccacagccucauguccaucaucagcaccuuccaccuguccauccccaacuucaaccaguacgaggccaugagcugcgacuucaacgggggcaagaucaccgugcaguacaaccugucccacagcuucgccguggacgccgcggggcacugcggcacccucgccaacgggguccugcagacguucaugcggauggccuggggcggcuccuacaucgcccuggacagcgggcgcggcaacugggacugcaucaugaccuccuaccaguaccucaucauccagaacaccaccugggacgaccacugccaguucagccggcccucccccaucggguaccugggccugcucagccagcgcacgcgggacaucuacaucagccgccggcugcugggcaccuucaccuggacccucuccgacagcgaggggaacgagacgccgggcggguacugccugacccgcuggaugcugaucgaggcggagcucaagugcuucggcaacaccgccguggccaagugcaacgagaagcacgacgaggaguucugcgacaugcugcggcuguucgacuucugcaagcaggccauccgccggcucaagaccgaggcccagauguccauccagcugaucaacaaggcggugaacgcccugaucaacgaccagcucaucaugaagaaccaccuccgcgacaucauggggauccccuacugcaacuacagccgguacugcuaccugaaccacacguccaccggcaagaccagccugccccgcugcugccugaucuccaacggcagcuaccugaacgagaccaaguucuccgacgacaucgagcagcaggccgacaacaugaucacggagaugcugcagaaggaguacaucgaccggcaggggaagacgccccucggccuggucgaccuguucguguucagcaccuccuucuaccucaucagcaucuuccugcaccuggugaagaucccgacccaccgccacaucgucgggaagcccugccccaagccccaccggcucaaccacaugggcaucugcuccugcgggcuguacaagcagccgggcgugcccgugcgcuggaagcggugaggacuaguaauaaggaaacuguaugaaugucugugggcaggaagugaagagauccuucuguaaagguuuuuggaauuaugucugcugaauaauaaacuuuuuugaaauaauaaaucugguagaaaaaugagaucucaaaggcucuuuucagagccaccaaaaaaaaaaaaaaaaaaaaaaaaaaaaaaaaaaaaaaaaaaaaaaaaaaaaaaaaaaaaaaaaaaaaaaaaaaaaaaaaaaaaaaaaaaaaaaaaaaaaa

SEQ ID NO: 41001 - RNA, 1812 nt, Artificial Sequence
  mRNA product Design b-4 (hSL-A100) comprising derived and/or modified sequence from LASV(AV;Clade V)__CCA30314__GPCmut12 (opt1)
aggagagucccgcagucggcguccagcggcucugcuuguucgugugugugucguugcaggccuuauucaagcuuaccaugggccagaucgugaccuucuuccaggaggucccccacgugaucgaggaggugaugaacaucguccugaucgcccucagcauccuggccgugcugaaggggcucuacaacaucgcgaccugcggccugaucgggcugaucacguuccuccugcugugcggccgcuccugcagcuccaaccucuacaaggggguguacgagcugcagagccuggaccucaacauggagacccugaacaugugcaugccgcuguccugcaccaagaacaacagccaccacuacauccgggucggcaacgacaccggccucgagcugacgcugaccaacaccuccauccucaaccacaaguucugcaaccugagcgacgcccacaagaaggaccuguacgaccacgcccucauguccaucaucagcaccuuccaccuguccauccccaacuucaaccaguacgaggccaugagcugcgacuucaacgggggcaagaucuccgugcaguacaaccugagccacuccuacgccaucgacgcggccaaccacugcgggacgguggccaacggcauccuccagaccuucaugcgcauggccuggggcgggagcuacaucgcgcuggacuccggccgggggaacugggacugcaucaugaccagcuaccaguaccugaucauccagaacaccacgugggagaaccacugccaguucucccgccccagccccaucggcuaccucgggcugcugagccagcggacccgcgacaucuacaucucccggcgccuccugggcaccuucaccuggacgcugagcgacuccgagggcaacgccacccccgggggcuacugccucacccgguggaugcugaucgaggccgagcugaagugcuucgggaacaccgccgucgccaagugcaacgagaagcacgacgaggaguucugcgacaugcuccgccuguucgacuucugcaagcaggcgaucagccggcugaaguccgaggcccagaugagcauccagcucaucaacaaggccgugaacgcccugaucaacgaccagcugaucaugaagaaccaccuccgcgacaucaugggcauccccuacugcaacuacuccaaguacugcuaccugaaccacacgaucaccgggaagaccagccugcccaagugcugccucguguccaacggcagcuaccugaacgagacccacuucuccgacgacaucgagcagcaggccgacaacaugaucacggagaugcugcagaaggaguacauggagcggcagggcaagaccccgcuggggcucgucgaccuguucguguucagcaccuccuucuaccugaucagcaucuuccuccgccuggugaagaucccgacccaccggcacaucgucggcaagcccugccccaagccccaccgccugaaccacauggggaucugcuccugcggccucuacaagcagccgggggugcccgugcgguggaagcgcugaggacuaguaauaaggaaacuguaugaaugucugugggcaggaagugaagagauccuucuguaaagguuuuuggaauuaugucugcugaauaauaaacuuuuuugaaauaauaaaucugguagaaaaaugagaucucaaaggcucuuuucagagccaccaaaaaaaaaaaaaaaaaaaaaaaaaaaaaaaaaaaaaaaaaaaaaaaaaaaaaaaaaaaaaaaaaaaaaaaaaaaaaaaaaaaaaaaaaaaaaaaaaaaaa

SEQ ID NO: 41002 - RNA, 1809 nt, Artificial Sequence
  mRNA product Design b-4 (hSL-A100) comprising derived and/or modified sequence from LASV(Togo/2016/7082;Clade VI)__AMR44577__GPCmut12 (opt1)
aggagagucccgcagucggcguccagcggcucugcuuguucgugugugugucguugcaggccuuauucaagcuuaccaugggccagaucaucaccuucuuccaggaggugccccacgucaucgaggaggugaugaacaucgugcugaucgcccucagccugcuggccauccucaagggggucuacaacguggcgaccugcggcaucaucgggcuggugacguuccuguuccucugcggccgcuccugcagccugaucuacaagggguccuacgagcugcagacccucgagcugaacauggagacccugaacaugugcaugccgcucagcugcaccaagaacuccagccaccacuacauccgggucggcaacgagacgggccuggagcugacccucaccaacaccuccaucaucaaccacaaguucugcaaccugagcgacgcccacaagcgcaaccuguacgaccacgcccucauguccauccugagcacguuccaccuguccauccccaacuucaaccaguacgaggccaugagcugcgacuucaacgggggcaagaucuccgugcaguacaaccucagccacgccuacgcgguggacgccgccgagcacugcgggaccgucgccaacggcgugcugcagaccuucaugcggauggcguggggcggguccuacaucgcccuggacagcggccgcgggaacugggacugcaucaugaccuccuaccaguaccucaucauccagaacacgaccugggaggaccacugccaguucagccggcccucccccaucggcuaccuggggcugcucagccagcgcacccgggacaucuacaucagccgccggcugcugggcaccuucacguggacccucuccgacagcgagggcaacgagacccccgggggcuacugccugacccgcuggaugcugaucgaggccgagcucaagugcuucgggaacacggccguggccaagugcaacgagaagcacgacgaggaguucugcgacaugcugcggcuguucgacuucugcaagcaggcgauccagcgccucaaguccgaggcccagaugagcauccagcugaucaacaaggccgucaacgcccugaucaacgaccagcucaucaugaagaaccaccuccgggacaugaugggcauccccuacugcaacuacuccaaguacugcuaccugaaccacaccagcuccgggcgcaccagccugcccaagugcugccugguguccaacggcagcuaccugaacgagacccacuucuccgacgacaucgagcagcaggccgacaacaugaucacggagaugcuccagaaggaguacaucgaccggcagggcaagaccccgcuggggcugguggaccuguucgucuucagcaccuccuucuaccucaucagcaucuuccugcaccugaucaagaucccgacccaccgccacaucgugggcaagcccugccccaagccccaccggcucaaccacauggggaucugcuccugcggccuguacaagcagccgggggugcccacgcgcuggaagcggugaggacuaguaauaaggaaacuguaugaaugucugugggcaggaagugaagagauccuucuguaaagguuuuuggaauuaugucugcugaauaauaaacuuuuuugaaauaauaaaucugguagaaaaaugagaucucaaaggcucuuuucagagccaccaaaaaaaaaaaaaaaaaaaaaaaaaaaaaaaaaaaaaaaaaaaaaaaaaaaaaaaaaaaaaaaaaaaaaaaaaaaaaaaaaaaaaaaaaaaaaaaaaaaaa

SEQ ID NO: 41003 - RNA, 1809 nt, Artificial Sequence
  mRNA product Design b-4 (hSL-A100) comprising derived and/or modified sequence from LASV(KAK-428;Clade n.d. (VII))__ANH09740__GPCmut12 (opt1)
aggagagucccgcagucggcguccagcggcucugcuuguucgugugugugucguugcaggccuuauucaagcuuaccaugggccagaucgugaccuucuuccaggaggucccccacgugaucgaggaggugaugaacaucguccugaucgcccucagccugcuggccauccucaaggggcuguacaacuucgcgaccugcggcgugaucgggcugaucacguuccuccugcugugcggccgcuccugcagcgccaccuacaaggggcaguacgagcuccagacccuggagcugaacauggagucccucaacaugugcaugccgcugagcugcaccaagaacaacucccaccacuacauccgggccggcaacaacacgggccuggagcucacccugaccaacaccagcaucaucucccacaaguucugcaaccugagcgacgcccacaagaagaaccucuacgaccacacgcugauguccaucaucaccaccuuccaccugagcauccccaacuucaaccaguacgaggccauguccugcgacuucaacgggggcaagaucagcauccaguacaaccucucccacagcuacgcgggggacgccgcccagcacugcggcaccguggccaacgggguccugcagacguucaugcgcauggcguggggcggcuccuaccuggcccucgacagcgggcggcgcggcugggacugcaucaucuccagcuaccaguaccugaucauccagaacaccaccugggacgaccacugccaguucucccggcccagccccaucggguaccugggcuucgugagccagaagacccgcgacaucuacaucucccggcgccuccugggcacguucaccuggacccugagcgacuccgaggggcacgacaugccgggcggguacugccucacccgguggaugcugaucgaggccgaccugaagugcuucggcaacacggccguggccaagugcaacgagaagcacgacgaggaguucugcgacauguggcgccucuucgacuucugcaagcaggcgauccagcggcugaaggccgaggcccagaugaacauccagcugaucaacaaggccgucaacgcccucaucaacgaccagcugaugaugaagaaccaccuccgcgacaucauggggauccccuacugcaacuacagcaaguucugcuaccugaacaacaccaccaccggccggacgucccugccccgcugcugccugaucagcaacggcuccuaccucaacgagacccacuucagcgacgacaucgagcagcaggcggacaacaugaucaccgagaugcugcagaaggaguacauggaccggcaggggaagacgccccugggccucguggaccuguucguguucuccaccagcuucuaccugaucaccaucuuccugcaccucgucaagaucccgacccaccgccacaucguggggaagcccugccccaagccccaccggcugaaccacaugggcaucugcuccugcgggcuguacaagcagccgggcgugcccguccgcuggaagcggugaggacuaguaauaaggaaacuguaugaaugucugugggcaggaagugaagagauccuucuguaaagguuuuuggaauuaugucugcugaauaauaaacuuuuuugaaauaauaaaucugguagaaaaaugagaucucaaaggcucuuuucagagccaccaaaaaaaaaaaaaaaaaaaaaaaaaaaaaaaaaaaaaaaaaaaaaaaaaaaaaaaaaaaaaaaaaaaaaaaaaaaaaaaaaaaaaaaaaaaaaaaaaaaaa

SEQ ID NO: 41004 - RNA, 1809 nt, Artificial Sequence; identical to SEQ ID NO: 40998
  mRNA product Design b-4 (hSL-A100) comprising derived and/or modified sequence from LASV(Pinneo-NIG-1969;Clade I)__AIT17836__GPCmut12 (opt1)

SEQ ID NO: 41005 - RNA, 1809 nt, Artificial Sequence
  mRNA product Design b-4 (hSL-A100) comprising derived and/or modified sequence from LASV(ISTH0009-NIG-2011;Clade II)__AIT17404__GPCmut12 (opt1)
aggagagucccgcagucggcguccagcggcucugcuuguucgugugugugucguugcaggccuuauucaagcuuaccaugggccagaucaucaccuucuuccaggaggugccccacgucaucgaggaggugaugaacaucgugcugaucgcccucagccugcuggccauccucaaggggaucuacaacgucgcgaccugcggccuguucgggcugguguccuuccuccugcugugcggccgcagcugcuccacgaccuacaaggggguguacgagcuccagacccuggagcuggacauggccagccucaacaugugcaugccgcuguccugcaccaagaacaacagccaccacuacaucauggucggcaacgagacgggccuggagcucacccugaccaacaccuccaucaucaaccacaaguucugcaaccugagcgacgcccacaagaagaaccucuacgaccacgcccugauguccaucaucagcacguuccaccuguccauccccaacuucaaccaguacgaggccaugagcugcgacuucaacgggggcaagaucuccgugcaguacaaccucagccacgcguacgccguggacgccgccaaccacugcgggaccaucgcgaacggcguccugcagaccuucaugcggauggccuggggcggguccuacaucgcccuggacagcggcaagggguccugggacugcaucaugaccagcuaccaguaccucaucauccagaacacgaccugggaggaccacugccaguucucccgccccagccccaucggcuaccuggggcugcucagccagcggacccgcgacaucuacaucucccggcgccugcugggcaccuucacguggacccucagcgacuccgagggcaacgagacccccgggggcuacugccugacccgguggaugcugaucgaggccgagcucaagugcuucgggaacacggccguggcgaagugcaacgagaagcacgacgaggaguucugcgacaugcugcgccuguucgacuucugcaagcaggccauccggcgccucaagaccgaggcccagaugagcauccagcugaucaacaaggccgugaacgcccugaucaacgaccagcucaucaugaagaaccaccuccgggacaucaugggcauccccuacugcaacuacuccaaguacugcuaccugaaccacaccgucaccgggaagacgagccugccccgcugcugccugguguccaacggcagcuaccugaacgagacccacuucuccgacgacaucgagcagcaggcggacaacaugaucaccgagcuccugcagaaggaguacauggaccggcagggcaagaccccgcuggggcugguggaccucuucgucuucagcacguccuucuaccugaucagcaucuuccugcaccucaucaagaucccgacccaccgccacaucaccggcaagcccugccccaagccccaccggcugaaccacauggggaucugcuccugcggccuguacaagcacccgggggugcccgugaaguggaagcgcugaggacuaguaauaaggaaacuguaugaaugucugugggcaggaagugaagagauccuucuguaaagguuuuuggaauuaugucugcugaauaauaaacuuuuuugaaauaauaaaucugguagaaaaaugagaucucaaaggcucuuuucagagccaccaaaaaaaaaaaaaaaaaaaaaaaaaaaaaaaaaaaaaaaaaaaaaaaaaaaaaaaaaaaaaaaaaaaaaaaaaaaaaaaaaaaaaaaaaaaaaaaaaaaaa

SEQ ID NO: 41006 - RNA, 1809 nt, Artificial Sequence
  mRNA product Design b-4 (hSL-A100) comprising derived and/or modified sequence from LASV(ISTH2010-NIG-2012;Clade II)__AIT17482__GPCmut12 (opt1)
aggagagucccgcagucggcguccagcggcucugcuuguucgugugugugucguugcaggccuuauucaagcuuaccaugggccagaucaucaccuucuuccaggaggugccccacgucaucgaggaggugaugaacaucgugcugaucgcccucagccugcuggccauccucaaggggaucuacaacgucgcgaccugcggccuguucgggcugguguccuuccuccugcugugcggccgcagcugcuccacgaccuacaaggggguguacgagcuccagacccuggagcuggacauggccagccucaacaugugcaugccgcuguccugcaccaagaacaacagccaccacuacaucauggucggcaacgagacgggccuggagcucacccugaccaacaccuccaucaucaaccacaaguucugcaaccugagcgacgcccacaagaagaaccucuacgaccacgcccugauguccaucaucagcacguuccaccuguccauccccaacuucaaccaguacgaggccaugagcugcgacuucaacgggggcaagaucuccgugcaguacaaccucagccacgcguacgccguggacgccgccaaccacugcgggaccaucgcgaacggcguccugcagaccuucaugcggauggccuggggcggguccuacaucgcccuggacagcggcaagggguccugggacugcaucaugaccagcuaccaguaccucaucauccagaacaucacgugggaggaccacugccaguucucccgccccagccccaucggcuaccuggggcugcucagccagcggacccgcgacaucuacaucucccggcgccugcugggcaccuucaccuggacgcucagcgacuccgagggcaacgagacccccgggggcuacugccugacccgguggaugcugaucgaggccgagcucaagugcuucgggaacaccgccguggcgaagugcaacgagaagcacgacgaggaguucugcgacaugcugcgccuguucgacuucugcaagcaggccauccggcgccucaagacggaggcccagaugagcauccagcugaucaacaaggccgugaacgcccugaucaacgaccagcucaucaugaagaaccaccuccgggacaucaugggcauccccuacugcaacuacuccaaguacugcuaccugaaccacaccgucaccgggaagaccagccugccccgcugcugccugguguccaacggcagcuaccugaacgagacgcacuucuccgacgacaucgagcagcaggcggacaacaugaucaccgagcuccugcagaaggaguacaucgaccggcagggcaagaccccgcuggggcugguggaccucuucgucuucagcaccuccuucuaccugaucagcaucuuccugcaccucgugaagaucccgacgcaccgccacguggucggcaagcccugccccaagccccaccggcugaaccacauggggaucugcuccugcggccuguacaagcacccgggggugcccgugaaguggaagcgcugaggacuaguaauaaggaaacuguaugaaugucugugggcaggaagugaagagauccuucuguaaagguuuuuggaauuaugucugcugaauaauaaacuuuuuugaaauaauaaaucugguagaaaaaugagaucucaaaggcucuuuucagagccaccaaaaaaaaaaaaaaaaaaaaaaaaaaaaaaaaaaaaaaaaaaaaaaaaaaaaaaaaaaaaaaaaaaaaaaaaaaaaaaaaaaaaaaaaaaaaaaaaaaaaa

SEQ ID NO: 41007 - RNA, 1809 nt, Artificial Sequence
  mRNA product Design b-4 (hSL-A100) comprising derived and/or modified sequence from LASV(Lassa virus/H.sapiens-wt/NGA/2015/ISTH_0543;Clade II)__AVO03639__GPCmut12 (opt1)
aggagagucccgcagucggcguccagcggcucugcuuguucgugugugugucguugcaggccuuauucaagcuuaccaugggccagaucaucaccuucuuccaggaggugccccacgucaucgaggaggugaugaacaucgugcugaucgcccucagccugcuggccauccucaaggggaucuacaacgucgcgaccugcggccuguucgggcugguguccuuccuccugcugugcggccgcagcugcuccacgaccuacaaggggguguacgagcuccagacccuggagcuggacauggccaaccucaacaugugcaugccgcugagcugcaccaagaacaacucccaccacuacaucauggucggcaacgagacgggccuggagcucacccugaccaacaccagcaucaucaaccacaaguucugcaaccuguccgacgcccacaagaagaaccucuacgaccacgcccugaugagcaucaucuccacguuccaccugagcauccccaacuucaaccaguacgaggccauguccugcgacuucaacgggggcaagaucagcgugcaguacaaccucucccacaccuacgcgguggacgccgccaaccacugcgggaccaucgccaacggcguccugcagaccuucaugcggauggcguggggcgggagcuacaucgcccuggacuccggcaaggggagcugggacugcaucaugacguccuaccaguaccucgugauccagaacaccaccugggaggaccacugccaguucagccgccccucccccaucggcuaccuggggcugcucagccagcggacccgcgacaucuacaucagccggcgccugcugggcacguucaccuggacccucuccgacagcgagggcaacgagacccccgggggcuacugccugacgcgguggaugcugaucgaggccgagcucaagugcuucgggaacaccgccguggccaagugcaacgagaagcacgacgaggaguucugcgacaugcugcgccuguucgacuucugcaagcaggcgauccggcgccucaagaccgaggcccagauguccauccagcugaucaacaaggccgucaacgcccugaucaacgaccagcucaucaugaagaaccaccuccgggacaucaugggcaucccguacugcaacuacagcaaguacugcuaccugaaccacaccgugacggggaagaccucccugccccgcugcugccuggugagcaacggcuccuaccugaacgagacccacuucagcgacgacaucgagcagcaggccgacaacaugaucaccgagcuccugcagaaggaguacaucgaccggcagggcaagacgccccuggggcuggucgaccucuucguguucuccaccagcuucuaccugaucuccaucuuccugcaccucgugaagaucccgacccaccgccacaucaccggcaagcccugccccaagccccaccggcugaaccacauggggaucugcagcugcggccuguacaagcacccggggguccccgugaaguggaagcgcugaggacuaguaauaaggaaacuguaugaaugucugugggcaggaagugaagagauccuucuguaaagguuuuuggaauuaugucugcugaauaauaaacuuuuuugaaauaauaaaucugguagaaaaaugagaucucaaaggcucuuuucagagccaccaaaaaaaaaaaaaaaaaaaaaaaaaaaaaaaaaaaaaaaaaaaaaaaaaaaaaaaaaaaaaaaaaaaaaaaaaaaaaaaaaaaaaaaaaaaaaaaaaaaaa

SEQ ID NO: 41008 - RNA, 1809 nt, Artificial Sequence
  mRNA product Design b-4 (hSL-A100) comprising derived and/or modified sequence from LASV(Lassa virus/H.sapiens-wt/NGA/2016/ISTH_0009;Clade II)__AVO03571__GPCmut12 (opt1)
aggagagucccgcagucggcguccagcggcucugcuuguucgugugugugucguugcaggccuuauucaagcuuaccaugggccagaucaucaccuucuuccaggaggugccccacgucaucgaggaggugaugaacaucgugcugaucgcccucagccugcuggccauccucaaggggaucuacaacgucgcgaccugcggccugcuggggcucguguccuuccugcugcucugcggccgcagcugcuccacgaccuacaaggggguguacgagcugcagacccuggagcucgacauggccagccugaacaugugcaugccgcuguccugcaccaagaacaacagccaccacuacaucauggucggcaacgagacgggccucgagcugacccugaccaacaccuccaucaucaaccacaaguucugcaaccucagcgacgcccacaagaagaaccuguacgaccacgcccugauguccaucaucagcacguuccaccucuccauccccaacuucaaccaguacgaggccaugagcugcgacuucaacgggggccggaucuccgugcaguacaaccugagccacuccuacgcgguggacgccgccaaccacugcgggaccaucgccaacggcguccugcagaccuucaugcgcauggcguggggcgggagcuacaucgcccucgacuccggcaaggggagcugggacugcaucaugaccuccuaccaguaccugaucauccagaacacgaccugggaggaccacugccaguucagccggcccagccccaucggcuaccuggggcuccugucccagcgcacccgggacaucuacaucagccgccggcugcucggcaccuucacguggacccuguccgacagcgagggcaacgagacccccgggggcuacugccugacccgcuggaugcucaucgaggccgagcugaagugcuucgggaacacggccguggccaagugcaacgagaagcacgacgaggaguucugcgacaugcugcggcuguucgacuucugcaagcaggcgauccgccggcugaagaccgaggcccagauguccauccagcugaucaacaaggccgugaacgcccucaucaacgaccagcugaucaugaagaaccaccuccgcgacaucaugggcauccccuacugcaacuacagcaaguacugcuaccucaaccacaccgucaccgggaagacgucccugccccggugcugccuggugagcaacggcuccuaccucaacgagacccacuucagcgacgacaucgagcagcaggccgacaacaugaucaccgagcugcugcagaaggaguacaucgaccgccagggcaagaccccgcuggggcucguggaccuguucgucuucuccacgagcuucuaccugaucuccaucuuccuccaccuggugaagaucccgacccaccggcacaucaccggcaagcccugccccaagccccaccgccugaaccacauggggaucugcagcugcggccucuacaaccacccgggggugcccgucaaguggaagcggugaggacuaguaauaaggaaacuguaugaaugucugugggcaggaagugaagagauccuucuguaaagguuuuuggaauuaugucugcugaauaauaaacuuuuuugaaauaauaaaucugguagaaaaaugagaucucaaaggcucuuuucagagccaccaaaaaaaaaaaaaaaaaaaaaaaaaaaaaaaaaaaaaaaaaaaaaaaaaaaaaaaaaaaaaaaaaaaaaaaaaaaaaaaaaaaaaaaaaaaaaaaaaaaaa

SEQ ID NO: 41009 - RNA, 1809 nt, Artificial Sequence
  mRNA product Design b-4 (hSL-A100) comprising derived and/or modified sequence from LASV(Lassa virus/H.sapiens-wt/NGA/2016/ISTH_0017;Clade II)__AVO03567__GPCmut12 (opt1)
aggagagucccgcagucggcguccagcggcucugcuuguucgugugugugucguugcaggccuuauucaagcuuaccaugggccagaucaucaccuucuuccaggaggugccccacgucaucgaggaggugaugaacaucgugcugaucgcccucagccugcuggccauccucaaggggaucuacaacgucgcgaccugcggccuguucgggcugguguccuuccuccugcugugcggccgcagcugcuccacgaccuacaaggggguguacgagcuccagacccuggagcuggacauggccagccucaacaugugcaugccgcuguccugcaccaagaacaacagccaccacuacaucauggucggcaacgagacgggccuggagcucacccugaccaacaccuccaucaucaaccacaaguucugcaaccugagcgacgcccacaagaagaaccucuacgaccacgcccugauguccaucaucagcacguuccaccuguccauccccaacuucaaccaguacgaggccaugagcugcgacuucaacgggggcaagaucuccgugcaguacaaccucagccacaccuacgcgaucgacgccgccaaccacugcgggaccaucgccaacggcgugcugcagaccuucaugcggauggcguggggcggguccuacaucgcccuggacagcggcaagggguccugggacugcaucaugacgagcuaccaguaccucaucauccagaacaccaccugggaggaccacugccaguucucccgccccagccccaucggcuaccuggggcugcucagccagcggacccgcgacaucuacaucucccggcgccugcugggcacguucaccuggacccucagcgacuccgagggcaacgagacccccgggggcuacugccugacgcgguggaugcugaucgaggccgagcucaagugcuucgggaacaccgccgucgccaagugcaacgagaagcacgacgaggaguucugcgacaugcugcgccuguucgacuucugcaagcaggcgauccggcgccucaagaccgaggcccagaugagcauccagcugaucaacaaggccgugaacgcccugaucaacgaccagcucaucaugaagaaccaccuccgggacaucaugggcaucccguacugcaacuacuccaaguacugcuaccugaaccacaccgugacggggaagaccagccugccccgcugcugccuggucuccaacggcagcuaccugaacgagacccacuucuccgacgacaucgagcagcaggccgacaacaugaucaccgagcuccugcagaaggaguacauggaccggcagggcaagacgccccuggggcugguggaccucuucguguucagcaccuccuucuaccugaucagcaucuuccugcaccucguccgcaucccgacccaccggcacgugaucggcaagcccugccccaagccccaccgccugaaccacauggggaucugcuccugcggccuguacaagcacccgggggugcccgucaaguggaagcggugaggacuaguaauaaggaaacuguaugaaugucugugggcaggaagugaagagauccuucuguaaagguuuuuggaauuaugucugcugaauaauaaacuuuuuugaaauaauaaaucugguagaaaaaugagaucucaaaggcucuuuucagagccaccaaaaaaaaaaaaaaaaaaaaaaaaaaaaaaaaaaaaaaaaaaaaaaaaaaaaaaaaaaaaaaaaaaaaaaaaaaaaaaaaaaaaaaaaaaaaaaaaaaaaa

SEQ ID NO: 41010 - RNA, 1809 nt, Artificial Sequence
  mRNA product Design b-4 (hSL-A100) comprising derived and/or modified sequence from LASV(Lassa virus/H.sapiens-wt/NGA/2018/ISTH_0959;Clade II)__AVV65099__GPCmut12 (opt1)
aggagagucccgcagucggcguccagcggcucugcuuguucgugugugugucguugcaggccuuauucaagcuuaccaugggccagaucaucaccuucuuccaggaggugccccacgucaucgaggaggugaugaacaucgugcugaucgcccucagccugcuggccauccucaaggggaucuacaacgucgugaccugcggccuguucgggcugguguccuuccuccugcugugcggccgcagcugcuccacgaccuacaagggggucuacgagcuccagacccuggagcuggacauggcgagccucaacaugugcaugccgcuguccugcaccaagaacaacagccaccacuacaucauggugggcaacgagacgggccuggagcucacccugaccaacaccuccaucaucaaccacaaguucugcaaccugagcgacgcccacaagaagaaccucuacgaccacgcccugauguccaucaucagcacguuccaccuguccauccccaacuucaaccaguacgaggccaugagcugcgacuucaacgggggcaagaucuccgugcaguacaaccucagccacgccuacgcgaucgacgccgccaaccacugcgggaccaucgccaacggcguccugcagaccuucaugcggauggcguggggcggguccuacaucgcccuggacagcggcaagggguccugggacugcaucaugaccagcuaccaguaccucaucauccagaacacgaccugggaggaccacugccaguucucccgccccagccccaucggcuaccuggggcugcucagccagcggacccgcgacaucuacaucucccggcgccugcugggcaccuucacguggacccucagcgacuccgagggcaacgagacccccgggggcuacugccugacccgguggaugcugaucgaggccgagcucaagugcuucgggaacacggccguggccaagugcaacgagaagcacgacgaggaguucugcgacaugcugcgccuguucgacuucugcaagcaggcgauccggcgccucaagaccgaggcccagaugagcauccagcugaucaacaaggccgugaacgcccugaucaacgaccagcucaucaugaagaaccaccuccgggacaucaugggcauccccuacugcaacuacuccaaguacugcuaccugaaccacaccgucaccgggaagacgagccugccccgcugcugccugguguccaacggcagcuaccugaacgagacccacuucuccgacgacaucgagcagcaggccgacaacaugaucaccgagcuccugcagaaggaguacaucgaccggcagggcaagaccccgcuggggcugguggaccucuucgucuucagcacguccuucuaccugaucagcaucuuccugcaccucgugaagaucccgacccaccgccacgugaucggcaagcccugccccaagccccaccggcugaaccacauggggaucugcuccugcggccuguacaagcacccggggguccccgugaaguggaagcgcugaggacuaguaauaaggaaacuguaugaaugucugugggcaggaagugaagagauccuucuguaaagguuuuuggaauuaugucugcugaauaauaaacuuuuuugaaauaauaaaucugguagaaaaaugagaucucaaaggcucuuuucagagccaccaaaaaaaaaaaaaaaaaaaaaaaaaaaaaaaaaaaaaaaaaaaaaaaaaaaaaaaaaaaaaaaaaaaaaaaaaaaaaaaaaaaaaaaaaaaaaaaaaaaaa

SEQ ID NO: 41011 - RNA, 1809 nt, Artificial Sequence
  mRNA product Design b-4 (hSL-A100) comprising derived and/or modified sequence from LASV(LASV003-NIG-2008;Clade II)__AIT17580__GPCmut12 (opt1)
aggagagucccgcagucggcguccagcggcucugcuuguucgugugugugucguugcaggccuuauucaagcuuaccaugggccagaucaucaccuucuuccaggaggugccccacgucaucgaggaggugaugaacaucgugcugaucgcccucagccugcuggccauccucaaggggaucuacaacgucgcgaccugcggccuguucgggcugguguccuuccuccugcugugcggccgcagcugcuccacgaccuacaaggggguguacgagcuccagacccuggagcuggacauggccagccucaacaugugcaugccgcuguccugcaccaagaacaacagccaccacuacaucauggucggcaacgagacgggccuggagcucacccugaccaacaccuccaucaucaaccacaaguucugcaaccugagcgacgcccacaagaagaaccucuacgaccacgcccugauguccaucaucagcacguuccaccuguccauccccaacuucaaccaguacgaggccaugagcugcgacuucaacgggggcaagaucuccgugcaguacaaccucagccacaccuacgcgguggacgccgccaaccacugcgggaccaucgccaacggcguccugcagaccuucaugcggauggcguggggcggguccuacaucgcccuggacagcggcaagggguccugggacugcaucaugacgagcuaccaguaccucaucauccagaacaccaccugggaggaccacugccaguucucccgccccagccccaucggcuaccuggggcugcucagccagcggacccgcgacaucuacaucucccggcgccugcugggcacguucaccuggacccucagcgacuccgagagcaacgagaccccgggcggguacugccugacgcgguggaugcugaucgaggccgagcucaagugcuucggcaacaccgccguggccaagugcaacgagaagcacgacgaggaguucugcgacaugcugcgccuguucgacuucugcaagcaggcgauccggcgccucaaggccgaggcccagauguccauccagcugaucaacaaggccgugaacgcccugaucaacgaccagcucaucaugaagaaccaccuccgggacaucauggggauccccuacugcaacuacagcaaguacugcuaccugaaccacaccgucaccggccgcacgucccugccccggugcugccuggugagcaacggguccuaccugaacgagacccacuucagcgacgacaucgagcagcaggcggacaacaugaucaccgagcuccugcagaaggaguacauggaccgccagggcaagacgccccugggccugguggaccucuucgucuucuccaccagcuucuaccugaucuccaucuuccugcaccucgugaagaucccgacccaccggcacgugaucgggaagcccugccccaagccccaccgccugaaccacaugggcaucugcagcugcgggcuguacaagcacccgggcguccccgugaaguggaagcggugaggacuaguaauaaggaaacuguaugaaugucugugggcaggaagugaagagauccuucuguaaagguuuuuggaauuaugucugcugaauaauaaacuuuuuugaaauaauaaaucugguagaaaaaugagaucucaaaggcucuuuucagagccaccaaaaaaaaaaaaaaaaaaaaaaaaaaaaaaaaaaaaaaaaaaaaaaaaaaaaaaaaaaaaaaaaaaaaaaaaaaaaaaaaaaaaaaaaaaaaaaaaaaaaa

SEQ ID NO: 41012 - RNA, 1809 nt, Artificial Sequence
  mRNA product Design b-4 (hSL-A100) comprising derived and/or modified sequence from LASV(LASV035-NIG-2009;Clade II)__AIT17588__GPCmut12 (opt1)
aggagagucccgcagucggcguccagcggcucugcuuguucgugugugugucguugcaggccuuauucaagcuuaccaugggccagaucaucaccuucuuccaggaggugccccacgucaucgaggaggugaugaacaucgugcugaucgcccucagccugcuggccauccucaaggggaucuacaacgucgcgaccugcggccuguucgggcugguguccuuccuccugcugugcggccgcagcugcuccacgaccuacaaggggguguacgagcuccagacccuggagcuggacauggccagccucaacaugugcaugccgcuguccugcaccaagaacaacagccaccacuacaucauggucggcaacgagacgggccuggagcucacccugaccaacaccuccaucaucaaccacaaguucugcaaccugagcgacgcccacaagaagaaccucuacgaccacgcccugauguccaucaucagcacguuccaccuguccauccccaacuucaaccaguacgaggccaugagcugcgacuucaacgggggcaagaucuccgugcaguacaaccucagccacgcguacgccguggacgccgccaaccacugcgggaccaucgcgaacggcguccugcagaccuucaugcggauggccuggggcggguccuacaucgcccuggacagcggcaagggguccugggacugcaucaugaccagcuaccaguaccucaucauccagaacacgaccugggaggaccacugccaguucucccgccccagccccaucggcuaccuggggcugcucagccagcggacccgcgacaucuacaucucccggcgccugcugggcaccuucacguggacccucagcgacuccgagggcaacgagacccccgggggcuacugccugacccgguggaugcugaucgaggccgagcucaagugcuucgggaacacggccguggcgaagugcaacgagaagcacgacgaggaguucugcgacaugcugcgccuguucgacuucugcaagcaggccauccggcgccucaaggccgaggcccagaugagcauccagcugaucaacaaggccgugaacgcgcugaucaacgaccagcucaucaugaagaaccaccuccgggacaucaugggcauccccuacugcaacuacuccaaguacugcuaccugaaccacaccgucaccgggaagaccagccugccccgcugcugccugguguccaacggcagcuaccugaacgagacgcacuucuccgacgacaucgagcagcaggccgacaacaugaucaccgagcuccugcagaaggaguacaucgaccggcagggcaagaccccgcuggggcugguggaccucuucgucuucagcaccuccuucuaccugaucagcaucuuccugcaccucgugaagaucccgacgcaccgccacgugaucggcaagcccugccccaagccccaccggcugaaccacauggggaucugcuccugcggccuguacaagcacccggggguccccgugaaguggaagcgcugaggacuaguaauaaggaaacuguaugaaugucugugggcaggaagugaagagauccuucuguaaagguuuuuggaauuaugucugcugaauaauaaacuuuuuugaaauaauaaaucugguagaaaaaugagaucucaaaggcucuuuucagagccaccaaaaaaaaaaaaaaaaaaaaaaaaaaaaaaaaaaaaaaaaaaaaaaaaaaaaaaaaaaaaaaaaaaaaaaaaaaaaaaaaaaaaaaaaaaaaaaaaaaaaa

SEQ ID NO: 41013 - RNA, 1809 nt, Artificial Sequence
  mRNA product Design b-4 (hSL-A100) comprising derived and/or modified sequence from LASV(LASV1000-NIG-2009;Clade II)__AIT17782__GPCmut12 (opt1)
aggagagucccgcagucggcguccagcggcucugcuuguucgugugugugucguugcaggccuuauucaagcuuaccaugggccagaucaucaccuucuuccaggaggugccccacgucaucgaggaggugaugaacaucgugcugaucgcccucagccugcuggccauccucaaggggaucuacaacgucgcgaccugcggccuguucgggcugguguccuuccuccugcugugcggccgcagcugcuccacgaccuacaaggggguguacgagcuccagacccuggagcuggacauggccagccucaacaugugcaugccgcuguccugcaccaagaacaacagccaccacuacaucauggucggcaacgagacgggccuggagcucacccugaccaacaccuccaucaucaaccacaaguucugcaaccugagcgacgcccacaagaagaaccucuacgaccacgcccugauguccaucaucagcacguuccaccuguccauccccaacuucaaccaguacgaggccaugagcugcgacuucaacgggggcaagaucuccgugcaguacaaccucagccacaccuacgcgguggacgccgccaaccacugcgggaccaucgccaacggcguccugcagaccuucaugcggauggcguggggcggguccuacaucgcccuggacagcggcaagggguccugggacugcaucaugacgagcuaccaguaccucaucauccagaacaccaccugggaggaccacugccaguucucccgccccagccccaucggcuaccuggggcugcucagccagcggacccgcgacaucuacaucucccggcgccugcugggcacguucaccuggacccucagcgacuccgagggcaacgagacccccgggggcuacugccugacgcgguggaugcugaucgaggccgagcucaagugcuucgggaacaccgccguggccaagugcaacgagaagcacgacgaggaguucugcgacaugcugcgccuguucgacuucugcaagcaggcgaucaagcggcucaagaccgaggcccagaugagcauccagcugaucaacaaggccgugaacgcccugaucaacgaccagcucaucaugaagaaccaccuccgcgacaucaugggcaucccguacugcaacuacuccaaguacugcuaccugaaccacaccgucacggggaagaccagccugccccggugcugccugguguccaacggcagcuaccugaacgagacccacuucuccgacgacaucgagcagcaggccgacaacaugaucaccgagcuccugcagaaggaguacaucgaccgccagggcaagacgccccuggggcugguggaccucuucgucuucagcaccuccuucuaccugaucagcaucuuccugcaccucgugaagaucccgacccaccggcacguggucggcaagcccugccccaagccccaccgccugaaccacauggggaucugcuccugcggccuguacaagcacccgggggugcccgugaaguggaagcggugaggacuaguaauaaggaaacuguaugaaugucugugggcaggaagugaagagauccuucuguaaagguuuuuggaauuaugucugcugaauaauaaacuuuuuugaaauaauaaaucugguagaaaaaugagaucucaaaggcucuuuucagagccaccaaaaaaaaaaaaaaaaaaaaaaaaaaaaaaaaaaaaaaaaaaaaaaaaaaaaaaaaaaaaaaaaaaaaaaaaaaaaaaaaaaaaaaaaaaaaaaaaaaaaa

SEQ ID NO: 41014 - RNA, 1809 nt, Artificial Sequence
  mRNA product Design b-4 (hSL-A100) comprising derived and/or modified sequence from LASV(LASV221-NIG-2010;Clade II)__AIT17624__GPCmut12 (opt1)
aggagagucccgcagucggcguccagcggcucugcuuguucgugugugugucguugcaggccuuauucaagcuuaccaugggccagaucaucaccuucuuccaggaggugccccacgucaucgaggaggugaugaacaucgugcugaucgcccucagccugcuggccauccucaaggggaucuacaacgucgcgaccugcggccuguucgggcugguguccuuccuccugcugugcggccgcagcugcuccacgaccuacaaggggguguacgagcuccagacccuggagcuggacauggccagccucaacaugugcaugccgcuguccugcaccaagaacaacagccaccacuacaucauggucggcaacgagacgggccuggagcucacccugaccaacaccuccaucaucaaccacaaguucugcaaccugagcgacgcccacaagaagaaccucuacgaccacgcccugauguccaucaucagcacguuccaccuguccauccccaacuucaaccaguacgaggccaugagcugcgacuucaacgggggcaagaucuccgugcaguacaaccucagccacaccuacgcgaucgacgccgccaaccacugcgggaccaucgccaacggcgugcugcagaccuucaugcggauggcguggggcggguccuacaucgcccuggacagcggcaagggguccugggacugcaucaugacgagcuaccaguaccucaucauccagaacaccaccugggaggaccacugccaguucucccgccccagccccaucggcuaccuggggcugcucagccagcggacccgcgacaucuacaucucccggcgccugcugggcacguucaccuggacccucagcgacuccgagggcaacgagacccccgggggcuacugccugacgcgguggaugcugaucgaggccgagcucaagugcuucgggaacaccgccgucgccaagugcaacgagaagcacgacgaggaguucugcgacaugcugcgccuguucgacuucugcaagcaggcgauccggcgccucaagaccgaggcccagaugagcauccagcugaucaacaaggccgugaacgcccugaucaacgaccagcucaucaugaagaaccaccuccgggacaucaugggcaucccguacugcaacuacuccaaguacugcuaccugaaccacaccgugacggggaagaccagccugccccgcugcugccuggucuccaacggcagcuaccugaacgagacccacuucuccgacgacaucgagcagcaggccgacaacaugaucaccgagaugcuccagaaggaguacauggaccggcagggcaagacgccccuggggcugguggaccuguucguguucagcaccuccuucuaccucaucagcaucuuccugcaccuggucaagaucccgacccaccgccacgugaucggcaagcccugccccaagccccaccggcucaaccacauggggaucugcuccugcggccuguacaagcacccgggggugcccgucaaguggaagcgcugaggacuaguaauaaggaaacuguaugaaugucugugggcaggaagugaagagauccuucuguaaagguuuuuggaauuaugucugcugaauaauaaacuuuuuugaaauaauaaaucugguagaaaaaugagaucucaaaggcucuuuucagagccaccaaaaaaaaaaaaaaaaaaaaaaaaaaaaaaaaaaaaaaaaaaaaaaaaaaaaaaaaaaaaaaaaaaaaaaaaaaaaaaaaaaaaaaaaaaaaaaaaaaaaa

SEQ ID NO: 41015 - RNA, 1809 nt, Artificial Sequence
  mRNA product Design b-4 (hSL-A100) comprising derived and/or modified sequence from LASV(LASV237-NIG-2010;Clade II)__AIT17638__GPCmut12 (opt1)
aggagagucccgcagucggcguccagcggcucugcuuguucgugugugugucguugcaggccuuauucaagcuuaccaugggccagaucaucaccuucuuccaggaggugccccacgucaucgaggaggugaugaacaucgugcugaucgcccucagccugcuggccauccucaaggggaucuacaacgucgcgaccugcggccuguucgggcugguguccuuccuccugcugugcggccgcagcugcuccacgaccuacaaggggguguacgagcuccagacccuggagcuggacauggccagccucaacaugugcaugccgcuguccugcaccaagaacaacagccaccacuacaucauggucggcaacgagacgggccuggagcucacccugaccaacaccuccaucaucaaccacaaguucugcaaccugagcgacgcccacaagaaggaccucuacgaccacgcccugauguccaucaucagcacguuccaccuguccauccccaacuucaaccaguacgaggccaugagcugcgacuucaacgggggcaagaucuccgugcaguacaaccucagccacaccuacgcgguggacgccgccaaccacugcgggaccaucgccaacggcguccugcagaccuucaugcggauggcguggggcggguccuacaucgcccuggacagcggcaagggguccugggacugcaucaugacgagcuaccaguaccucaucauccagaacaccaccugggaggaccacugccaguucucccgccccagccccaucggcuaccuggggcugcucagccagcggacccgcgacaucuacaucucccggcgccugcugggcacguucaccuggacccucagcgacuccgagggcaacgagacccccgggggcuacugccugacgcgguggaugcugaucgaggccgagcucaagugcuucgggaacaccgccguggccaagugcaacgagaagcacgacgaggaguucugcgacaugcugcgccuguucgacuucugcaagcaggcgauccggcgccucaagaccgaggcccagaugagcauccagcugaucaacaaggccgugaacgcccugaucaacgaccagcucaucaugaagaaccaccuccgggacaucaugggcaucccguacugcaacuacuccaaguacugcuaccugaaccacaccgucacggggaagaccagccugccccgcugcugccugguguccaacggcagcuaccugaacgagacccacuucuccgacgacaucgagcagcaggccgacaacaugaucaccgagcuccugcagaaggaguacauggaccggcagggcaagacgccccuggggcugguggaccucuucgucuucagcaccuccuucuaccugaucagcaucuuccugcaccucaucaagaucccgacccaccgccacaucaccggcaagcccugccccaagccccaccggcugaaccacauggggaucugcuccugcggccuguacaagcacccgggggugcccgugaaguggaagcgcugaggacuaguaauaaggaaacuguaugaaugucugugggcaggaagugaagagauccuucuguaaagguuuuuggaauuaugucugcugaauaauaaacuuuuuugaaauaauaaaucugguagaaaaaugagaucucaaaggcucuuuucagagccaccaaaaaaaaaaaaaaaaaaaaaaaaaaaaaaaaaaaaaaaaaaaaaaaaaaaaaaaaaaaaaaaaaaaaaaaaaaaaaaaaaaaaaaaaaaaaaaaaaaaaa

SEQ ID NO: 41016 - RNA, 1809 nt, Artificial Sequence
  mRNA product Design b-4 (hSL-A100) comprising derived and/or modified sequence from LASV(LASV253-NIG-2011;Clade II)__AIT17670__GPCmut12 (opt1)
aggagagucccgcagucggcguccagcggcucugcuuguucgugugugugucguugcaggccuuauucaagcuuaccaugggccagaucaucaccuucuuccaggaggugccccacgucaucgaggaggugaugaacaucgugcugaucgcccucagccugcuggccauccucaaggggaucuacaacgucgcgaccugcggccuguucgggcugguguccuuccuccugcugugcggccgcagcugcuccacgaccuacaaggggguguacgagcuccagacccuggagcuggacauggccagccucaacaugugcaugccgcuguccugcaccaagaacaacagccaccacuacaucauggucggcaacgagacgggccuggagcucacccugaccaacaccuccaucaucaaccacaaguucugcaaccugagcgacgcccacaagaagaaccucuacgaccacgcccugauguccaucaucagcacguuccaccuguccauccccaacuucaaccaguacgaggccaugagcugcgacuucaacgggggcaagaucuccgugcaguacaaccucagccacaccuacgcgguggacgccgccaaccacugcgggaccaucgccaacggcguccugcagaccuucaugcggauggcguggggcggguccuacaucgcccuggacagcggcaagggguccugggacugcaucaugacgagcuaccaguaccucaucauccagaacaccaccugggaggaccacugccaguucucccgccccagccccaucggcuaccuggggcugcucagccagcggacccgcgacaucuacaucucccggcgccugcugggcacguucaccuggacccucagcgacuccgagggcaacgagacccccgggggcuacugccugacgcgguggaugcugaucgaggccgagcucaagugcuucgggaacaccgccguggccaagugcaacgagaagcacgacgaggaguucugcgacaugcugcgccuguucgacuucugcaagcaggcgauccggcgccucaaggccgaggcccagaugagcauccagcugaucaacaaggccgugaacgcccugaucaacgaccagcucaucaugaagaaccaccuccgggacaucaugggcauccccuacugcaacuacuccaaguacugcuaccugaaccacaccgucaccgggcgcacgagccugccccggugcugccugguguccaacggcagcuaccugaacgagacccacuucuccgacgacaucgagcagcaggcggacaacaugaucaccgagcuccugcagaaggaguacaucgaccgccagggcaagaccccgcuggggcugguggaccucuucgucuucagcacguccuucuaccugaucagcaucuuccugcaccucgugaagaucccgacccaccggcacaucaucggcaagcccugccccaagccccaccgccugaaccacauggggaucugcuccugcggccuguacaagcacccgggggugcccgucaaguggaagcggugaggacuaguaauaaggaaacuguaugaaugucugugggcaggaagugaagagauccuucuguaaagguuuuuggaauuaugucugcugaauaauaaacuuuuuugaaauaauaaaucugguagaaaaaugagaucucaaaggcucuuuucagagccaccaaaaaaaaaaaaaaaaaaaaaaaaaaaaaaaaaaaaaaaaaaaaaaaaaaaaaaaaaaaaaaaaaaaaaaaaaaaaaaaaaaaaaaaaaaaaaaaaaaaaa

SEQ ID NO: 41017 - RNA, 1809 nt, Artificial Sequence
  mRNA product Design b-4 (hSL-A100) comprising derived and/or modified sequence from LASV(LASV254-NIG-2011;Clade II)__AIT17674__GPCmut12 (opt1)
aggagagucccgcagucggcguccagcggcucugcuuguucgugugugugucguugcaggccuuauucaagcuuaccaugggccagaucaucaccuucuuccaggaggugccccacgucaucgaggaggugaugaacaucgugcugaucgcccucagccugcuggccauccucaaggggaucuacaacgucgcgaccugcggccuguucgggcugguguccuuccuccugcugugcggccgcagcugcuccacgaccuacaaggggguguacgagcuccagacccuggagcuggacaugaccaaccucaacaugugcaugccgcugagcugcacgaagaacaacucccaccacuacaucauggucggcaacgagaccggccuggagcucacccugaccaacacgagcaucaucaaccacaaguucugcaaccuguccgacgcccacaagaagaaccucuacaaccacgcccugaugagcaucaucuccaccuuccaccugagcauccccaacuucaaccaguacgaggccauguccugcgacuucaacgggggcaagaucagcgugcaguacaaccucucccacagcuacgccguggacgcggccaaccacugcgggaccaucgccaacggcguccugcagaccuucaugcggauggccuggggcggguccuacaucgcgcuggacagcggcaaggggaacugggacugcaucaugacguccuaccaguaccucaucauccagaacaccaccugggaggaccacugccaguucagccgccccucccccaucggcuaccuggggcugcucagccagcggacccgcgacaucuacaucagccggcgccugcugggcacguucaccuggacccucuccgacagcgagggcaacgagacccccgggggcuacugccugacgcgguggaugcugaucgaggccgagcucaagugcuucgggaacaccgccguggccaagugcaacgagaagcacgacgaggaguucugcgacaugcugcgccuguucgacuucugcaagcaggccauccggcgccucaagaccgaggcgcaggccaacauccagcugaucaacaaggccgugaacgcccugaucaacgaccagcucaucaugaagaaccaccuccgggacaucaugggcaucccguacugcaacuacuccaaguacugcuaccugaaccacaccgucacggggaagaccagccugccccgcugcugccugguguccaacggcagcuaccugaacgagacccacuucuccgacgacaucgagcagcaggccgacaacaugaucaccgagcuccugcagaaggaguacauggaccggcagggcaagacgccccuggggcugguggaccucuucgucuucagcaccuccuucuaccugaucagcaucuuccugcaccucgugaagaucccgacccaccgccacgugaucggcaagcccugccccaagccccaccggcugaaccacauggggaucugcuccugcggccuguacaagcacccggggguccccgugaaguggaagcgcugaggacuaguaauaaggaaacuguaugaaugucugugggcaggaagugaagagauccuucuguaaagguuuuuggaauuaugucugcugaauaauaaacuuuuuugaaauaauaaaucugguagaaaaaugagaucucaaaggcucuuuucagagccaccaaaaaaaaaaaaaaaaaaaaaaaaaaaaaaaaaaaaaaaaaaaaaaaaaaaaaaaaaaaaaaaaaaaaaaaaaaaaaaaaaaaaaaaaaaaaaaaaaaaaa

SEQ ID NO: 41018 - RNA, 1809 nt, Artificial Sequence
  mRNA product Design b-4 (hSL-A100) comprising derived and/or modified sequence from LASV(Nig08-A19;Clade III)__ADU56618__GPCmut12 (opt1)
aggagagucccgcagucggcguccagcggcucugcuuguucgugugugugucguugcaggccuuauucaagcuuaccaugggccagaucgugaccuucuuccaggaggucccccacgugaucgaggaggugaugaacaucguccugaucgcccucagcauccuggccauccugaaggggcucuacaacaucgcgaccugcggccugaucgggcuggugacguuccuccugcuguccggccgcagcugcuccaugaccuacaaggggguguacgagcuccagacccuggagcugaacaugaacacccucaacaugugcaugccgcugagcugcacgaagaacaacucccaccacuacaucauggucggcaacgagaccggccuggagcucacccugaccaacacgagccugcuccaccacaaguucugcaaccuguccgacgcccacaagaagaaccuguacgaccacacccucaugagcaucaucuccaccuuccaccugagcauccccaacuucaaccaguacgaggccauguccugcgacuucaacgggggcaagaucaccgugcaguacaaccugagccacuccuacgccaucgacgccgcgaaccacugcgggacgguggccaacggcguccuccagaccuucaugcggauggccuggggcgggagcuacaucgcccuggacuccggccgcgggaagugggacugcaucaugaccagcuaccaguaccugaucauccagaacaccacgugggaggaccacugccaguucucccggcccagccccaucggcuaccucgggcugcugucccagcgcacccgggacaucuacaucagccgccggcuccugggcaccuucaccuggacgcugagcgacuccgagggcaacgagacccccgggggcuacugccucacccgcuggaugcugaucgaggcggagcugaagugcuucgggaacaccgccguggccaagugcaacgagaagcacgacgaggaguucugcgacaugcuccggcuguucgacuucugcaagcaggccauccgccggcugaaggccgaggcgcagaugagcauccagcucaucaacaaggccgugaacgcccugaucaacgaccagcugaucaugaagaaccaccuccgcgacaucaugggcauccccuacugcaacuacuccaaguacugcuaccugaaccacacgagcaccgggcggaccucccugccccgcugcugccucgucagcaacggcuccuaccugaacgagacccacuucagcgacgacaucgagcagcaggccgacaacaugaucacggagaugcugcagaaggaguaccuggaccggcagggcaagaccccgcucgggcugguggaccuguucguguucuccaccagcuucuaccucaucuccaucuuccugcaccuggucaagaucccgacccaccgccacaucgugggcaagcccugccccaagccccaccggcucaaccacauggggaucugcagcugcggccuguacaagcagccgggggugcccguccgcuggaagcggugaggacuaguaauaaggaaacuguaugaaugucugugggcaggaagugaagagauccuucuguaaagguuuuuggaauuaugucugcugaauaauaaacuuuuuugaaauaauaaaucugguagaaaaaugagaucucaaaggcucuuuucagagccaccaaaaaaaaaaaaaaaaaaaaaaaaaaaaaaaaaaaaaaaaaaaaaaaaaaaaaaaaaaaaaaaaaaaaaaaaaaaaaaaaaaaaaaaaaaaaaaaaaaaaa

SEQ ID NO: 41019 - RNA, 1812 nt, Artificial Sequence
  mRNA product Design b-4 (hSL-A100) comprising derived and/or modified sequence from LASV(G1180-SLE-2010;Clade IV)__AIT17168__GPCmut12 (opt1)
aggagagucccgcagucggcguccagcggcucugcuuguucgugugugugucguugcaggccuuauucaagcuuaccaugggccagaucgugaccuucuuccaggaggucccccacgugaucgaggaggugaugaacaucguccugaucgcccucagcauccuggccgugcugaaggggcucuacaacuucgcgaccugcggccugguggggcugcucacguuccugcugcucugcggccgcuccugcaccgccagccgguacaagggggucuacgagcugcagacccuggagcucaacauggagacccugaacaugugcaugccgcuguccugcacgaagaacaacagccaccacuacaucauggugggcaacgagaccggccucgagcugacccugaccaacacguccaucaucaaccacaaguucugcaaccucagcgacgcccacaagaagaaccuguacgaccacgcccugauguccaucaucagcaccuuccaccucuccauccccaacuucaaccaguacgaggccaugagcugcgacuucaacgggggcaagaucuccgugcaguacaaccugagccacuccuacgcgggggacgccgccaaccacugcggcaccgucgccaacggggugcugcagaccuucaugcgcauggcguggggcggcagcuacaucgcccucgacuccgggcacggcagcugggacugcaucaugacguccuaccaguaccugaucauccagaacaccaccugggaggaccacugccaguucagccggcccucccccaucggguaccugggccuccugagccagcgcacccgggacaucuacaucagccgccggcugcucggcacguucaccuggacccuguccgacagcgaggggaaggacaccccgggcggguacugccugacgcgcuggaugcucaucgaggccgagcugaagugcuucggcaacaccgccguggccaagugcaacgagaagcacgacgaggaguucugcgacaugcugcggcuguucgacuucugcaagcaggcgauccagcgccugaaggccgaggcccagauguccauccagcugaucaacaaggccgucaacgcccucaucaacgaccagcugaucaugaagaaccaccuccgggacaucauggggauccccuacugcaacuacagcaaguacugcuaccucaaccacaccaccacgggcaagaccucccugcccaagugcugccuggugagcaacggcuccuaccucaacgagacccacuucagcgacgacaucgagcagcaggcggacaacaugaucaccgagaugcugcagaaggaguacauggagcgccaggggaagacgccccugggccugguggaccucuucgucuucuccaccagcuucuaccugaucuccaucuuccugcaccucgugaagaucccgacccaccggcacaucgugggcaagagcugccccaagccccaccgccugaaccacauggggaucugcuccugcgggcuguacaagcagcccggcgucccggugaaguggaagcggugaggacuaguaauaaggaaacuguaugaaugucugugggcaggaagugaagagauccuucuguaaagguuuuuggaauuaugucugcugaauaauaaacuuuuuugaaauaauaaaucugguagaaaaaugagaucucaaaggcucuuuucagagccaccaaaaaaaaaaaaaaaaaaaaaaaaaaaaaaaaaaaaaaaaaaaaaaaaaaaaaaaaaaaaaaaaaaaaaaaaaaaaaaaaaaaaaaaaaaaaaaaaaaaaa

SEQ ID NO: 41020 - RNA, 1812 nt, Artificial Sequence
  mRNA product Design b-4 (hSL-A100) comprising derived and/or modified sequence from LASV(G1442-SLE-2011;Clade IV)__AIT17180__GPCmut12 (opt1)
aggagagucccgcagucggcguccagcggcucugcuuguucgugugugugucguugcaggccuuauucaagcuuaccaugggccagaucgugaccuucuuccaggaggucccccacgugaucgaggaggugaugaacaucguccugaucgcccucagcauccuggccgugcugaaggggcucuacaacguggcgaccugcggccugaucgggcuggucaccuuccuccugcugugcggccgcuccugcaccaccacccucuacaaggggguguacgagcugcagacgcuggagcucaacauggagacccugaacaugugcaugccgcugagcugcaccaagaacaacucccaccacuacauccgggugggcaacgagaccggccucgagcugacgcugaccaacaccagcaucaucaaccacaaguucugcaaccucuccgacgcccacaagaagaaccuguacgaccacgcccugaugagcaucaucuccaccuuccaccucagcauccccaacuucaaccaguacgaggccauguccugcgacuucaacgggggcaagaucagcguccaguacaaccugucccacagcuacgccggggacgcggccaaccacugcggcacgguggccaacggggugcugcagaccuucaugcgcauggccuggggcggcuccuacaucgcgcucgacagcgggcggggcaacugggacugcaucaugaccuccuaccaguaccugaucauccagaacaccacgugggacgaccacugccaguucagccgccccucccccaucggguaccugggccuccugagccagcggacccgcgacgucuacaucucccggcgccugcucggcaccuucaccuggacgcugagcgacagcgaggggaaggacaccccgggcggguacugccugacccgguggaugcucaucgaggccgagcugaagugcuucggcaacaccgccguggccaagugcaacgagaagcacgacgaggaguucugcgacaugcugcgccucuucgacuucugcaagcaggccauccagcggcugaaggcggaggcccagauguccauccagcugaucaacaaggccgugaacgcccucaucaacgaccagcugaucaugaagaaccaccuccgcgacaucauggggauccccuacugcaacuacagcaaguacugcuaccugaacaacacggccaccggcaagaccucccugcccaagugcugccugaucagcaacggcuccuaccucaacgagacccacuucagcgacgacaucgagcaggaggcggacaacaugaucacggagaugcugcagaaggaguacauggagcggcaggggaagacgccccugggccuggucgaccucuucguguucuccaccagcuucuaccugaucuccaucuuccugcaccucgugaagaucccgacccaccgccacaucgucggcaagagcugccccaagccccaccggcugaaccacauggggaucugcuccugcgggcuguacaagcagcccggcgugccggugcgcuggaagcggugaggacuaguaauaaggaaacuguaugaaugucugugggcaggaagugaagagauccuucuguaaagguuuuuggaauuaugucugcugaauaauaaacuuuuuugaaauaauaaaucugguagaaaaaugagaucucaaaggcucuuuucagagccaccaaaaaaaaaaaaaaaaaaaaaaaaaaaaaaaaaaaaaaaaaaaaaaaaaaaaaaaaaaaaaaaaaaaaaaaaaaaaaaaaaaaaaaaaaaaaaaaaaaaaa

SEQ ID NO: 41021 - RNA, 1812 nt, Artificial Sequence
  mRNA product Design b-4 (hSL-A100) comprising derived and/or modified sequence from LASV(G3010-SLE-2013;Clade IV)__AIT17344__GPCmut12 (opt1)
aggagagucccgcagucggcguccagcggcucugcuuguucgugugugugucguugcaggccuuauucaagcuuaccaugggccagaucgugaccuucuuccaggaggucccccacgugaucgaggaggugaugaacaucguccugaucgcccucagcauccuggccgugcugaaggggcucuacaacuucgcgaccugcggccugguggggcuggucacguuccuccugcugugcggccgcuccugcaccaccagccucuacaaggggguguacgagcugcagacccuggagcucaacauggagacgcugaacaugugcaugccgcuguccugcaccaagaacaacagccaccacuacaucauggugggcaacgagaccggccucgagcugacccugacgaacaccuccaucaucaaccacaaguucugcaaccucagcgacgcccacaagaagaaccuguacaaccacgcccugauguccaucaucagcaccuuccaccucuccauccccaacuucaaccaguacgaggccaugagcugcgacuucaacgggggcaagaucuccguccaguacaaccugagccacuccuacgccggggacgcggccagccacugcggcaccguggccaacggggugcugcagacguucaugcggauggccuggggcggcuccuacaucgcgcucgacagcggguacggcaagugggacugcaucaugaccuccuaccaguaccugaucauccagaacaccaccugggaggaccacugccaguucagccgccccucccccaucggguaccugggccuccugagccagcggacgcgcgacaucuacaucagccggcgccugcucggcaccuucaccuggacccuguccgacagcgaggggaaggacacgccgggcggguacugccugacccgguggaugcucaucgaggccgagcugaagugcuucggcaacaccgccgucgccaagugcaacgagaagcacgacgaggaguucugcgacaugcugcgccucuucgacuucugcaagcaggccauccagcggcugaagaccgaggcgcagauguccauccagcugaucaacaaggccgugaacgcccucaucaacgaccagcugaucaugaagaaccaccuccgcgacaucauggggauccccuacugcaacuacagcaaguacugcuaccugaaccacacgaccaccggcaagaccucccugcccaagugcugccuggugagcaacggcuccuaccucaacgagacgcacuucagcgacgacaucgagcagcaggccgacaacaugaucaccgagaugcugcagaaggaguacauggagcggcaggggaagacgccccugggccuggucgaccucuucguguucuccaccagcuucuaccugaucuccaucuuccugcaccucgugaagaucccgacccaccgccacaucgucggcaagagcugccccaagccccaccggcugaaccacauggggaucugcuccugcgggcuguacaagcagcccggcgugccggugcgcuggaagcggugaggacuaguaauaaggaaacuguaugaaugucugugggcaggaagugaagagauccuucuguaaagguuuuuggaauuaugucugcugaauaauaaacuuuuuugaaauaauaaaucugguagaaaaaugagaucucaaaggcucuuuucagagccaccaaaaaaaaaaaaaaaaaaaaaaaaaaaaaaaaaaaaaaaaaaaaaaaaaaaaaaaaaaaaaaaaaaaaaaaaaaaaaaaaaaaaaaaaaaaaaaaaaaaaa

SEQ ID NO: 41022 - RNA, 1812 nt, Artificial Sequence
  mRNA product Design b-4 (hSL-A100) comprising derived and/or modified sequence from LASV(G502-SLE-2009;Clade IV)__AIT17126__GPCmut12 (opt1)
aggagagucccgcagucggcguccagcggcucugcuuguucgugugugugucguugcaggccuuauucaagcuuaccaugggccagaucgugaccuucuuccaggaggucccccacgugaucgaggaggugaugaacaucguccugaucgcccucagcauccuggccgugcugaaggggcucuacaacuucgcgaccugcggccugguggggcugcucacguuccugcugcucugcggccgcuccugcaccaccgggcuguacaagggcgucuacgagcugcagacccucgagcugaacauggagacgcugaacaugugcaugccgcucagcugcaccaagaacaacucccaccacuacaucauggugggcaacgagaccgggcuggagcugacccucacgaacaccagcaucaucaaccacaaguucugcaaccuguccgacgcccacaagaagaaccuguacgaccacgcccucaugagcaucaucuccaccuuccaccugagcauccccaacuucaaccaguacgaggccauguccugcgacuucaacggcgggaagaucagcgugcaguacaaccugucccacagcuacgccggcgacgcggccgaccacugcgggaccgucgccaacggcgugcuccagacguucaugcggauggccuggggcggguccuacaucgcgcuggacagcggccgcgggcggugggacugcaucaugaccuccuaccaguaccugaucauccagaacaccaccugggaggaccacugccaguucagccgccccucccccaucggcuaccucggccugcugagccagcggacgcgcgacaucuacaucucccggcgccuccuggggaccuucaccuggacccugagcgacagcgagggcaaggacacgcccgggggcuacugccucacccgguggaugcugaucgaggccgagcugaagugcuucgggaacaccgccguggccaagugcaacgagaagcacgacgaggaguucugcgacaugcuccgccuguucgacuucugcaagcaggccauccagcggcugaaggcggaggcccagauguccauccagcucaucaacaaggccgucaacgcccugaucaacgaccagcuggugaugaagaaccaccuccgcgacaucaugggcauccccuacugcaacuacagccgguacugcuaccugaaccacaccacgaccggccgcaccucccugcccaagugcugccucgugagcaacggguccuaccugaacgagacccacuucagcgacgacaucgagcagcaggccgacaacaugaucacggagaugcugcagaaggaguacauggagcggcagggcaagaccccgcuggggcucgucgaccuguucguguucuccaccagcuucuaccugaucuccaucuuccuccaccuggugaagaucccgacccaccgccacaucgucggcaagagcugccccaagccccaccggcugaaccacauggggaucugcuccugcggccucuacaagcagcccggcgugccggugaaguggaagcgcugaggacuaguaauaaggaaacuguaugaaugucugugggcaggaagugaagagauccuucuguaaagguuuuuggaauuaugucugcugaauaauaaacuuuuuugaaauaauaaaucugguagaaaaaugagaucucaaaggcucuuuucagagccaccaaaaaaaaaaaaaaaaaaaaaaaaaaaaaaaaaaaaaaaaaaaaaaaaaaaaaaaaaaaaaaaaaaaaaaaaaaaaaaaaaaaaaaaaaaaaaaaaaaaaa

SEQ ID NO: 41023 - RNA, 1812 nt, Artificial Sequence
  mRNA product Design b-4 (hSL-A100) comprising derived and/or modified sequence from LASV(G733-SLE-2010;Clade IV)__AIT17154__GPCmut12 (opt1)
aggagagucccgcagucggcguccagcggcucugcuuguucgugugugugucguugcaggccuuauucaagcuuaccaugggccagaucgugaccuucuuccaggaggucccccacgugaucgaggaggugaugaacaucguccugaucgcccucagcauccuggccgugcugaaggggcucuacaacuucgcgaccugcggcaucguggggcuggucuccuuccugcuccugugcggccgcagcugcacgaccucccuguacaaggggguguacgagcuccagacccuggagcugaacauggagacccucaacaugugcaugccgcugagcugcacgaagaacaacucccaccacuacaucauggugggcaacgagaccggccuggagcucacccugaccaacacgagcaucaucaaccacaaguucugcaaccuguccgacgcccacaagaagaaccucuacgaccacgcccugaugagcaucaucuccaccuuccaccugagcauccccaacuucaaccaguacgaggccauguccugcgacuucaacgggggcaagaucagcguccaguacaaccucucccacagcuacgccggggacgcggccaaccacugcggcaccaucgccaacggggugcugcagaccuucaugcggauggccuggggcggcuccuacaucgcgcuggacagcgggcgcgaccggugggacugcaucaugacguccuaccaguaccucaucauccagaacaccaccugggaggaccacugccaguucagccgccccucccccaucggcuaccuggggcugcucagccagcggacccgcgacaucuacaucagccggcgccugcugggcacguucaccuggacccucuccgacagcgagggcaaggacacccccgggggcuacugccugacgcgguggaugcugaucgaggccgagcucaagugcuucgggaacaccgccguggccaagugcaacgagaagcacgacgaggaguucugcgacaugcugcgccuguucgacuucugcaagcaggccauccagcggcucaaggcggaggcccagauguccauccagcugaucaacaaggccgucaacgcccugaucaacgaccagcucaucaugaagaaccaccuccgcgacaucaugggcaucccguacugcaacuacagcaaguacugcuaccugaaccacaccaccacggggaagaccucccugcccaagugcugccuggugagcaacggcuccuaccugaacgagacccacuucagcgacgacaucgagcagcaggccgacaacaugaucaccgagaugcuccagaaggaguacauggagcggcagggcaagacgccccuggggcugguggaccuguucgucuucuccaccagcuucuaccucaucuccaucuuccugcaccuggugaagaucccgacccaccgccacguggucggcaagagcugccccaagccccaccggcucaaccacauggggaucugcuccugcggccuguacgggcagcccggcgugccggugaaguggaagcgcugaggacuaguaauaaggaaacuguaugaaugucugugggcaggaagugaagagauccuucuguaaagguuuuuggaauuaugucugcugaauaauaaacuuuuuugaaauaauaaaucugguagaaaaaugagaucucaaaggcucuuuucagagccaccaaaaaaaaaaaaaaaaaaaaaaaaaaaaaaaaaaaaaaaaaaaaaaaaaaaaaaaaaaaaaaaaaaaaaaaaaaaaaaaaaaaaaaaaaaaaaaaaaaaaa

SEQ ID NO: 41024 - RNA, 1812 nt, Artificial Sequence
  mRNA product Design b-4 (hSL-A100) comprising derived and/or modified sequence from MOPV/LASV reassortant(IGS-1;Clade IV)__AFY05576__GPCmut12 (opt1)
aggagagucccgcagucggcguccagcggcucugcuuguucgugugugugucguugcaggccuuauucaagcuuaccaugggccagaucgugaccuucuuccaggaggucccccacgugaucgaggaggugaugaacaucguccugaucgcccucagcgugcuggccgugcugaaggggcucuacaacuucgcgaccugcggccuggucgggcuggugaccuuccuccugcugugcggccgcuccugcaccaccagccucuacaaggggguguacgagcugcagacccuggagcucaacauggagacgcugaacaugugcaugccgcuguccugcaccaagaacaacagccaccacuacaucauggucggcaacgagaccggccucgagcugacccugacgaacaccuccaucaucaaccacaaguucugcaaccucagcgacgcccacaagaagaaccuguacgaccacgcccugauguccaucaucagcaccuuccaccucuccauccccaacuucaaccaguacgaggccaugagcugcgacuucaacgggggcaagaucuccgugcaguacaaccugagccacuccuacgccggggacgcggccaaccacugcggcaccguggccaacgggguccugcagacguucaugcggauggccuggggcggcagcuacaucgcgcucgacuccgggcgcggcaacugggacugcaucaugaccagcuaccaguaccugaucauccagaacaccaccugggaggaccacugccaguucucccggcccagccccaucggguaccugggccuccugucccagcgcacgcgggacaucuacaucagccgccggcugcucggcaccuucaccuggacccugagcgacuccgagggggaggacacgccgggcggguacugccugacccgcuggaugcucaucgaggccgagcugaagugcuucggcaacaccgccguggccaagugcaacgagaagcacgacgaggaguucugcgacaugcugcggcuguucgacuucugcaagcaggccauccagcgccugaaggcggaggcccagaugagcauccagcugaucaacaaggccgugaacgcccucaucaacgaccagcugaucaugaagaaccaccuccgggacaucauggggauccccuacugcaacuacuccaaguacugcuaccucaaccacaccacgaccggccgcaccagccugcccaagugcugccuggucuccaacggcagcuaccucaacgagacccacuucuccgacgacaucgagcagcaggccgacaacaugaucacggagaugcugcagaaggaguacauggagcggcaggggaagacgccccugggccugguggaccucuucguguucagcaccuccuucuaccugaucagcaucuuccugcaccucgucaagaucccgacccaccgccacaucguggggaaguccugccccaagccccaccggcugaaccacaugggcaucugcagcugcgggcuguacaagcagcccggcgugccggucaaguggaagcgcugaggacuaguaauaaggaaacuguaugaaugucugugggcaggaagugaagagauccuucuguaaagguuuuuggaauuaugucugcugaauaauaaacuuuuuugaaauaauaaaucugguagaaaaaugagaucucaaaggcucuuuucagagccaccaaaaaaaaaaaaaaaaaaaaaaaaaaaaaaaaaaaaaaaaaaaaaaaaaaaaaaaaaaaaaaaaaaaaaaaaaaaaaaaaaaaaaaaaaaaaaaaaaaaaa

SEQ ID NO: 41025 - RNA, 1812 nt, Artificial Sequence
  mRNA product Design b-4 (hSL-A100) comprising derived and/or modified sequence from LASV(LM765-SLE-2012;Clade IV)__AIT17814__GPCmut12 (opt1)
aggagagucccgcagucggcguccagcggcucugcuuguucgugugugugucguugcaggccuuauucaagcuuaccaugggccagaucgugaccuucuuccaggaggucccccacgugaucgaggaggugaugaacaucguccugaucgcccucagcauccuggccgugcugaaggggcucuacaacuucgcgaccugcggccugguggggcuggucacguuccuccugcugugcggccgcuccugcaccaccagccucuacaaggggguguacgagcugcagacccuggagcucaacauggagacgcugaacaugugcaugccgcuguccugcaccaagaacaacagccaccacuacaucauggugggcaacgagaccggccucgagcugacccugacgaacaccuccaucaucgaccacaaguucugcaaccucagcgacgcccaccggaagaaccuguacgaccacgcccugauguccaucaucagcaccuuccaccucuccauccccaacuucaaccaguacgaggccaugagcugcgacuucaacgggggcaagaucuccguccaguacaaccugagccacuccuacgccaaggacgcggccgaccacugcgggaccguggccaacggcgugcugcagacguucaugcgcauggccuggggcgggagcuacaucgcgcucgacuccggccgggggcgcugggacugcaucaugaccagcuaccaguaccugaucauccagaacaccaccugggaggaccacugccaguucucccggcccagccccaucggcuaccuggggcuccugucccagcgcacgcgggacaucuacaucagccgccggcugcucggcaccuucaccuggacccugagcgacuccgagggcaaggacacgcccgggggcuacugccugacccgcuggaugcucaucgaggccgagcugaagugcuucgggaacaccgccgucgccaagugcaacgagaagcacgacgaggaguucugcgacaugcugcggcuguucgacuucugcaagcaggccauccagcgccugaaggcggaggcccagaugagcauccagcugaucaacaaggccgugaacgcccucaucaacgaccagcugaucaugaagaaccaccuccgggacaucaugggcauccccuacugcaacuacuccaaguacugcuaccucaaccacaccacgaccgggaagaccagccugcccaagugcugccugguguccaacggcagcuaccucaacgagacccacuucuccgacgacaucgagcagcaggccgacaacaugaucacggagaugcugcagaaggaguacauggagcgccagggcaagaccccgcuggggcuggucgaccucuucguguucagcaccuccuucuaccugaucagcaucuuccugcaccucgugaagaucccgacccaccggcacaucgucggcaagcccugccccaagccccaccgccugaaccacauggggaucugcuccugcggccuguacaagcagccgggggugcccgugaaguggaagcggugaggacuaguaauaaggaaacuguaugaaugucugugggcaggaagugaagagauccuucuguaaagguuuuuggaauuaugucugcugaauaauaaacuuuuuugaaauaauaaaucugguagaaaaaugagaucucaaaggcucuuuucagagccaccaaaaaaaaaaaaaaaaaaaaaaaaaaaaaaaaaaaaaaaaaaaaaaaaaaaaaaaaaaaaaaaaaaaaaaaaaaaaaaaaaaaaaaaaaaaaaaaaaaaaa

SEQ ID NO: 41026 - RNA, 1812 nt, Artificial Sequence
  mRNA product Design b-4 (hSL-A100) comprising derived and/or modified sequence from LASV(LM776-SLE-2012;Clade IV)__AIT17824__GPCmut12 (opt1)
aggagagucccgcagucggcguccagcggcucugcuuguucgugugugugucguugcaggccuuauucaagcuuaccaugggccagaucgugaccuucuuccaggaggucccccacgugaucgaggaggugaugaacaucguccugaucgcccucagcauccuggccgugcugaaggggcucuacaacuucgcgaccugcggccugguggggcuggucaccuuccuccugcugugcggccgcuccugcaccaccagcguguacaaggggguguacgagcuccagacccuggagcugaacauggagacgcucaacaugugcaugccgcuguccugcaccaagaacaacagccaccacuacaucauggucggcaacgagaccggccuggagcucacccugacgaacaccuccaucaucaaccacaaguucugcaaccugagcgacgcccacaagaagaaccucuacgaccacgcccugauguccaucaucagcaccuuccaccuguccauccccaacuucaaccaguacgaggccaugagcugcgacuucaacgggggcaagaucuccgugcaguacaaccucagccacuccuacgccggggacgcggccaaccacugcggcaccguggccaacgggguccugcagacguucaugcggauggccuggggcggcagcuacaucgcgcuggacuccgggcacggcaagugggacugcaucaugaccagcuaccaguaccucaucauccagaacaccaccugggaggaccacugccaguucucccgccccagccccaucggguaccugggccugcucucccagcggacgcgcgacaucuacaucagccggcgccugcugggcaccuucaccuggacccucagcgacuccgaggggaaggacacgccgggcggguacugccugacccgguggaugcugaucgaggccgagcucaagugcuucggcaacaccgccguggccaagugcaacgagaagcacgacgaggaguucugcgacaugcugcgccuguucgacuucugcaagcaggccauccagcggcucaaggcggaggcccagaugagcauccagcugaucaacaaggccgugaacgcccugaucaacgaccagcucaucaugaagaaccaccuccgcgacaucauggggauccccuacugcaacuacuccaaguacugcuaccugaaccacaccacgaccggcaagaccagccugcccaagugcugccuggucuccaacggcagcuaccugaacgagacccacuucuccgacgacaucgagcagcaggccgacaacaugaucacggagaugcuccagaaggaguacauggagcggcaggggaagacgccccugggccugguggaccuguucguguucagcaccuccuucuaccucaucagcaucuuccugcaccuggucaagaucccgacccaccgccacaucguggggaaguccugccccaagccccaccggcucaaccacaugggcaucugcagcugcgggcuguacaagcagcccggcgugccgguccgcuggaagcggugaggacuaguaauaaggaaacuguaugaaugucugugggcaggaagugaagagauccuucuguaaagguuuuuggaauuaugucugcugaauaauaaacuuuuuugaaauaauaaaucugguagaaaaaugagaucucaaaggcucuuuucagagccaccaaaaaaaaaaaaaaaaaaaaaaaaaaaaaaaaaaaaaaaaaaaaaaaaaaaaaaaaaaaaaaaaaaaaaaaaaaaaaaaaaaaaaaaaaaaaaaaaaaaaa

SEQ ID NO: 41027 - RNA, 1812 nt, Artificial Sequence
  mRNA product Design b-4 (hSL-A100) comprising derived and/or modified sequence from LASV(Mad39;Clade IV)__ANH09722__GPCmut12 (opt1)
aggagagucccgcagucggcguccagcggcucugcuuguucgugugugugucguugcaggccuuauucaagcuuaccaugggccagaucgugaccuucuuccaggaggucccccacgugaucgaggaggugaugaacaucguccugaucgcccucagcauccuggccgugcugaaggggcucuacaacguggcgaccugcggccugaucgggcuggucacguuccuccugcugugcggccgcuccugcaccaccacccucuacaaggggguguacgagcugcaggcccuggagcucaacauggagacgcugaacaugugcaugccgcugagcugcaccaagaacaacucccaccacuacauccgggugggcaacgagaccggccucgagcugacccugacgaacaccagccucaucaaccacaaguucugcaaccuguccgacgcccacaagaagaaccuguacgaccacgcccucaugagcaucaucuccaccuuccaccugagcauccccaacuucaaccaguacgaggccauguccugcgacuucaacgacgggaagaucagcguccaguacaaccugucccacaccuacgcgggcgacacggccaaccacugcgggaccguggccaacggcgugcuccagaccuucaugcgcauggccuggggcgggagcuacaucgcgcuggacuccggccgcgggggcugggacugcaucaugaccagcuaccaguaccugaucauccagaacacgaccugggaggaccacugccaguucucccggcccagccccaucggguaccucggccugcugucccagcggacccgcgacaucuacaucagccggcgccuccugggcaccuucacguggacccuguccgacagcgaggggaaggacaccccgggcggguacugccucacccgguggaugcugaucgaggccgagcugaagugcuucggcaacacggccgucgccaagugcaacgagaagcacgacgaggaguucugcgacaugcuccgccuguucgacuucugcaagcaggccauccagcggcugaaggcggaggcccagaugagcauccagcucaucaacaaggccgugaacgcccugaucaacgaccagcugaucaugaagaaccaccuccgcgacaucauggggauccccuacugcaacuacuccaaguacugcuaccugaaccacaccgugaccggcaagaccagccugcccaagugcugccucgucuccaacggcagcuaccugaacgagacgcacuucuccgacgacaucgagcagcaggccgacaacaugaucaccgagaugcugcagaaggaguacauggagcggcaggggaagacgccccugggccucguggaccuguucguguucagcaccuccuucuaccugaucagcaucuuccuccaccuggucaagaucccgacccaccgccacgugguggggaagcccugccccaagccccaccggcugaaccacaugggcaucugcuccugcggguucuacaagcagccgggcguccccgugcgcuggaagcggugaggacuaguaauaaggaaacuguaugaaugucugugggcaggaagugaagagauccuucuguaaagguuuuuggaauuaugucugcugaauaauaaacuuuuuugaaauaauaaaucugguagaaaaaugagaucucaaaggcucuuuucagagccaccaaaaaaaaaaaaaaaaaaaaaaaaaaaaaaaaaaaaaaaaaaaaaaaaaaaaaaaaaaaaaaaaaaaaaaaaaaaaaaaaaaaaaaaaaaaaaaaaaaaaa

SEQ ID NO: 41028 - RNA, 1812 nt, Artificial Sequence
  mRNA product Design b-4 (hSL-A100) comprising derived and/or modified sequence from LASV(Z0947-SLE-2011;Clade IV)__AIT17840__GPCmut12 (opt1)
aggagagucccgcagucggcguccagcggcucugcuuguucgugugugugucguugcaggccuuauucaagcuuaccaugggccagaucgugaccuucuuccaggaggucccccacgugaucgaggaggugaugaacaucguccugaucgcccucagcauccuggccgugcugaaggggcucuacaacuucgcgaccugcggccugguggggcuggucacguuccuccugcugugcggccgcuccugcaccaucagccucuacaaggggguguacgagcugcagacccuggagcucaacauggagacccugaacaugugcaugccgcuguccugcacgaagaacaacagccaccacuacaucauggugggcaacgagaccggccucgagcugacccugaccaacacguccaucaucaaccacaaguucugcaaccucagcgacgcccacaagaagaaccuguacgaccacgcccugauguccaucaucagcaccuuccaccucuccauccccaacuucaaccaguacgaggccaugagcugcgacuucaacgggggcaagaucuccguccaguacaaccugagccacuccuacgccggggacgcggccaaccacugcggcaccguggccaacggggugcugcagaccuucaugcggauggccuggggcggcagcuacaucgcgcucgacuccgggcgcgaccggugggacugcaucaugacgagcuaccaguaccugaucauccagaacaccaccugggaggaccacugccaguucucccgccccagccccaucggcuaccuggggcuccugucccagcggacccgcgacaucuacaucagccggcgccugcucggcacguucaccuggacccugagcgacuccgagggcaaggacacccccgggggcuacugccugacgcgguggaugcucaucgaggccgagcugaagugcuucgggaacaccgccgucgccaagugcaacgagaagcacgacgaggaguucugcgacaugcugcgccucuucgacuucugcaagcaggccauccagcggcugaaggcggaggcccagaugagcauccagcugaucaacaaggccgugaacgcccucaucaacgaccagcugaucaugaagaaccaccuccgcgacaucaugggcaucccguacugcaacuacuccaaguacugcuaccugaaccacaccaccacggggaagaccagccugcccaagugcugccugguguccaacggcagcuaccucaacgagacccacuucuccgacgacaucgagcagcaggccgacaacaugaucaccgagaugcugcagaaggaguacauggagcggcagggcaagacgccccuggggcuggucgaccucuucguguucagcaccuccuucuaccugaucagcaucuuccugcaccucgugaagaucccgacccaccgccacaucgucggcaagcccugccccaagccccaccggcugaaccacauggggaucugcuccugcggccuguacaagcagccgggggugcccgugaaguggaagcgcugaggacuaguaauaaggaaacuguaugaaugucugugggcaggaagugaagagauccuucuguaaagguuuuuggaauuaugucugcugaauaauaaacuuuuuugaaauaauaaaucugguagaaaaaugagaucucaaaggcucuuuucagagccaccaaaaaaaaaaaaaaaaaaaaaaaaaaaaaaaaaaaaaaaaaaaaaaaaaaaaaaaaaaaaaaaaaaaaaaaaaaaaaaaaaaaaaaaaaaaaaaaaaaaaa

SEQ ID NO: 41029 - RNA, 1812 nt, Artificial Sequence
  mRNA product Design b-4 (hSL-A100) comprising derived and/or modified sequence from LASV(Josiah;Clade IV)__NP_694870__GPCmut12 (opt4)
aggagagucccgcagucggcguccagcggcucugcuuguucgugugugugucguugcaggccuuauucaagcuuaccaugggccagaucgugaccuucuuccaggaggugccccacgugaucgaggaggugaugaacaucgugcugaucgcccugagcgugcuggccgugcugaagggccuguacaacuucgccaccugcggccuggugggccuggugaccuuccugcugcugugcggcagaagcugcaccaccagccuguacaagggcguguacgagcugcagacccuggagcugaacauggagacccugaacaugugcaugccccugagcugcaccaagaacaacagccaccacuacaucauggugggcaacgagaccggccuggagcugacccugaccaacaccagcaucaucaaccacaaguucugcaaccugagcgacgcccacaagaagaaccuguacgaccacgcccugaugagcaucaucagcaccuuccaccugagcauccccaacuucaaccaguacgaggccaugagcugcgacuucaacggcggcaagaucagcgugcaguacaaccugagccacagcuacgccggcgacgccgccaaccacugcggcaccguggccaacggcgugcugcagaccuucaugagaauggccuggggcggcagcuacaucgcccuggacagcggcagaggcaacugggacugcaucaugaccagcuaccaguaccugaucauccagaacaccaccugggaggaccacugccaguucagcagacccagccccaucggcuaccugggccugcugagccagagaaccagagacaucuacaucagcagaagacugcugggcaccuucaccuggacccugagcgacagcgagggcaaggacacccccggcggcuacugccugaccagauggaugcugaucgaggccgagcugaagugcuucggcaacaccgccguggccaagugcaacgagaagcacgacgaggaguucugcgacaugcugagacuguucgacuucugcaagcaggccauccagagacugaaggccgaggcccagaugagcauccagcugaucaacaaggccgugaacgcccugaucaacgaccagcugaucaugaagaaccaccugagagacaucaugggcauccccuacugcaacuacagcaaguacugcuaccugaaccacaccaccaccggcagaaccagccugcccaagugcugccuggugagcaacggcagcuaccugaacgagacccacuucagcgacgacaucgagcagcaggccgacaacaugaucaccgagaugcugcagaaggaguacauggagagacagggcaagaccccccugggccugguggaccuguucguguucagcaccagcuucuaccugaucagcaucuuccugcaccuggugaagauccccacccacagacacaucgugggcaagagcugccccaagccccacagacugaaccacaugggcaucugcagcugcggccuguacaagcagcccggcgugcccgugaaguggaagagaugaggacuaguaauaaggaaacuguaugaaugucugugggcaggaagugaagagauccuucuguaaagguuuuuggaauuaugucugcugaauaauaaacuuuuuugaaauaauaaaucugguagaaaaaugagaucucaaaggcucuuuucagagccaccaaaaaaaaaaaaaaaaaaaaaaaaaaaaaaaaaaaaaaaaaaaaaaaaaaaaaaaaaaaaaaaaaaaaaaaaaaaaaaaaaaaaaaaaaaaaaaaaaaaaa

SEQ ID NO: 41030 - RNA, 1809 nt, Artificial Sequence
  mRNA product Design b-4 (hSL-A100) comprising derived and/or modified sequence from LASV(LP;Clade I)__AAF86701__GPCmut12 (opt4)
aggagagucccgcagucggcguccagcggcucugcuuguucgugugugugucguugcaggccuuauucaagcuuaccaugggccagaucaucaccuucuuccaggaggugccccacgugaucgaggaggugaugaacaucgugcugaucgcccugagccugcuggccauccugaagggccuguacaacaucgccaccugcggcaucaucggccugguggccuuccuguuccugugcggcaagagcugcagccugacccugaagggcggcuacgagcugcagacccuggagcugaacauggagacccugaacaugugcaugccccugagcugcaccaagaacagcagccaccacuacaucagagugggcaacgagaccggccuggagcugacccugaccaacaccagcaucaucaaccacaaguucugcaaccugagcgacgcccacaagaagaaccuguacgaccacgcccugaugagcaucaucagcaccuuccaccugagcauccccaacuucaaccaguacgaggccaugagcugcgacuucaacggcggcaagaucagcgugcaguacaaccugagccacagcuacgccggcgacgccgccgagcacugcggcaccguggccaacggcgugcugcagaccuucaugagaauggccuggggcggcagauacaucgcccuggacagcggcaagggcaacugggacugcaucaugaccagcuaccaguaccugaucauccagaacaccaccugggaggaccacugccaguucagcagacccagccccaucggcuaccugggccugcugagccagagaaccagagacaucuacaucagcagaagacugcugggcaccuucaccuggacccugagcgacagcgagggcaacgagacccccggcggcuacugccugaccagauggaugcugaucgaggccgagcugaagugcuucggcaacaccgccguggccaagugcaacgagaagcacgacgaggaguucugcgacaugcugagacuguucgacuucugcaagcaggccaucagaagacugaaggccgaggcccagaugagcauccagcugaucaacaaggccgugaacgcccugaucaacgaccagcugaucaugaagaaccaccugagagacaucaugggcauccccuacugcaacuacagcaaguacugcuaccugaaccacaccagcagcggcagaaccagccugcccaagugcugccugaucagcaacggcagcuaccugaacgagacccaguucagcgacgacaucgagcagcaggccgacaacaugaucaccgagaugcugcagaaggaguacaucgagagacagggcaagaccccccugggccugguggacaucuucaucuucagcaccagcuucuaccugaucagcaucuuccugcaccugaucaagauccccacccacagacacaucgugggcaagcccugccccaagccccacagacugaaccacaugggcgugugcagcugcggccuguacaagcaccccggcgugcccaccaaguggaagagaugaggacuaguaauaaggaaacuguaugaaugucugugggcaggaagugaagagauccuucuguaaagguuuuuggaauuaugucugcugaauaauaaacuuuuuugaaauaauaaaucugguagaaaaaugagaucucaaaggcucuuuucagagccaccaaaaaaaaaaaaaaaaaaaaaaaaaaaaaaaaaaaaaaaaaaaaaaaaaaaaaaaaaaaaaaaaaaaaaaaaaaaaaaaaaaaaaaaaaaaaaaaaaaaaa

SEQ ID NO: 41031 - RNA, 1809 nt, Artificial Sequence
  mRNA product Design b-4 (hSL-A100) comprising derived and/or modified sequence from LASV(803213;Clade II)__AAF86703__GPCmut12 (opt4)
aggagagucccgcagucggcguccagcggcucugcuuguucgugugugugucguugcaggccuuauucaagcuuaccaugggccagaucaucaccuucuuccaggaggugccccacgugaucgaggaggugaugaacaucgugcugaucgcccugagccugcuggccauccugaagggcaucuacaacguggccaccugcggccuguucggccugaucagcuuccugcugcugugcggcagaagcugcagcgugaccuacaagggcguguacgagcugcagacccuggagcugaacauggccaaccugaacaugugcaugccccugagcugcaccaagaacaacagccaccacuacaucauggugggcaacgagaccggccuggagcugacccugaccaacaccagcaucaucaaccacaaguucugcaaccugagcgacgcccacaagaagaaccuguacgaccacgcccugaugagcaucaucagcaccuuccaccugagcauccccaacuucaaccaguacgaggccaugagcugcgacuucaacggcggcaagaucagcgugcaguacaaccugagccacagcuucgccguggacgccgccaaccacugcggcaccaucgccaacggcgugcugcagaccuucaugagaauggccuggggcggcagcuacaucgcccuggacagcggcaagggcaacugggacugcaucaugaccagcuaccaguaccugaucauccagaacaccaccugggaggaccacugccaguucagcagacccagccccaucggcuaccugggccugcugagccagagaaccagagacaucuacaucagcagaagacugcugggcaccuucaccuggacccugagcgacagcgagggcaacgaggcccccggcggcuacugccugaccagauggaugcugaucgaggccgagcugaagugcuucggcaacaccgccguggccaagugcaacgagaagcacgacgaggaguucugcgacaugcugagacuguucgacuucugcaagcaggccaucaagagacugaagaccgaggcccagaugagcauccagcugaucaacaaggccgugaacgcccugaucaacgaccagcugaucaugaagaaccaccugagagacaucaugggcauccccuacugcaacuacagcagauacugcuaccugaaccacaccgugaccggcaagaccagccugcccagaugcugccuggugagcaacggcagcuaccugaacgagacccacuucagcgacgacaucgagcagcaggccgacaacaugaucaccgagaugcugcagaaggaguacauggacagacagggcaagaccccccugggccugguggaccuguucguguucagcaccagcuucuaccugaucagcaucuuccugcaccuggugaagauccccacccacagacacaucgugggcaagcccugccccaagccccacagacugaaccacaugggcaucugcagcugcggccuguacaagcaccccggcgugcccgugaaguggaagagaugaggacuaguaauaaggaaacuguaugaaugucugugggcaggaagugaagagauccuucuguaaagguuuuuggaauuaugucugcugaauaauaaacuuuuuugaaauaauaaaucugguagaaaaaugagaucucaaaggcucuuuucagagccaccaaaaaaaaaaaaaaaaaaaaaaaaaaaaaaaaaaaaaaaaaaaaaaaaaaaaaaaaaaaaaaaaaaaaaaaaaaaaaaaaaaaaaaaaaaaaaaaaaaaaa

SEQ ID NO: 41032 - RNA, 1809 nt, Artificial Sequence
  mRNA product Design b-4 (hSL-A100) comprising derived and/or modified sequence from LASV(GA391;Clade III)__CAA36645__GPCmut12 (opt4)
aggagagucccgcagucggcguccagcggcucugcuuguucgugugugugucguugcaggccuuauucaagcuuaccaugggccagaucgugaccuucuuccaggaggugccccacgugaucgaggaggugaugaacaucgugcugaucgcccugagcauccuggccauccugaagggccuguacaacguggccaccugcggccugaucggccuggugaccuuccugcugcugagcggcagaagcugcagccugaucuacaagggcaccuacgagcugcagacccuggagcugaacauggagacccugaacaugugcaugccccugagcugcaccaagaacaacagccaccacuacaucagagugggcaacgagaccggccuggagcugacccugaccaacaccagcauccugaaccacaaguucugcaaccugagcgacgcccacaagagaaaccuguacgaccacagccugaugagcaucaucagcaccuuccaccugagcauccccaacuucaaccaguacgaggccaugagcugcgacuucaacggcggcaagaucaccgugcaguacaaccugagccacagcuucgccguggacgccgccggccacugcggcacccuggccaacggcgugcugcagaccuucaugagaauggccuggggcggcagcuacaucgcccuggacagcggcagaggcaacugggacugcaucaugaccagcuaccaguaccugaucauccagaacaccaccugggacgaccacugccaguucagcagacccagccccaucggcuaccugggccugcugagccagagaaccagagacaucuacaucagcagaagacugcugggcaccuucaccuggacccugagcgacagcgagggcaacgagacccccggcggcuacugccugaccagauggaugcugaucgaggccgagcugaagugcuucggcaacaccgccguggccaagugcaacgagaagcacgacgaggaguucugcgacaugcugagacuguucgacuucugcaagcaggccaucagaagacugaagaccgaggcccagaugagcauccagcugaucaacaaggccgugaacgcccugaucaacgaccagcugaucaugaagaaccaccugagagacaucaugggcauccccuacugcaacuacagcagauacugcuaccugaaccacaccagcaccggcaagaccagccugcccagaugcugccugaucagcaacggcagcuaccugaacgagaccaaguucagcgacgacaucgagcagcaggccgacaacaugaucaccgagaugcugcagaaggaguacaucgacagacagggcaagaccccccugggccugguggaccuguucguguucagcaccagcuucuaccugaucagcaucuuccugcaccuggugaagauccccacccacagacacaucgugggcaagcccugccccaagccccacagacugaaccacaugggcaucugcagcugcggccuguacaagcagcccggcgugcccgugagauggaagagaugaggacuaguaauaaggaaacuguaugaaugucugugggcaggaagugaagagauccuucuguaaagguuuuuggaauuaugucugcugaauaauaaacuuuuuugaaauaauaaaucugguagaaaaaugagaucucaaaggcucuuuucagagccaccaaaaaaaaaaaaaaaaaaaaaaaaaaaaaaaaaaaaaaaaaaaaaaaaaaaaaaaaaaaaaaaaaaaaaaaaaaaaaaaaaaaaaaaaaaaaaaaaaaaaa

SEQ ID NO: 41033 - RNA, 1812 nt, Artificial Sequence
  mRNA product Design b-4 (hSL-A100) comprising derived and/or modified sequence from LASV(AV;Clade V)__CCA30314__GPCmut12 (opt4)
aggagagucccgcagucggcguccagcggcucugcuuguucgugugugugucguugcaggccuuauucaagcuuaccaugggccagaucgugaccuucuuccaggaggugccccacgugaucgaggaggugaugaacaucgugcugaucgcccugagcauccuggccgugcugaagggccuguacaacaucgccaccugcggccugaucggccugaucaccuuccugcugcugugcggcagaagcugcagcagcaaccuguacaagggcguguacgagcugcagagccuggaccugaacauggagacccugaacaugugcaugccccugagcugcaccaagaacaacagccaccacuacaucagagugggcaacgacaccggccuggagcugacccugaccaacaccagcauccugaaccacaaguucugcaaccugagcgacgcccacaagaaggaccuguacgaccacgcccugaugagcaucaucagcaccuuccaccugagcauccccaacuucaaccaguacgaggccaugagcugcgacuucaacggcggcaagaucagcgugcaguacaaccugagccacagcuacgccaucgacgccgccaaccacugcggcaccguggccaacggcauccugcagaccuucaugagaauggccuggggcggcagcuacaucgcccuggacagcggcagaggcaacugggacugcaucaugaccagcuaccaguaccugaucauccagaacaccaccugggagaaccacugccaguucagcagacccagccccaucggcuaccugggccugcugagccagagaaccagagacaucuacaucagcagaagacugcugggcaccuucaccuggacccugagcgacagcgagggcaacgccacccccggcggcuacugccugaccagauggaugcugaucgaggccgagcugaagugcuucggcaacaccgccguggccaagugcaacgagaagcacgacgaggaguucugcgacaugcugagacuguucgacuucugcaagcaggccaucagcagacugaagagcgaggcccagaugagcauccagcugaucaacaaggccgugaacgcccugaucaacgaccagcugaucaugaagaaccaccugagagacaucaugggcauccccuacugcaacuacagcaaguacugcuaccugaaccacaccaucaccggcaagaccagccugcccaagugcugccuggugagcaacggcagcuaccugaacgagacccacuucagcgacgacaucgagcagcaggccgacaacaugaucaccgagaugcugcagaaggaguacauggagagacagggcaagaccccccugggccugguggaccuguucguguucagcaccagcuucuaccugaucagcaucuuccugagacuggugaagauccccacccacagacacaucgugggcaagcccugccccaagccccacagacugaaccacaugggcaucugcagcugcggccuguacaagcagcccggcgugcccgugagauggaagagaugaggacuaguaauaaggaaacuguaugaaugucugugggcaggaagugaagagauccuucuguaaagguuuuuggaauuaugucugcugaauaauaaacuuuuuugaaauaauaaaucugguagaaaaaugagaucucaaaggcucuuuucagagccaccaaaaaaaaaaaaaaaaaaaaaaaaaaaaaaaaaaaaaaaaaaaaaaaaaaaaaaaaaaaaaaaaaaaaaaaaaaaaaaaaaaaaaaaaaaaaaaaaaaaaa

SEQ ID NO: 41034 - RNA, 1809 nt, Artificial Sequence
  mRNA product Design b-4 (hSL-A100) comprising derived and/or modified sequence from LASV(Togo/2016/7082;Clade VI)__AMR44577__GPCmut12 (opt4)
aggagagucccgcagucggcguccagcggcucugcuuguucgugugugugucguugcaggccuuauucaagcuuaccaugggccagaucaucaccuucuuccaggaggugccccacgugaucgaggaggugaugaacaucgugcugaucgcccugagccugcuggccauccugaagggcguguacaacguggccaccugcggcaucaucggccuggugaccuuccuguuccugugcggcagaagcugcagccugaucuacaagggcagcuacgagcugcagacccuggagcugaacauggagacccugaacaugugcaugccccugagcugcaccaagaacagcagccaccacuacaucagagugggcaacgagaccggccuggagcugacccugaccaacaccagcaucaucaaccacaaguucugcaaccugagcgacgcccacaagagaaaccuguacgaccacgcccugaugagcauccugagcaccuuccaccugagcauccccaacuucaaccaguacgaggccaugagcugcgacuucaacggcggcaagaucagcgugcaguacaaccugagccacgccuacgccguggacgccgccgagcacugcggcaccguggccaacggcgugcugcagaccuucaugagaauggccuggggcggcagcuacaucgcccuggacagcggcagaggcaacugggacugcaucaugaccagcuaccaguaccugaucauccagaacaccaccugggaggaccacugccaguucagcagacccagccccaucggcuaccugggccugcugagccagagaaccagagacaucuacaucagcagaagacugcugggcaccuucaccuggacccugagcgacagcgagggcaacgagacccccggcggcuacugccugaccagauggaugcugaucgaggccgagcugaagugcuucggcaacaccgccguggccaagugcaacgagaagcacgacgaggaguucugcgacaugcugagacuguucgacuucugcaagcaggccauccagagacugaagagcgaggcccagaugagcauccagcugaucaacaaggccgugaacgcccugaucaacgaccagcugaucaugaagaaccaccugagagacaugaugggcauccccuacugcaacuacagcaaguacugcuaccugaaccacaccagcagcggcagaaccagccugcccaagugcugccuggugagcaacggcagcuaccugaacgagacccacuucagcgacgacaucgagcagcaggccgacaacaugaucaccgagaugcugcagaaggaguacaucgacagacagggcaagaccccccugggccugguggaccuguucguguucagcaccagcuucuaccugaucagcaucuuccugcaccugaucaagauccccacccacagacacaucgugggcaagcccugccccaagccccacagacugaaccacaugggcaucugcagcugcggccuguacaagcagcccggcgugcccaccagauggaagagaugaggacuaguaauaaggaaacuguaugaaugucugugggcaggaagugaagagauccuucuguaaagguuuuuggaauuaugucugcugaauaauaaacuuuuuugaaauaauaaaucugguagaaaaaugagaucucaaaggcucuuuucagagccaccaaaaaaaaaaaaaaaaaaaaaaaaaaaaaaaaaaaaaaaaaaaaaaaaaaaaaaaaaaaaaaaaaaaaaaaaaaaaaaaaaaaaaaaaaaaaaaaaaaaaa

SEQ ID NO: 41035 - RNA, 1809 nt, Artificial Sequence
  mRNA product Design b-4 (hSL-A100) comprising derived and/or modified sequence from LASV(KAK-428;Clade n.d. (VII))__ANH09740__GPCmut12 (opt4)
aggagagucccgcagucggcguccagcggcucugcuuguucgugugugugucguugcaggccuuauucaagcuuaccaugggccagaucgugaccuucuuccaggaggugccccacgugaucgaggaggugaugaacaucgugcugaucgcccugagccugcuggccauccugaagggccuguacaacuucgccaccugcggcgugaucggccugaucaccuuccugcugcugugcggcagaagcugcagcgccaccuacaagggccaguacgagcugcagacccuggagcugaacauggagagccugaacaugugcaugccccugagcugcaccaagaacaacagccaccacuacaucagagccggcaacaacaccggccuggagcugacccugaccaacaccagcaucaucagccacaaguucugcaaccugagcgacgcccacaagaagaaccuguacgaccacacccugaugagcaucaucaccaccuuccaccugagcauccccaacuucaaccaguacgaggccaugagcugcgacuucaacggcggcaagaucagcauccaguacaaccugagccacagcuacgccggcgacgccgcccagcacugcggcaccguggccaacggcgugcugcagaccuucaugagaauggccuggggcggcagcuaccuggcccuggacagcggcagaagaggcugggacugcaucaucagcagcuaccaguaccugaucauccagaacaccaccugggacgaccacugccaguucagcagacccagccccaucggcuaccugggcuucgugagccagaagaccagagacaucuacaucagcagaagacugcugggcaccuucaccuggacccugagcgacagcgagggccacgacaugcccggcggcuacugccugaccagauggaugcugaucgaggccgaccugaagugcuucggcaacaccgccguggccaagugcaacgagaagcacgacgaggaguucugcgacauguggagacuguucgacuucugcaagcaggccauccagagacugaaggccgaggcccagaugaacauccagcugaucaacaaggccgugaacgcccugaucaacgaccagcugaugaugaagaaccaccugagagacaucaugggcauccccuacugcaacuacagcaaguucugcuaccugaacaacaccaccaccggcagaaccagccugcccagaugcugccugaucagcaacggcagcuaccugaacgagacccacuucagcgacgacaucgagcagcaggccgacaacaugaucaccgagaugcugcagaaggaguacauggacagacagggcaagaccccccugggccugguggaccuguucguguucagcaccagcuucuaccugaucaccaucuuccugcaccuggugaagauccccacccacagacacaucgugggcaagcccugccccaagccccacagacugaaccacaugggcaucugcagcugcggccuguacaagcagcccggcgugcccgugagauggaagagaugaggacuaguaauaaggaaacuguaugaaugucugugggcaggaagugaagagauccuucuguaaagguuuuuggaauuaugucugcugaauaauaaacuuuuuugaaauaauaaaucugguagaaaaaugagaucucaaaggcucuuuucagagccaccaaaaaaaaaaaaaaaaaaaaaaaaaaaaaaaaaaaaaaaaaaaaaaaaaaaaaaaaaaaaaaaaaaaaaaaaaaaaaaaaaaaaaaaaaaaaaaaaaaaaa

SEQ ID NO: 41036 - RNA, 1809 nt, Artificial Sequence; identical to SEQ ID NO: 41030
  mRNA product Design b-4 (hSL-A100) comprising derived and/or modified sequence from LASV(Pinneo-NIG-1969;Clade I)__AIT17836__GPCmut12 (opt4)

SEQ ID NO: 41037 - RNA, 1809 nt, Artificial Sequence
  mRNA product Design b-4 (hSL-A100) comprising derived and/or modified sequence from LASV(ISTH0009-NIG-2011;Clade II)__AIT17404__GPCmut12 (opt4)
aggagagucccgcagucggcguccagcggcucugcuuguucgugugugugucguugcaggccuuauucaagcuuaccaugggccagaucaucaccuucuuccaggaggugccccacgugaucgaggaggugaugaacaucgugcugaucgcccugagccugcuggccauccugaagggcaucuacaacguggccaccugcggccuguucggccuggugagcuuccugcugcugugcggcagaagcugcagcaccaccuacaagggcguguacgagcugcagacccuggagcuggacauggccagccugaacaugugcaugccccugagcugcaccaagaacaacagccaccacuacaucauggugggcaacgagaccggccuggagcugacccugaccaacaccagcaucaucaaccacaaguucugcaaccugagcgacgcccacaagaagaaccuguacgaccacgcccugaugagcaucaucagcaccuuccaccugagcauccccaacuucaaccaguacgaggccaugagcugcgacuucaacggcggcaagaucagcgugcaguacaaccugagccacgccuacgccguggacgccgccaaccacugcggcaccaucgccaacggcgugcugcagaccuucaugagaauggccuggggcggcagcuacaucgcccuggacagcggcaagggcagcugggacugcaucaugaccagcuaccaguaccugaucauccagaacaccaccugggaggaccacugccaguucagcagacccagccccaucggcuaccugggccugcugagccagagaaccagagacaucuacaucagcagaagacugcugggcaccuucaccuggacccugagcgacagcgagggcaacgagacccccggcggcuacugccugaccagauggaugcugaucgaggccgagcugaagugcuucggcaacaccgccguggccaagugcaacgagaagcacgacgaggaguucugcgacaugcugagacuguucgacuucugcaagcaggccaucagaagacugaagaccgaggcccagaugagcauccagcugaucaacaaggccgugaacgcccugaucaacgaccagcugaucaugaagaaccaccugagagacaucaugggcauccccuacugcaacuacagcaaguacugcuaccugaaccacaccgugaccggcaagaccagccugcccagaugcugccuggugagcaacggcagcuaccugaacgagacccacuucagcgacgacaucgagcagcaggccgacaacaugaucaccgagcugcugcagaaggaguacauggacagacagggcaagaccccccugggccugguggaccuguucguguucagcaccagcuucuaccugaucagcaucuuccugcaccugaucaagauccccacccacagacacaucaccggcaagcccugccccaagccccacagacugaaccacaugggcaucugcagcugcggccuguacaagcaccccggcgugcccgugaaguggaagagaugaggacuaguaauaaggaaacuguaugaaugucugugggcaggaagugaagagauccuucuguaaagguuuuuggaauuaugucugcugaauaauaaacuuuuuugaaauaauaaaucugguagaaaaaugagaucucaaaggcucuuuucagagccaccaaaaaaaaaaaaaaaaaaaaaaaaaaaaaaaaaaaaaaaaaaaaaaaaaaaaaaaaaaaaaaaaaaaaaaaaaaaaaaaaaaaaaaaaaaaaaaaaaaaaa

SEQ ID NO: 41038 - RNA, 1809 nt, Artificial Sequence
  mRNA product Design b-4 (hSL-A100) comprising derived and/or modified sequence from LASV(ISTH2010-NIG-2012;Clade II)__AIT17482__GPCmut12 (opt4)
aggagagucccgcagucggcguccagcggcucugcuuguucgugugugugucguugcaggccuuauucaagcuuaccaugggccagaucaucaccuucuuccaggaggugccccacgugaucgaggaggugaugaacaucgugcugaucgcccugagccugcuggccauccugaagggcaucuacaacguggccaccugcggccuguucggccuggugagcuuccugcugcugugcggcagaagcugcagcaccaccuacaagggcguguacgagcugcagacccuggagcuggacauggccagccugaacaugugcaugccccugagcugcaccaagaacaacagccaccacuacaucauggugggcaacgagaccggccuggagcugacccugaccaacaccagcaucaucaaccacaaguucugcaaccugagcgacgcccacaagaagaaccuguacgaccacgcccugaugagcaucaucagcaccuuccaccugagcauccccaacuucaaccaguacgaggccaugagcugcgacuucaacggcggcaagaucagcgugcaguacaaccugagccacgccuacgccguggacgccgccaaccacugcggcaccaucgccaacggcgugcugcagaccuucaugagaauggccuggggcggcagcuacaucgcccuggacagcggcaagggcagcugggacugcaucaugaccagcuaccaguaccugaucauccagaacaucaccugggaggaccacugccaguucagcagacccagccccaucggcuaccugggccugcugagccagagaaccagagacaucuacaucagcagaagacugcugggcaccuucaccuggacccugagcgacagcgagggcaacgagacccccggcggcuacugccugaccagauggaugcugaucgaggccgagcugaagugcuucggcaacaccgccguggccaagugcaacgagaagcacgacgaggaguucugcgacaugcugagacuguucgacuucugcaagcaggccaucagaagacugaagaccgaggcccagaugagcauccagcugaucaacaaggccgugaacgcccugaucaacgaccagcugaucaugaagaaccaccugagagacaucaugggcauccccuacugcaacuacagcaaguacugcuaccugaaccacaccgugaccggcaagaccagccugcccagaugcugccuggugagcaacggcagcuaccugaacgagacccacuucagcgacgacaucgagcagcaggccgacaacaugaucaccgagcugcugcagaaggaguacaucgacagacagggcaagaccccccugggccugguggaccuguucguguucagcaccagcuucuaccugaucagcaucuuccugcaccuggugaagauccccacccacagacacguggugggcaagcccugccccaagccccacagacugaaccacaugggcaucugcagcugcggccuguacaagcaccccggcgugcccgugaaguggaagagaugaggacuaguaauaaggaaacuguaugaaugucugugggcaggaagugaagagauccuucuguaaagguuuuuggaauuaugucugcugaauaauaaacuuuuuugaaauaauaaaucugguagaaaaaugagaucucaaaggcucuuuucagagccaccaaaaaaaaaaaaaaaaaaaaaaaaaaaaaaaaaaaaaaaaaaaaaaaaaaaaaaaaaaaaaaaaaaaaaaaaaaaaaaaaaaaaaaaaaaaaaaaaaaaaa

SEQ ID NO: 41039 - RNA, 1809 nt, Artificial Sequence
  mRNA product Design b-4 (hSL-A100) comprising derived and/or modified sequence from LASV(Lassa virus/H.sapiens-wt/NGA/2015/ISTH_0543;Clade II)__AVO03639__GPCmut12 (opt4)
aggagagucccgcagucggcguccagcggcucugcuuguucgugugugugucguugcaggccuuauucaagcuuaccaugggccagaucaucaccuucuuccaggaggugccccacgugaucgaggaggugaugaacaucgugcugaucgcccugagccugcuggccauccugaagggcaucuacaacguggccaccugcggccuguucggccuggugagcuuccugcugcugugcggcagaagcugcagcaccaccuacaagggcguguacgagcugcagacccuggagcuggacauggccaaccugaacaugugcaugccccugagcugcaccaagaacaacagccaccacuacaucauggugggcaacgagaccggccuggagcugacccugaccaacaccagcaucaucaaccacaaguucugcaaccugagcgacgcccacaagaagaaccuguacgaccacgcccugaugagcaucaucagcaccuuccaccugagcauccccaacuucaaccaguacgaggccaugagcugcgacuucaacggcggcaagaucagcgugcaguacaaccugagccacaccuacgccguggacgccgccaaccacugcggcaccaucgccaacggcgugcugcagaccuucaugagaauggccuggggcggcagcuacaucgcccuggacagcggcaagggcagcugggacugcaucaugaccagcuaccaguaccuggugauccagaacaccaccugggaggaccacugccaguucagcagacccagccccaucggcuaccugggccugcugagccagagaaccagagacaucuacaucagcagaagacugcugggcaccuucaccuggacccugagcgacagcgagggcaacgagacccccggcggcuacugccugaccagauggaugcugaucgaggccgagcugaagugcuucggcaacaccgccguggccaagugcaacgagaagcacgacgaggaguucugcgacaugcugagacuguucgacuucugcaagcaggccaucagaagacugaagaccgaggcccagaugagcauccagcugaucaacaaggccgugaacgcccugaucaacgaccagcugaucaugaagaaccaccugagagacaucaugggcauccccuacugcaacuacagcaaguacugcuaccugaaccacaccgugaccggcaagaccagccugcccagaugcugccuggugagcaacggcagcuaccugaacgagacccacuucagcgacgacaucgagcagcaggccgacaacaugaucaccgagcugcugcagaaggaguacaucgacagacagggcaagaccccccugggccugguggaccuguucguguucagcaccagcuucuaccugaucagcaucuuccugcaccuggugaagauccccacccacagacacaucaccggcaagcccugccccaagccccacagacugaaccacaugggcaucugcagcugcggccuguacaagcaccccggcgugcccgugaaguggaagagaugaggacuaguaauaaggaaacuguaugaaugucugugggcaggaagugaagagauccuucuguaaagguuuuuggaauuaugucugcugaauaauaaacuuuuuugaaauaauaaaucugguagaaaaaugagaucucaaaggcucuuuucagagccaccaaaaaaaaaaaaaaaaaaaaaaaaaaaaaaaaaaaaaaaaaaaaaaaaaaaaaaaaaaaaaaaaaaaaaaaaaaaaaaaaaaaaaaaaaaaaaaaaaaaaa

SEQ ID NO: 41040 - RNA, 1809 nt, Artificial Sequence
  mRNA product Design b-4 (hSL-A100) comprising derived and/or modified sequence from LASV(Lassa virus/H.sapiens-wt/NGA/2016/ISTH_0009;Clade II)__AVO03571__GPCmut12 (opt4)
aggagagucccgcagucggcguccagcggcucugcuuguucgugugugugucguugcaggccuuauucaagcuuaccaugggccagaucaucaccuucuuccaggaggugccccacgugaucgaggaggugaugaacaucgugcugaucgcccugagccugcuggccauccugaagggcaucuacaacguggccaccugcggccugcugggccuggugagcuuccugcugcugugcggcagaagcugcagcaccaccuacaagggcguguacgagcugcagacccuggagcuggacauggccagccugaacaugugcaugccccugagcugcaccaagaacaacagccaccacuacaucauggugggcaacgagaccggccuggagcugacccugaccaacaccagcaucaucaaccacaaguucugcaaccugagcgacgcccacaagaagaaccuguacgaccacgcccugaugagcaucaucagcaccuuccaccugagcauccccaacuucaaccaguacgaggccaugagcugcgacuucaacggcggcagaaucagcgugcaguacaaccugagccacagcuacgccguggacgccgccaaccacugcggcaccaucgccaacggcgugcugcagaccuucaugagaauggccuggggcggcagcuacaucgcccuggacagcggcaagggcagcugggacugcaucaugaccagcuaccaguaccugaucauccagaacaccaccugggaggaccacugccaguucagcagacccagccccaucggcuaccugggccugcugagccagagaaccagagacaucuacaucagcagaagacugcugggcaccuucaccuggacccugagcgacagcgagggcaacgagacccccggcggcuacugccugaccagauggaugcugaucgaggccgagcugaagugcuucggcaacaccgccguggccaagugcaacgagaagcacgacgaggaguucugcgacaugcugagacuguucgacuucugcaagcaggccaucagaagacugaagaccgaggcccagaugagcauccagcugaucaacaaggccgugaacgcccugaucaacgaccagcugaucaugaagaaccaccugagagacaucaugggcauccccuacugcaacuacagcaaguacugcuaccugaaccacaccgugaccggcaagaccagccugcccagaugcugccuggugagcaacggcagcuaccugaacgagacccacuucagcgacgacaucgagcagcaggccgacaacaugaucaccgagcugcugcagaaggaguacaucgacagacagggcaagaccccccugggccugguggaccuguucguguucagcaccagcuucuaccugaucagcaucuuccugcaccuggugaagauccccacccacagacacaucaccggcaagcccugccccaagccccacagacugaaccacaugggcaucugcagcugcggccuguacaaccaccccggcgugcccgugaaguggaagagaugaggacuaguaauaaggaaacuguaugaaugucugugggcaggaagugaagagauccuucuguaaagguuuuuggaauuaugucugcugaauaauaaacuuuuuugaaauaauaaaucugguagaaaaaugagaucucaaaggcucuuuucagagccaccaaaaaaaaaaaaaaaaaaaaaaaaaaaaaaaaaaaaaaaaaaaaaaaaaaaaaaaaaaaaaaaaaaaaaaaaaaaaaaaaaaaaaaaaaaaaaaaaaaaaa

SEQ ID NO: 41041 - RNA, 1809 nt, Artificial Sequence
  mRNA product Design b-4 (hSL-A100) comprising derived and/or modified sequence from LASV(Lassa virus/H.sapiens-wt/NGA/2016/ISTH_0017;Clade II)__AVO03567__GPCmut12 (opt4)
aggagagucccgcagucggcguccagcggcucugcuuguucgugugugugucguugcaggccuuauucaagcuuaccaugggccagaucaucaccuucuuccaggaggugccccacgugaucgaggaggugaugaacaucgugcugaucgcccugagccugcuggccauccugaagggcaucuacaacguggccaccugcggccuguucggccuggugagcuuccugcugcugugcggcagaagcugcagcaccaccuacaagggcguguacgagcugcagacccuggagcuggacauggccagccugaacaugugcaugccccugagcugcaccaagaacaacagccaccacuacaucauggugggcaacgagaccggccuggagcugacccugaccaacaccagcaucaucaaccacaaguucugcaaccugagcgacgcccacaagaagaaccuguacgaccacgcccugaugagcaucaucagcaccuuccaccugagcauccccaacuucaaccaguacgaggccaugagcugcgacuucaacggcggcaagaucagcgugcaguacaaccugagccacaccuacgccaucgacgccgccaaccacugcggcaccaucgccaacggcgugcugcagaccuucaugagaauggccuggggcggcagcuacaucgcccuggacagcggcaagggcagcugggacugcaucaugaccagcuaccaguaccugaucauccagaacaccaccugggaggaccacugccaguucagcagacccagccccaucggcuaccugggccugcugagccagagaaccagagacaucuacaucagcagaagacugcugggcaccuucaccuggacccugagcgacagcgagggcaacgagacccccggcggcuacugccugaccagauggaugcugaucgaggccgagcugaagugcuucggcaacaccgccguggccaagugcaacgagaagcacgacgaggaguucugcgacaugcugagacuguucgacuucugcaagcaggccaucagaagacugaagaccgaggcccagaugagcauccagcugaucaacaaggccgugaacgcccugaucaacgaccagcugaucaugaagaaccaccugagagacaucaugggcauccccuacugcaacuacagcaaguacugcuaccugaaccacaccgugaccggcaagaccagccugcccagaugcugccuggugagcaacggcagcuaccugaacgagacccacuucagcgacgacaucgagcagcaggccgacaacaugaucaccgagcugcugcagaaggaguacauggacagacagggcaagaccccccugggccugguggaccuguucguguucagcaccagcuucuaccugaucagcaucuuccugcaccuggugagaauccccacccacagacacgugaucggcaagcccugccccaagccccacagacugaaccacaugggcaucugcagcugcggccuguacaagcaccccggcgugcccgugaaguggaagagaugaggacuaguaauaaggaaacuguaugaaugucugugggcaggaagugaagagauccuucuguaaagguuuuuggaauuaugucugcugaauaauaaacuuuuuugaaauaauaaaucugguagaaaaaugagaucucaaaggcucuuuucagagccaccaaaaaaaaaaaaaaaaaaaaaaaaaaaaaaaaaaaaaaaaaaaaaaaaaaaaaaaaaaaaaaaaaaaaaaaaaaaaaaaaaaaaaaaaaaaaaaaaaaaaa

SEQ ID NO: 41042 - RNA, 1809 nt, Artificial Sequence
  mRNA product Design b-4 (hSL-A100) comprising derived and/or modified sequence from LASV(Lassa virus/H.sapiens-wt/NGA/2018/ISTH_0959;Clade II)__AVV65099__GPCmut12 (opt4)
aggagagucccgcagucggcguccagcggcucugcuuguucgugugugugucguugcaggccuuauucaagcuuaccaugggccagaucaucaccuucuuccaggaggugccccacgugaucgaggaggugaugaacaucgugcugaucgcccugagccugcuggccauccugaagggcaucuacaacguggugaccugcggccuguucggccuggugagcuuccugcugcugugcggcagaagcugcagcaccaccuacaagggcguguacgagcugcagacccuggagcuggacauggccagccugaacaugugcaugccccugagcugcaccaagaacaacagccaccacuacaucauggugggcaacgagaccggccuggagcugacccugaccaacaccagcaucaucaaccacaaguucugcaaccugagcgacgcccacaagaagaaccuguacgaccacgcccugaugagcaucaucagcaccuuccaccugagcauccccaacuucaaccaguacgaggccaugagcugcgacuucaacggcggcaagaucagcgugcaguacaaccugagccacgccuacgccaucgacgccgccaaccacugcggcaccaucgccaacggcgugcugcagaccuucaugagaauggccuggggcggcagcuacaucgcccuggacagcggcaagggcagcugggacugcaucaugaccagcuaccaguaccugaucauccagaacaccaccugggaggaccacugccaguucagcagacccagccccaucggcuaccugggccugcugagccagagaaccagagacaucuacaucagcagaagacugcugggcaccuucaccuggacccugagcgacagcgagggcaacgagacccccggcggcuacugccugaccagauggaugcugaucgaggccgagcugaagugcuucggcaacaccgccguggccaagugcaacgagaagcacgacgaggaguucugcgacaugcugagacuguucgacuucugcaagcaggccaucagaagacugaagaccgaggcccagaugagcauccagcugaucaacaaggccgugaacgcccugaucaacgaccagcugaucaugaagaaccaccugagagacaucaugggcauccccuacugcaacuacagcaaguacugcuaccugaaccacaccgugaccggcaagaccagccugcccagaugcugccuggugagcaacggcagcuaccugaacgagacccacuucagcgacgacaucgagcagcaggccgacaacaugaucaccgagcugcugcagaaggaguacaucgacagacagggcaagaccccccugggccugguggaccuguucguguucagcaccagcuucuaccugaucagcaucuuccugcaccuggugaagauccccacccacagacacgugaucggcaagcccugccccaagccccacagacugaaccacaugggcaucugcagcugcggccuguacaagcaccccggcgugcccgugaaguggaagagaugaggacuaguaauaaggaaacuguaugaaugucugugggcaggaagugaagagauccuucuguaaagguuuuuggaauuaugucugcugaauaauaaacuuuuuugaaauaauaaaucugguagaaaaaugagaucucaaaggcucuuuucagagccaccaaaaaaaaaaaaaaaaaaaaaaaaaaaaaaaaaaaaaaaaaaaaaaaaaaaaaaaaaaaaaaaaaaaaaaaaaaaaaaaaaaaaaaaaaaaaaaaaaaaaa

SEQ ID NO: 41043 - RNA, 1809 nt, Artificial Sequence
  mRNA product Design b-4 (hSL-A100) comprising derived and/or modified sequence from LASV(LASV003-NIG-2008;Clade II)__AIT17580__GPCmut12 (opt4)
aggagagucccgcagucggcguccagcggcucugcuuguucgugugugugucguugcaggccuuauucaagcuuaccaugggccagaucaucaccuucuuccaggaggugccccacgugaucgaggaggugaugaacaucgugcugaucgcccugagccugcuggccauccugaagggcaucuacaacguggccaccugcggccuguucggccuggugagcuuccugcugcugugcggcagaagcugcagcaccaccuacaagggcguguacgagcugcagacccuggagcuggacauggccagccugaacaugugcaugccccugagcugcaccaagaacaacagccaccacuacaucauggugggcaacgagaccggccuggagcugacccugaccaacaccagcaucaucaaccacaaguucugcaaccugagcgacgcccacaagaagaaccuguacgaccacgcccugaugagcaucaucagcaccuuccaccugagcauccccaacuucaaccaguacgaggccaugagcugcgacuucaacggcggcaagaucagcgugcaguacaaccugagccacaccuacgccguggacgccgccaaccacugcggcaccaucgccaacggcgugcugcagaccuucaugagaauggccuggggcggcagcuacaucgcccuggacagcggcaagggcagcugggacugcaucaugaccagcuaccaguaccugaucauccagaacaccaccugggaggaccacugccaguucagcagacccagccccaucggcuaccugggccugcugagccagagaaccagagacaucuacaucagcagaagacugcugggcaccuucaccuggacccugagcgacagcgagagcaacgagacccccggcggcuacugccugaccagauggaugcugaucgaggccgagcugaagugcuucggcaacaccgccguggccaagugcaacgagaagcacgacgaggaguucugcgacaugcugagacuguucgacuucugcaagcaggccaucagaagacugaaggccgaggcccagaugagcauccagcugaucaacaaggccgugaacgcccugaucaacgaccagcugaucaugaagaaccaccugagagacaucaugggcauccccuacugcaacuacagcaaguacugcuaccugaaccacaccgugaccggcagaaccagccugcccagaugcugccuggugagcaacggcagcuaccugaacgagacccacuucagcgacgacaucgagcagcaggccgacaacaugaucaccgagcugcugcagaaggaguacauggacagacagggcaagaccccccugggccugguggaccuguucguguucagcaccagcuucuaccugaucagcaucuuccugcaccuggugaagauccccacccacagacacgugaucggcaagcccugccccaagccccacagacugaaccacaugggcaucugcagcugcggccuguacaagcaccccggcgugcccgugaaguggaagagaugaggacuaguaauaaggaaacuguaugaaugucugugggcaggaagugaagagauccuucuguaaagguuuuuggaauuaugucugcugaauaauaaacuuuuuugaaauaauaaaucugguagaaaaaugagaucucaaaggcucuuuucagagccaccaaaaaaaaaaaaaaaaaaaaaaaaaaaaaaaaaaaaaaaaaaaaaaaaaaaaaaaaaaaaaaaaaaaaaaaaaaaaaaaaaaaaaaaaaaaaaaaaaaaaa

SEQ ID NO: 41044 - RNA, 1809 nt, Artificial Sequence
  mRNA product Design b-4 (hSL-A100) comprising derived and/or modified sequence from LASV(LASV035-NIG-2009;Clade II)__AIT17588__GPCmut12 (opt4)
aggagagucccgcagucggcguccagcggcucugcuuguucgugugugugucguugcaggccuuauucaagcuuaccaugggccagaucaucaccuucuuccaggaggugccccacgugaucgaggaggugaugaacaucgugcugaucgcccugagccugcuggccauccugaagggcaucuacaacguggccaccugcggccuguucggccuggugagcuuccugcugcugugcggcagaagcugcagcaccaccuacaagggcguguacgagcugcagacccuggagcuggacauggccagccugaacaugugcaugccccugagcugcaccaagaacaacagccaccacuacaucauggugggcaacgagaccggccuggagcugacccugaccaacaccagcaucaucaaccacaaguucugcaaccugagcgacgcccacaagaagaaccuguacgaccacgcccugaugagcaucaucagcaccuuccaccugagcauccccaacuucaaccaguacgaggccaugagcugcgacuucaacggcggcaagaucagcgugcaguacaaccugagccacgccuacgccguggacgccgccaaccacugcggcaccaucgccaacggcgugcugcagaccuucaugagaauggccuggggcggcagcuacaucgcccuggacagcggcaagggcagcugggacugcaucaugaccagcuaccaguaccugaucauccagaacaccaccugggaggaccacugccaguucagcagacccagccccaucggcuaccugggccugcugagccagagaaccagagacaucuacaucagcagaagacugcugggcaccuucaccuggacccugagcgacagcgagggcaacgagacccccggcggcuacugccugaccagauggaugcugaucgaggccgagcugaagugcuucggcaacaccgccguggccaagugcaacgagaagcacgacgaggaguucugcgacaugcugagacuguucgacuucugcaagcaggccaucagaagacugaaggccgaggcccagaugagcauccagcugaucaacaaggccgugaacgcccugaucaacgaccagcugaucaugaagaaccaccugagagacaucaugggcauccccuacugcaacuacagcaaguacugcuaccugaaccacaccgugaccggcaagaccagccugcccagaugcugccuggugagcaacggcagcuaccugaacgagacccacuucagcgacgacaucgagcagcaggccgacaacaugaucaccgagcugcugcagaaggaguacaucgacagacagggcaagaccccccugggccugguggaccuguucguguucagcaccagcuucuaccugaucagcaucuuccugcaccuggugaagauccccacccacagacacgugaucggcaagcccugccccaagccccacagacugaaccacaugggcaucugcagcugcggccuguacaagcaccccggcgugcccgugaaguggaagagaugaggacuaguaauaaggaaacuguaugaaugucugugggcaggaagugaagagauccuucuguaaagguuuuuggaauuaugucugcugaauaauaaacuuuuuugaaauaauaaaucugguagaaaaaugagaucucaaaggcucuuuucagagccaccaaaaaaaaaaaaaaaaaaaaaaaaaaaaaaaaaaaaaaaaaaaaaaaaaaaaaaaaaaaaaaaaaaaaaaaaaaaaaaaaaaaaaaaaaaaaaaaaaaaaa

SEQ ID NO: 41045 - RNA, 1809 nt, Artificial Sequence
  mRNA product Design b-4 (hSL-A100) comprising derived and/or modified sequence from LASV(LASV1000-NIG-2009;Clade II)__AIT17782__GPCmut12 (opt4)
aggagagucccgcagucggcguccagcggcucugcuuguucgugugugugucguugcaggccuuauucaagcuuaccaugggccagaucaucaccuucuuccaggaggugccccacgugaucgaggaggugaugaacaucgugcugaucgcccugagccugcuggccauccugaagggcaucuacaacguggccaccugcggccuguucggccuggugagcuuccugcugcugugcggcagaagcugcagcaccaccuacaagggcguguacgagcugcagacccuggagcuggacauggccagccugaacaugugcaugccccugagcugcaccaagaacaacagccaccacuacaucauggugggcaacgagaccggccuggagcugacccugaccaacaccagcaucaucaaccacaaguucugcaaccugagcgacgcccacaagaagaaccuguacgaccacgcccugaugagcaucaucagcaccuuccaccugagcauccccaacuucaaccaguacgaggccaugagcugcgacuucaacggcggcaagaucagcgugcaguacaaccugagccacaccuacgccguggacgccgccaaccacugcggcaccaucgccaacggcgugcugcagaccuucaugagaauggccuggggcggcagcuacaucgcccuggacagcggcaagggcagcugggacugcaucaugaccagcuaccaguaccugaucauccagaacaccaccugggaggaccacugccaguucagcagacccagccccaucggcuaccugggccugcugagccagagaaccagagacaucuacaucagcagaagacugcugggcaccuucaccuggacccugagcgacagcgagggcaacgagacccccggcggcuacugccugaccagauggaugcugaucgaggccgagcugaagugcuucggcaacaccgccguggccaagugcaacgagaagcacgacgaggaguucugcgacaugcugagacuguucgacuucugcaagcaggccaucaagagacugaagaccgaggcccagaugagcauccagcugaucaacaaggccgugaacgcccugaucaacgaccagcugaucaugaagaaccaccugagagacaucaugggcauccccuacugcaacuacagcaaguacugcuaccugaaccacaccgugaccggcaagaccagccugcccagaugcugccuggugagcaacggcagcuaccugaacgagacccacuucagcgacgacaucgagcagcaggccgacaacaugaucaccgagcugcugcagaaggaguacaucgacagacagggcaagaccccccugggccugguggaccuguucguguucagcaccagcuucuaccugaucagcaucuuccugcaccuggugaagauccccacccacagacacguggugggcaagcccugccccaagccccacagacugaaccacaugggcaucugcagcugcggccuguacaagcaccccggcgugcccgugaaguggaagagaugaggacuaguaauaaggaaacuguaugaaugucugugggcaggaagugaagagauccuucuguaaagguuuuuggaauuaugucugcugaauaauaaacuuuuuugaaauaauaaaucugguagaaaaaugagaucucaaaggcucuuuucagagccaccaaaaaaaaaaaaaaaaaaaaaaaaaaaaaaaaaaaaaaaaaaaaaaaaaaaaaaaaaaaaaaaaaaaaaaaaaaaaaaaaaaaaaaaaaaaaaaaaaaaaa

SEQ ID NO: 41046 - RNA, 1809 nt, Artificial Sequence
  mRNA product Design b-4 (hSL-A100) comprising derived and/or modified sequence from LASV(LASV221-NIG-2010;Clade II)__AIT17624__GPCmut12 (opt4)
aggagagucccgcagucggcguccagcggcucugcuuguucgugugugugucguugcaggccuuauucaagcuuaccaugggccagaucaucaccuucuuccaggaggugccccacgugaucgaggaggugaugaacaucgugcugaucgcccugagccugcuggccauccugaagggcaucuacaacguggccaccugcggccuguucggccuggugagcuuccugcugcugugcggcagaagcugcagcaccaccuacaagggcguguacgagcugcagacccuggagcuggacauggccagccugaacaugugcaugccccugagcugcaccaagaacaacagccaccacuacaucauggugggcaacgagaccggccuggagcugacccugaccaacaccagcaucaucaaccacaaguucugcaaccugagcgacgcccacaagaagaaccuguacgaccacgcccugaugagcaucaucagcaccuuccaccugagcauccccaacuucaaccaguacgaggccaugagcugcgacuucaacggcggcaagaucagcgugcaguacaaccugagccacaccuacgccaucgacgccgccaaccacugcggcaccaucgccaacggcgugcugcagaccuucaugagaauggccuggggcggcagcuacaucgcccuggacagcggcaagggcagcugggacugcaucaugaccagcuaccaguaccugaucauccagaacaccaccugggaggaccacugccaguucagcagacccagccccaucggcuaccugggccugcugagccagagaaccagagacaucuacaucagcagaagacugcugggcaccuucaccuggacccugagcgacagcgagggcaacgagacccccggcggcuacugccugaccagauggaugcugaucgaggccgagcugaagugcuucggcaacaccgccguggccaagugcaacgagaagcacgacgaggaguucugcgacaugcugagacuguucgacuucugcaagcaggccaucagaagacugaagaccgaggcccagaugagcauccagcugaucaacaaggccgugaacgcccugaucaacgaccagcugaucaugaagaaccaccugagagacaucaugggcauccccuacugcaacuacagcaaguacugcuaccugaaccacaccgugaccggcaagaccagccugcccagaugcugccuggugagcaacggcagcuaccugaacgagacccacuucagcgacgacaucgagcagcaggccgacaacaugaucaccgagaugcugcagaaggaguacauggacagacagggcaagaccccccugggccugguggaccuguucguguucagcaccagcuucuaccugaucagcaucuuccugcaccuggugaagauccccacccacagacacgugaucggcaagcccugccccaagccccacagacugaaccacaugggcaucugcagcugcggccuguacaagcaccccggcgugcccgugaaguggaagagaugaggacuaguaauaaggaaacuguaugaaugucugugggcaggaagugaagagauccuucuguaaagguuuuuggaauuaugucugcugaauaauaaacuuuuuugaaauaauaaaucugguagaaaaaugagaucucaaaggcucuuuucagagccaccaaaaaaaaaaaaaaaaaaaaaaaaaaaaaaaaaaaaaaaaaaaaaaaaaaaaaaaaaaaaaaaaaaaaaaaaaaaaaaaaaaaaaaaaaaaaaaaaaaaaa

SEQ ID NO: 41047 - RNA, 1809 nt, Artificial Sequence
  mRNA product Design b-4 (hSL-A100) comprising derived and/or modified sequence from LASV(LASV237-NIG-2010;Clade II)__AIT17638__GPCmut12 (opt4)
aggagagucccgcagucggcguccagcggcucugcuuguucgugugugugucguugcaggccuuauucaagcuuaccaugggccagaucaucaccuucuuccaggaggugccccacgugaucgaggaggugaugaacaucgugcugaucgcccugagccugcuggccauccugaagggcaucuacaacguggccaccugcggccuguucggccuggugagcuuccugcugcugugcggcagaagcugcagcaccaccuacaagggcguguacgagcugcagacccuggagcuggacauggccagccugaacaugugcaugccccugagcugcaccaagaacaacagccaccacuacaucauggugggcaacgagaccggccuggagcugacccugaccaacaccagcaucaucaaccacaaguucugcaaccugagcgacgcccacaagaaggaccuguacgaccacgcccugaugagcaucaucagcaccuuccaccugagcauccccaacuucaaccaguacgaggccaugagcugcgacuucaacggcggcaagaucagcgugcaguacaaccugagccacaccuacgccguggacgccgccaaccacugcggcaccaucgccaacggcgugcugcagaccuucaugagaauggccuggggcggcagcuacaucgcccuggacagcggcaagggcagcugggacugcaucaugaccagcuaccaguaccugaucauccagaacaccaccugggaggaccacugccaguucagcagacccagccccaucggcuaccugggccugcugagccagagaaccagagacaucuacaucagcagaagacugcugggcaccuucaccuggacccugagcgacagcgagggcaacgagacccccggcggcuacugccugaccagauggaugcugaucgaggccgagcugaagugcuucggcaacaccgccguggccaagugcaacgagaagcacgacgaggaguucugcgacaugcugagacuguucgacuucugcaagcaggccaucagaagacugaagaccgaggcccagaugagcauccagcugaucaacaaggccgugaacgcccugaucaacgaccagcugaucaugaagaaccaccugagagacaucaugggcauccccuacugcaacuacagcaaguacugcuaccugaaccacaccgugaccggcaagaccagccugcccagaugcugccuggugagcaacggcagcuaccugaacgagacccacuucagcgacgacaucgagcagcaggccgacaacaugaucaccgagcugcugcagaaggaguacauggacagacagggcaagaccccccugggccugguggaccuguucguguucagcaccagcuucuaccugaucagcaucuuccugcaccugaucaagauccccacccacagacacaucaccggcaagcccugccccaagccccacagacugaaccacaugggcaucugcagcugcggccuguacaagcaccccggcgugcccgugaaguggaagagaugaggacuaguaauaaggaaacuguaugaaugucugugggcaggaagugaagagauccuucuguaaagguuuuuggaauuaugucugcugaauaauaaacuuuuuugaaauaauaaaucugguagaaaaaugagaucucaaaggcucuuuucagagccaccaaaaaaaaaaaaaaaaaaaaaaaaaaaaaaaaaaaaaaaaaaaaaaaaaaaaaaaaaaaaaaaaaaaaaaaaaaaaaaaaaaaaaaaaaaaaaaaaaaaaa

SEQ ID NO: 41048 - RNA, 1809 nt, Artificial Sequence
  mRNA product Design b-4 (hSL-A100) comprising derived and/or modified sequence from LASV(LASV253-NIG-2011;Clade II)__AIT17670__GPCmut12 (opt4)
aggagagucccgcagucggcguccagcggcucugcuuguucgugugugugucguugcaggccuuauucaagcuuaccaugggccagaucaucaccuucuuccaggaggugccccacgugaucgaggaggugaugaacaucgugcugaucgcccugagccugcuggccauccugaagggcaucuacaacguggccaccugcggccuguucggccuggugagcuuccugcugcugugcggcagaagcugcagcaccaccuacaagggcguguacgagcugcagacccuggagcuggacauggccagccugaacaugugcaugccccugagcugcaccaagaacaacagccaccacuacaucauggugggcaacgagaccggccuggagcugacccugaccaacaccagcaucaucaaccacaaguucugcaaccugagcgacgcccacaagaagaaccuguacgaccacgcccugaugagcaucaucagcaccuuccaccugagcauccccaacuucaaccaguacgaggccaugagcugcgacuucaacggcggcaagaucagcgugcaguacaaccugagccacaccuacgccguggacgccgccaaccacugcggcaccaucgccaacggcgugcugcagaccuucaugagaauggccuggggcggcagcuacaucgcccuggacagcggcaagggcagcugggacugcaucaugaccagcuaccaguaccugaucauccagaacaccaccugggaggaccacugccaguucagcagacccagccccaucggcuaccugggccugcugagccagagaaccagagacaucuacaucagcagaagacugcugggcaccuucaccuggacccugagcgacagcgagggcaacgagacccccggcggcuacugccugaccagauggaugcugaucgaggccgagcugaagugcuucggcaacaccgccguggccaagugcaacgagaagcacgacgaggaguucugcgacaugcugagacuguucgacuucugcaagcaggccaucagaagacugaaggccgaggcccagaugagcauccagcugaucaacaaggccgugaacgcccugaucaacgaccagcugaucaugaagaaccaccugagagacaucaugggcauccccuacugcaacuacagcaaguacugcuaccugaaccacaccgugaccggcagaaccagccugcccagaugcugccuggugagcaacggcagcuaccugaacgagacccacuucagcgacgacaucgagcagcaggccgacaacaugaucaccgagcugcugcagaaggaguacaucgacagacagggcaagaccccccugggccugguggaccuguucguguucagcaccagcuucuaccugaucagcaucuuccugcaccuggugaagauccccacccacagacacaucaucggcaagcccugccccaagccccacagacugaaccacaugggcaucugcagcugcggccuguacaagcaccccggcgugcccgugaaguggaagagaugaggacuaguaauaaggaaacuguaugaaugucugugggcaggaagugaagagauccuucuguaaagguuuuuggaauuaugucugcugaauaauaaacuuuuuugaaauaauaaaucugguagaaaaaugagaucucaaaggcucuuuucagagccaccaaaaaaaaaaaaaaaaaaaaaaaaaaaaaaaaaaaaaaaaaaaaaaaaaaaaaaaaaaaaaaaaaaaaaaaaaaaaaaaaaaaaaaaaaaaaaaaaaaaaa

SEQ ID NO: 41049 - RNA, 1809 nt, Artificial Sequence
  mRNA product Design b-4 (hSL-A100) comprising derived and/or modified sequence from LASV(LASV254-NIG-2011;Clade II)__AIT17674__GPCmut12 (opt4)
aggagagucccgcagucggcguccagcggcucugcuuguucgugugugugucguugcaggccuuauucaagcuuaccaugggccagaucaucaccuucuuccaggaggugccccacgugaucgaggaggugaugaacaucgugcugaucgcccugagccugcuggccauccugaagggcaucuacaacguggccaccugcggccuguucggccuggugagcuuccugcugcugugcggcagaagcugcagcaccaccuacaagggcguguacgagcugcagacccuggagcuggacaugaccaaccugaacaugugcaugccccugagcugcaccaagaacaacagccaccacuacaucauggugggcaacgagaccggccuggagcugacccugaccaacaccagcaucaucaaccacaaguucugcaaccugagcgacgcccacaagaagaaccuguacaaccacgcccugaugagcaucaucagcaccuuccaccugagcauccccaacuucaaccaguacgaggccaugagcugcgacuucaacggcggcaagaucagcgugcaguacaaccugagccacagcuacgccguggacgccgccaaccacugcggcaccaucgccaacggcgugcugcagaccuucaugagaauggccuggggcggcagcuacaucgcccuggacagcggcaagggcaacugggacugcaucaugaccagcuaccaguaccugaucauccagaacaccaccugggaggaccacugccaguucagcagacccagccccaucggcuaccugggccugcugagccagagaaccagagacaucuacaucagcagaagacugcugggcaccuucaccuggacccugagcgacagcgagggcaacgagacccccggcggcuacugccugaccagauggaugcugaucgaggccgagcugaagugcuucggcaacaccgccguggccaagugcaacgagaagcacgacgaggaguucugcgacaugcugagacuguucgacuucugcaagcaggccaucagaagacugaagaccgaggcccaggccaacauccagcugaucaacaaggccgugaacgcccugaucaacgaccagcugaucaugaagaaccaccugagagacaucaugggcauccccuacugcaacuacagcaaguacugcuaccugaaccacaccgugaccggcaagaccagccugcccagaugcugccuggugagcaacggcagcuaccugaacgagacccacuucagcgacgacaucgagcagcaggccgacaacaugaucaccgagcugcugcagaaggaguacauggacagacagggcaagaccccccugggccugguggaccuguucguguucagcaccagcuucuaccugaucagcaucuuccugcaccuggugaagauccccacccacagacacgugaucggcaagcccugccccaagccccacagacugaaccacaugggcaucugcagcugcggccuguacaagcaccccggcgugcccgugaaguggaagagaugaggacuaguaauaaggaaacuguaugaaugucugugggcaggaagugaagagauccuucuguaaagguuuuuggaauuaugucugcugaauaauaaacuuuuuugaaauaauaaaucugguagaaaaaugagaucucaaaggcucuuuucagagccaccaaaaaaaaaaaaaaaaaaaaaaaaaaaaaaaaaaaaaaaaaaaaaaaaaaaaaaaaaaaaaaaaaaaaaaaaaaaaaaaaaaaaaaaaaaaaaaaaaaaaa

SEQ ID NO: 41050 - RNA, 1809 nt, Artificial Sequence
  mRNA product Design b-4 (hSL-A100) comprising derived and/or modified sequence from LASV(Nig08-A19;Clade III)__ADU56618__GPCmut12 (opt4)
aggagagucccgcagucggcguccagcggcucugcuuguucgugugugugucguugcaggccuuauucaagcuuaccaugggccagaucgugaccuucuuccaggaggugccccacgugaucgaggaggugaugaacaucgugcugaucgcccugagcauccuggccauccugaagggccuguacaacaucgccaccugcggccugaucggccuggugaccuuccugcugcugagcggcagaagcugcagcaugaccuacaagggcguguacgagcugcagacccuggagcugaacaugaacacccugaacaugugcaugccccugagcugcaccaagaacaacagccaccacuacaucauggugggcaacgagaccggccuggagcugacccugaccaacaccagccugcugcaccacaaguucugcaaccugagcgacgcccacaagaagaaccuguacgaccacacccugaugagcaucaucagcaccuuccaccugagcauccccaacuucaaccaguacgaggccaugagcugcgacuucaacggcggcaagaucaccgugcaguacaaccugagccacagcuacgccaucgacgccgccaaccacugcggcaccguggccaacggcgugcugcagaccuucaugagaauggccuggggcggcagcuacaucgcccuggacagcggcagaggcaagugggacugcaucaugaccagcuaccaguaccugaucauccagaacaccaccugggaggaccacugccaguucagcagacccagccccaucggcuaccugggccugcugagccagagaaccagagacaucuacaucagcagaagacugcugggcaccuucaccuggacccugagcgacagcgagggcaacgagacccccggcggcuacugccugaccagauggaugcugaucgaggccgagcugaagugcuucggcaacaccgccguggccaagugcaacgagaagcacgacgaggaguucugcgacaugcugagacuguucgacuucugcaagcaggccaucagaagacugaaggccgaggcccagaugagcauccagcugaucaacaaggccgugaacgcccugaucaacgaccagcugaucaugaagaaccaccugagagacaucaugggcauccccuacugcaacuacagcaaguacugcuaccugaaccacaccagcaccggcagaaccagccugcccagaugcugccuggugagcaacggcagcuaccugaacgagacccacuucagcgacgacaucgagcagcaggccgacaacaugaucaccgagaugcugcagaaggaguaccuggacagacagggcaagaccccccugggccugguggaccuguucguguucagcaccagcuucuaccugaucagcaucuuccugcaccuggugaagauccccacccacagacacaucgugggcaagcccugccccaagccccacagacugaaccacaugggcaucugcagcugcggccuguacaagcagcccggcgugcccgugagauggaagagaugaggacuaguaauaaggaaacuguaugaaugucugugggcaggaagugaagagauccuucuguaaagguuuuuggaauuaugucugcugaauaauaaacuuuuuugaaauaauaaaucugguagaaaaaugagaucucaaaggcucuuuucagagccaccaaaaaaaaaaaaaaaaaaaaaaaaaaaaaaaaaaaaaaaaaaaaaaaaaaaaaaaaaaaaaaaaaaaaaaaaaaaaaaaaaaaaaaaaaaaaaaaaaaaaa

SEQ ID NO: 41051 - RNA, 1812 nt, Artificial Sequence
  mRNA product Design b-4 (hSL-A100) comprising derived and/or modified sequence from LASV(G1180-SLE-2010;Clade IV)__AIT17168__GPCmut12 (opt4)
aggagagucccgcagucggcguccagcggcucugcuuguucgugugugugucguugcaggccuuauucaagcuuaccaugggccagaucgugaccuucuuccaggaggugccccacgugaucgaggaggugaugaacaucgugcugaucgcccugagcauccuggccgugcugaagggccuguacaacuucgccaccugcggccuggugggccugcugaccuuccugcugcugugcggcagaagcugcaccgccagcagauacaagggcguguacgagcugcagacccuggagcugaacauggagacccugaacaugugcaugccccugagcugcaccaagaacaacagccaccacuacaucauggugggcaacgagaccggccuggagcugacccugaccaacaccagcaucaucaaccacaaguucugcaaccugagcgacgcccacaagaagaaccuguacgaccacgcccugaugagcaucaucagcaccuuccaccugagcauccccaacuucaaccaguacgaggccaugagcugcgacuucaacggcggcaagaucagcgugcaguacaaccugagccacagcuacgccggcgacgccgccaaccacugcggcaccguggccaacggcgugcugcagaccuucaugagaauggccuggggcggcagcuacaucgcccuggacagcggccacggcagcugggacugcaucaugaccagcuaccaguaccugaucauccagaacaccaccugggaggaccacugccaguucagcagacccagccccaucggcuaccugggccugcugagccagagaaccagagacaucuacaucagcagaagacugcugggcaccuucaccuggacccugagcgacagcgagggcaaggacacccccggcggcuacugccugaccagauggaugcugaucgaggccgagcugaagugcuucggcaacaccgccguggccaagugcaacgagaagcacgacgaggaguucugcgacaugcugagacuguucgacuucugcaagcaggccauccagagacugaaggccgaggcccagaugagcauccagcugaucaacaaggccgugaacgcccugaucaacgaccagcugaucaugaagaaccaccugagagacaucaugggcauccccuacugcaacuacagcaaguacugcuaccugaaccacaccaccaccggcaagaccagccugcccaagugcugccuggugagcaacggcagcuaccugaacgagacccacuucagcgacgacaucgagcagcaggccgacaacaugaucaccgagaugcugcagaaggaguacauggagagacagggcaagaccccccugggccugguggaccuguucguguucagcaccagcuucuaccugaucagcaucuuccugcaccuggugaagauccccacccacagacacaucgugggcaagagcugccccaagccccacagacugaaccacaugggcaucugcagcugcggccuguacaagcagcccggcgugcccgugaaguggaagagaugaggacuaguaauaaggaaacuguaugaaugucugugggcaggaagugaagagauccuucuguaaagguuuuuggaauuaugucugcugaauaauaaacuuuuuugaaauaauaaaucugguagaaaaaugagaucucaaaggcucuuuucagagccaccaaaaaaaaaaaaaaaaaaaaaaaaaaaaaaaaaaaaaaaaaaaaaaaaaaaaaaaaaaaaaaaaaaaaaaaaaaaaaaaaaaaaaaaaaaaaaaaaaaaaa

SEQ ID NO: 41052 - RNA, 1812 nt, Artificial Sequence
  mRNA product Design b-4 (hSL-A100) comprising derived and/or modified sequence from LASV(G1442-SLE-2011;Clade IV)__AIT17180__GPCmut12 (opt4)
aggagagucccgcagucggcguccagcggcucugcuuguucgugugugugucguugcaggccuuauucaagcuuaccaugggccagaucgugaccuucuuccaggaggugccccacgugaucgaggaggugaugaacaucgugcugaucgcccugagcauccuggccgugcugaagggccuguacaacguggccaccugcggccugaucggccuggugaccuuccugcugcugugcggcagaagcugcaccaccacccuguacaagggcguguacgagcugcagacccuggagcugaacauggagacccugaacaugugcaugccccugagcugcaccaagaacaacagccaccacuacaucagagugggcaacgagaccggccuggagcugacccugaccaacaccagcaucaucaaccacaaguucugcaaccugagcgacgcccacaagaagaaccuguacgaccacgcccugaugagcaucaucagcaccuuccaccugagcauccccaacuucaaccaguacgaggccaugagcugcgacuucaacggcggcaagaucagcgugcaguacaaccugagccacagcuacgccggcgacgccgccaaccacugcggcaccguggccaacggcgugcugcagaccuucaugagaauggccuggggcggcagcuacaucgcccuggacagcggcagaggcaacugggacugcaucaugaccagcuaccaguaccugaucauccagaacaccaccugggacgaccacugccaguucagcagacccagccccaucggcuaccugggccugcugagccagagaaccagagacguguacaucagcagaagacugcugggcaccuucaccuggacccugagcgacagcgagggcaaggacacccccggcggcuacugccugaccagauggaugcugaucgaggccgagcugaagugcuucggcaacaccgccguggccaagugcaacgagaagcacgacgaggaguucugcgacaugcugagacuguucgacuucugcaagcaggccauccagagacugaaggccgaggcccagaugagcauccagcugaucaacaaggccgugaacgcccugaucaacgaccagcugaucaugaagaaccaccugagagacaucaugggcauccccuacugcaacuacagcaaguacugcuaccugaacaacaccgccaccggcaagaccagccugcccaagugcugccugaucagcaacggcagcuaccugaacgagacccacuucagcgacgacaucgagcaggaggccgacaacaugaucaccgagaugcugcagaaggaguacauggagagacagggcaagaccccccugggccugguggaccuguucguguucagcaccagcuucuaccugaucagcaucuuccugcaccuggugaagauccccacccacagacacaucgugggcaagagcugccccaagccccacagacugaaccacaugggcaucugcagcugcggccuguacaagcagcccggcgugcccgugagauggaagagaugaggacuaguaauaaggaaacuguaugaaugucugugggcaggaagugaagagauccuucuguaaagguuuuuggaauuaugucugcugaauaauaaacuuuuuugaaauaauaaaucugguagaaaaaugagaucucaaaggcucuuuucagagccaccaaaaaaaaaaaaaaaaaaaaaaaaaaaaaaaaaaaaaaaaaaaaaaaaaaaaaaaaaaaaaaaaaaaaaaaaaaaaaaaaaaaaaaaaaaaaaaaaaaaaa

SEQ ID NO: 41053 - RNA, 1812 nt, Artificial Sequence
  mRNA product Design b-4 (hSL-A100) comprising derived and/or modified sequence from LASV(G3010-SLE-2013;Clade IV)__AIT17344__GPCmut12 (opt4)
aggagagucccgcagucggcguccagcggcucugcuuguucgugugugugucguugcaggccuuauucaagcuuaccaugggccagaucgugaccuucuuccaggaggugccccacgugaucgaggaggugaugaacaucgugcugaucgcccugagcauccuggccgugcugaagggccuguacaacuucgccaccugcggccuggugggccuggugaccuuccugcugcugugcggcagaagcugcaccaccagccuguacaagggcguguacgagcugcagacccuggagcugaacauggagacccugaacaugugcaugccccugagcugcaccaagaacaacagccaccacuacaucauggugggcaacgagaccggccuggagcugacccugaccaacaccagcaucaucaaccacaaguucugcaaccugagcgacgcccacaagaagaaccuguacaaccacgcccugaugagcaucaucagcaccuuccaccugagcauccccaacuucaaccaguacgaggccaugagcugcgacuucaacggcggcaagaucagcgugcaguacaaccugagccacagcuacgccggcgacgccgccagccacugcggcaccguggccaacggcgugcugcagaccuucaugagaauggccuggggcggcagcuacaucgcccuggacagcggcuacggcaagugggacugcaucaugaccagcuaccaguaccugaucauccagaacaccaccugggaggaccacugccaguucagcagacccagccccaucggcuaccugggccugcugagccagagaaccagagacaucuacaucagcagaagacugcugggcaccuucaccuggacccugagcgacagcgagggcaaggacacccccggcggcuacugccugaccagauggaugcugaucgaggccgagcugaagugcuucggcaacaccgccguggccaagugcaacgagaagcacgacgaggaguucugcgacaugcugagacuguucgacuucugcaagcaggccauccagagacugaagaccgaggcccagaugagcauccagcugaucaacaaggccgugaacgcccugaucaacgaccagcugaucaugaagaaccaccugagagacaucaugggcauccccuacugcaacuacagcaaguacugcuaccugaaccacaccaccaccggcaagaccagccugcccaagugcugccuggugagcaacggcagcuaccugaacgagacccacuucagcgacgacaucgagcagcaggccgacaacaugaucaccgagaugcugcagaaggaguacauggagagacagggcaagaccccccugggccugguggaccuguucguguucagcaccagcuucuaccugaucagcaucuuccugcaccuggugaagauccccacccacagacacaucgugggcaagagcugccccaagccccacagacugaaccacaugggcaucugcagcugcggccuguacaagcagcccggcgugcccgugagauggaagagaugaggacuaguaauaaggaaacuguaugaaugucugugggcaggaagugaagagauccuucuguaaagguuuuuggaauuaugucugcugaauaauaaacuuuuuugaaauaauaaaucugguagaaaaaugagaucucaaaggcucuuuucagagccaccaaaaaaaaaaaaaaaaaaaaaaaaaaaaaaaaaaaaaaaaaaaaaaaaaaaaaaaaaaaaaaaaaaaaaaaaaaaaaaaaaaaaaaaaaaaaaaaaaaaaa

SEQ ID NO: 41054 - RNA, 1812 nt, Artificial Sequence
  mRNA product Design b-4 (hSL-A100) comprising derived and/or modified sequence from LASV(G502-SLE-2009;Clade IV)__AIT17126__GPCmut12 (opt4)
aggagagucccgcagucggcguccagcggcucugcuuguucgugugugugucguugcaggccuuauucaagcuuaccaugggccagaucgugaccuucuuccaggaggugccccacgugaucgaggaggugaugaacaucgugcugaucgcccugagcauccuggccgugcugaagggccuguacaacuucgccaccugcggccuggugggccugcugaccuuccugcugcugugcggcagaagcugcaccaccggccuguacaagggcguguacgagcugcagacccuggagcugaacauggagacccugaacaugugcaugccccugagcugcaccaagaacaacagccaccacuacaucauggugggcaacgagaccggccuggagcugacccugaccaacaccagcaucaucaaccacaaguucugcaaccugagcgacgcccacaagaagaaccuguacgaccacgcccugaugagcaucaucagcaccuuccaccugagcauccccaacuucaaccaguacgaggccaugagcugcgacuucaacggcggcaagaucagcgugcaguacaaccugagccacagcuacgccggcgacgccgccgaccacugcggcaccguggccaacggcgugcugcagaccuucaugagaauggccuggggcggcagcuacaucgcccuggacagcggcagaggcagaugggacugcaucaugaccagcuaccaguaccugaucauccagaacaccaccugggaggaccacugccaguucagcagacccagccccaucggcuaccugggccugcugagccagagaaccagagacaucuacaucagcagaagacugcugggcaccuucaccuggacccugagcgacagcgagggcaaggacacccccggcggcuacugccugaccagauggaugcugaucgaggccgagcugaagugcuucggcaacaccgccguggccaagugcaacgagaagcacgacgaggaguucugcgacaugcugagacuguucgacuucugcaagcaggccauccagagacugaaggccgaggcccagaugagcauccagcugaucaacaaggccgugaacgcccugaucaacgaccagcuggugaugaagaaccaccugagagacaucaugggcauccccuacugcaacuacagcagauacugcuaccugaaccacaccaccaccggcagaaccagccugcccaagugcugccuggugagcaacggcagcuaccugaacgagacccacuucagcgacgacaucgagcagcaggccgacaacaugaucaccgagaugcugcagaaggaguacauggagagacagggcaagaccccccugggccugguggaccuguucguguucagcaccagcuucuaccugaucagcaucuuccugcaccuggugaagauccccacccacagacacaucgugggcaagagcugccccaagccccacagacugaaccacaugggcaucugcagcugcggccuguacaagcagcccggcgugcccgugaaguggaagagaugaggacuaguaauaaggaaacuguaugaaugucugugggcaggaagugaagagauccuucuguaaagguuuuuggaauuaugucugcugaauaauaaacuuuuuugaaauaauaaaucugguagaaaaaugagaucucaaaggcucuuuucagagccaccaaaaaaaaaaaaaaaaaaaaaaaaaaaaaaaaaaaaaaaaaaaaaaaaaaaaaaaaaaaaaaaaaaaaaaaaaaaaaaaaaaaaaaaaaaaaaaaaaaaaa

SEQ ID NO: 41055 - RNA, 1812 nt, Artificial Sequence
  mRNA product Design b-4 (hSL-A100) comprising derived and/or modified sequence from LASV(G733-SLE-2010;Clade IV)__AIT17154__GPCmut12 (opt4)
aggagagucccgcagucggcguccagcggcucugcuuguucgugugugugucguugcaggccuuauucaagcuuaccaugggccagaucgugaccuucuuccaggaggugccccacgugaucgaggaggugaugaacaucgugcugaucgcccugagcauccuggccgugcugaagggccuguacaacuucgccaccugcggcaucgugggccuggugagcuuccugcugcugugcggcagaagcugcaccaccagccuguacaagggcguguacgagcugcagacccuggagcugaacauggagacccugaacaugugcaugccccugagcugcaccaagaacaacagccaccacuacaucauggugggcaacgagaccggccuggagcugacccugaccaacaccagcaucaucaaccacaaguucugcaaccugagcgacgcccacaagaagaaccuguacgaccacgcccugaugagcaucaucagcaccuuccaccugagcauccccaacuucaaccaguacgaggccaugagcugcgacuucaacggcggcaagaucagcgugcaguacaaccugagccacagcuacgccggcgacgccgccaaccacugcggcaccaucgccaacggcgugcugcagaccuucaugagaauggccuggggcggcagcuacaucgcccuggacagcggcagagacagaugggacugcaucaugaccagcuaccaguaccugaucauccagaacaccaccugggaggaccacugccaguucagcagacccagccccaucggcuaccugggccugcugagccagagaaccagagacaucuacaucagcagaagacugcugggcaccuucaccuggacccugagcgacagcgagggcaaggacacccccggcggcuacugccugaccagauggaugcugaucgaggccgagcugaagugcuucggcaacaccgccguggccaagugcaacgagaagcacgacgaggaguucugcgacaugcugagacuguucgacuucugcaagcaggccauccagagacugaaggccgaggcccagaugagcauccagcugaucaacaaggccgugaacgcccugaucaacgaccagcugaucaugaagaaccaccugagagacaucaugggcauccccuacugcaacuacagcaaguacugcuaccugaaccacaccaccaccggcaagaccagccugcccaagugcugccuggugagcaacggcagcuaccugaacgagacccacuucagcgacgacaucgagcagcaggccgacaacaugaucaccgagaugcugcagaaggaguacauggagagacagggcaagaccccccugggccugguggaccuguucguguucagcaccagcuucuaccugaucagcaucuuccugcaccuggugaagauccccacccacagacacguggugggcaagagcugccccaagccccacagacugaaccacaugggcaucugcagcugcggccuguacggccagcccggcgugcccgugaaguggaagagaugaggacuaguaauaaggaaacuguaugaaugucugugggcaggaagugaagagauccuucuguaaagguuuuuggaauuaugucugcugaauaauaaacuuuuuugaaauaauaaaucugguagaaaaaugagaucucaaaggcucuuuucagagccaccaaaaaaaaaaaaaaaaaaaaaaaaaaaaaaaaaaaaaaaaaaaaaaaaaaaaaaaaaaaaaaaaaaaaaaaaaaaaaaaaaaaaaaaaaaaaaaaaaaaaa

SEQ ID NO: 41056 - RNA, 1812 nt, Artificial Sequence
  mRNA product Design b-4 (hSL-A100) comprising derived and/or modified sequence from MOPV/LASV reassortant(IGS-1;Clade IV)__AFY05576__GPCmut12 (opt4)
aggagagucccgcagucggcguccagcggcucugcuuguucgugugugugucguugcaggccuuauucaagcuuaccaugggccagaucgugaccuucuuccaggaggugccccacgugaucgaggaggugaugaacaucgugcugaucgcccugagcgugcuggccgugcugaagggccuguacaacuucgccaccugcggccuggugggccuggugaccuuccugcugcugugcggcagaagcugcaccaccagccuguacaagggcguguacgagcugcagacccuggagcugaacauggagacccugaacaugugcaugccccugagcugcaccaagaacaacagccaccacuacaucauggugggcaacgagaccggccuggagcugacccugaccaacaccagcaucaucaaccacaaguucugcaaccugagcgacgcccacaagaagaaccuguacgaccacgcccugaugagcaucaucagcaccuuccaccugagcauccccaacuucaaccaguacgaggccaugagcugcgacuucaacggcggcaagaucagcgugcaguacaaccugagccacagcuacgccggcgacgccgccaaccacugcggcaccguggccaacggcgugcugcagaccuucaugagaauggccuggggcggcagcuacaucgcccuggacagcggcagaggcaacugggacugcaucaugaccagcuaccaguaccugaucauccagaacaccaccugggaggaccacugccaguucagcagacccagccccaucggcuaccugggccugcugagccagagaaccagagacaucuacaucagcagaagacugcugggcaccuucaccuggacccugagcgacagcgagggcgaggacacccccggcggcuacugccugaccagauggaugcugaucgaggccgagcugaagugcuucggcaacaccgccguggccaagugcaacgagaagcacgacgaggaguucugcgacaugcugagacuguucgacuucugcaagcaggccauccagagacugaaggccgaggcccagaugagcauccagcugaucaacaaggccgugaacgcccugaucaacgaccagcugaucaugaagaaccaccugagagacaucaugggcauccccuacugcaacuacagcaaguacugcuaccugaaccacaccaccaccggcagaaccagccugcccaagugcugccuggugagcaacggcagcuaccugaacgagacccacuucagcgacgacaucgagcagcaggccgacaacaugaucaccgagaugcugcagaaggaguacauggagagacagggcaagaccccccugggccugguggaccuguucguguucagcaccagcuucuaccugaucagcaucuuccugcaccuggugaagauccccacccacagacacaucgugggcaagagcugccccaagccccacagacugaaccacaugggcaucugcagcugcggccuguacaagcagcccggcgugcccgugaaguggaagagaugaggacuaguaauaaggaaacuguaugaaugucugugggcaggaagugaagagauccuucuguaaagguuuuuggaauuaugucugcugaauaauaaacuuuuuugaaauaauaaaucugguagaaaaaugagaucucaaaggcucuuuucagagccaccaaaaaaaaaaaaaaaaaaaaaaaaaaaaaaaaaaaaaaaaaaaaaaaaaaaaaaaaaaaaaaaaaaaaaaaaaaaaaaaaaaaaaaaaaaaaaaaaaaaaa

SEQ ID NO: 41057 - RNA, 1812 nt, Artificial Sequence
  mRNA product Design b-4 (hSL-A100) comprising derived and/or modified sequence from LASV(LM765-SLE-2012;Clade IV)__AIT17814__GPCmut12 (opt4)
aggagagucccgcagucggcguccagcggcucugcuuguucgugugugugucguugcaggccuuauucaagcuuaccaugggccagaucgugaccuucuuccaggaggugccccacgugaucgaggaggugaugaacaucgugcugaucgcccugagcauccuggccgugcugaagggccuguacaacuucgccaccugcggccuggugggccuggugaccuuccugcugcugugcggcagaagcugcaccaccagccuguacaagggcguguacgagcugcagacccuggagcugaacauggagacccugaacaugugcaugccccugagcugcaccaagaacaacagccaccacuacaucauggugggcaacgagaccggccuggagcugacccugaccaacaccagcaucaucgaccacaaguucugcaaccugagcgacgcccacagaaagaaccuguacgaccacgcccugaugagcaucaucagcaccuuccaccugagcauccccaacuucaaccaguacgaggccaugagcugcgacuucaacggcggcaagaucagcgugcaguacaaccugagccacagcuacgccaaggacgccgccgaccacugcggcaccguggccaacggcgugcugcagaccuucaugagaauggccuggggcggcagcuacaucgcccuggacagcggcagaggcagaugggacugcaucaugaccagcuaccaguaccugaucauccagaacaccaccugggaggaccacugccaguucagcagacccagccccaucggcuaccugggccugcugagccagagaaccagagacaucuacaucagcagaagacugcugggcaccuucaccuggacccugagcgacagcgagggcaaggacacccccggcggcuacugccugaccagauggaugcugaucgaggccgagcugaagugcuucggcaacaccgccguggccaagugcaacgagaagcacgacgaggaguucugcgacaugcugagacuguucgacuucugcaagcaggccauccagagacugaaggccgaggcccagaugagcauccagcugaucaacaaggccgugaacgcccugaucaacgaccagcugaucaugaagaaccaccugagagacaucaugggcauccccuacugcaacuacagcaaguacugcuaccugaaccacaccaccaccggcaagaccagccugcccaagugcugccuggugagcaacggcagcuaccugaacgagacccacuucagcgacgacaucgagcagcaggccgacaacaugaucaccgagaugcugcagaaggaguacauggagagacagggcaagaccccccugggccugguggaccuguucguguucagcaccagcuucuaccugaucagcaucuuccugcaccuggugaagauccccacccacagacacaucgugggcaagcccugccccaagccccacagacugaaccacaugggcaucugcagcugcggccuguacaagcagcccggcgugcccgugaaguggaagagaugaggacuaguaauaaggaaacuguaugaaugucugugggcaggaagugaagagauccuucuguaaagguuuuuggaauuaugucugcugaauaauaaacuuuuuugaaauaauaaaucugguagaaaaaugagaucucaaaggcucuuuucagagccaccaaaaaaaaaaaaaaaaaaaaaaaaaaaaaaaaaaaaaaaaaaaaaaaaaaaaaaaaaaaaaaaaaaaaaaaaaaaaaaaaaaaaaaaaaaaaaaaaaaaaa

SEQ ID NO: 41058 - RNA, 1812 nt, Artificial Sequence
  mRNA product Design b-4 (hSL-A100) comprising derived and/or modified sequence from LASV(LM776-SLE-2012;Clade IV)__AIT17824__GPCmut12 (opt4)
aggagagucccgcagucggcguccagcggcucugcuuguucgugugugugucguugcaggccuuauucaagcuuaccaugggccagaucgugaccuucuuccaggaggugccccacgugaucgaggaggugaugaacaucgugcugaucgcccugagcauccuggccgugcugaagggccuguacaacuucgccaccugcggccuggugggccuggugaccuuccugcugcugugcggcagaagcugcaccaccagcguguacaagggcguguacgagcugcagacccuggagcugaacauggagacccugaacaugugcaugccccugagcugcaccaagaacaacagccaccacuacaucauggugggcaacgagaccggccuggagcugacccugaccaacaccagcaucaucaaccacaaguucugcaaccugagcgacgcccacaagaagaaccuguacgaccacgcccugaugagcaucaucagcaccuuccaccugagcauccccaacuucaaccaguacgaggccaugagcugcgacuucaacggcggcaagaucagcgugcaguacaaccugagccacagcuacgccggcgacgccgccaaccacugcggcaccguggccaacggcgugcugcagaccuucaugagaauggccuggggcggcagcuacaucgcccuggacagcggccacggcaagugggacugcaucaugaccagcuaccaguaccugaucauccagaacaccaccugggaggaccacugccaguucagcagacccagccccaucggcuaccugggccugcugagccagagaaccagagacaucuacaucagcagaagacugcugggcaccuucaccuggacccugagcgacagcgagggcaaggacacccccggcggcuacugccugaccagauggaugcugaucgaggccgagcugaagugcuucggcaacaccgccguggccaagugcaacgagaagcacgacgaggaguucugcgacaugcugagacuguucgacuucugcaagcaggccauccagagacugaaggccgaggcccagaugagcauccagcugaucaacaaggccgugaacgcccugaucaacgaccagcugaucaugaagaaccaccugagagacaucaugggcauccccuacugcaacuacagcaaguacugcuaccugaaccacaccaccaccggcaagaccagccugcccaagugcugccuggugagcaacggcagcuaccugaacgagacccacuucagcgacgacaucgagcagcaggccgacaacaugaucaccgagaugcugcagaaggaguacauggagagacagggcaagaccccccugggccugguggaccuguucguguucagcaccagcuucuaccugaucagcaucuuccugcaccuggugaagauccccacccacagacacaucgugggcaagagcugccccaagccccacagacugaaccacaugggcaucugcagcugcggccuguacaagcagcccggcgugcccgugagauggaagagaugaggacuaguaauaaggaaacuguaugaaugucugugggcaggaagugaagagauccuucuguaaagguuuuuggaauuaugucugcugaauaauaaacuuuuuugaaauaauaaaucugguagaaaaaugagaucucaaaggcucuuuucagagccaccaaaaaaaaaaaaaaaaaaaaaaaaaaaaaaaaaaaaaaaaaaaaaaaaaaaaaaaaaaaaaaaaaaaaaaaaaaaaaaaaaaaaaaaaaaaaaaaaaaaaa

SEQ ID NO: 41059 - RNA, 1812 nt, Artificial Sequence
  mRNA product Design b-4 (hSL-A100) comprising derived and/or modified sequence from LASV(Mad39;Clade IV)__ANH09722__GPCmut12 (opt4)
aggagagucccgcagucggcguccagcggcucugcuuguucgugugugugucguugcaggccuuauucaagcuuaccaugggccagaucgugaccuucuuccaggaggugccccacgugaucgaggaggugaugaacaucgugcugaucgcccugagcauccuggccgugcugaagggccuguacaacguggccaccugcggccugaucggccuggugaccuuccugcugcugugcggcagaagcugcaccaccacccuguacaagggcguguacgagcugcaggcccuggagcugaacauggagacccugaacaugugcaugccccugagcugcaccaagaacaacagccaccacuacaucagagugggcaacgagaccggccuggagcugacccugaccaacaccagccugaucaaccacaaguucugcaaccugagcgacgcccacaagaagaaccuguacgaccacgcccugaugagcaucaucagcaccuuccaccugagcauccccaacuucaaccaguacgaggccaugagcugcgacuucaacgacggcaagaucagcgugcaguacaaccugagccacaccuacgccggcgacaccgccaaccacugcggcaccguggccaacggcgugcugcagaccuucaugagaauggccuggggcggcagcuacaucgcccuggacagcggcagaggcggcugggacugcaucaugaccagcuaccaguaccugaucauccagaacaccaccugggaggaccacugccaguucagcagacccagccccaucggcuaccugggccugcugagccagagaaccagagacaucuacaucagcagaagacugcugggcaccuucaccuggacccugagcgacagcgagggcaaggacacccccggcggcuacugccugaccagauggaugcugaucgaggccgagcugaagugcuucggcaacaccgccguggccaagugcaacgagaagcacgacgaggaguucugcgacaugcugagacuguucgacuucugcaagcaggccauccagagacugaaggccgaggcccagaugagcauccagcugaucaacaaggccgugaacgcccugaucaacgaccagcugaucaugaagaaccaccugagagacaucaugggcauccccuacugcaacuacagcaaguacugcuaccugaaccacaccgugaccggcaagaccagccugcccaagugcugccuggugagcaacggcagcuaccugaacgagacccacuucagcgacgacaucgagcagcaggccgacaacaugaucaccgagaugcugcagaaggaguacauggagagacagggcaagaccccccugggccugguggaccuguucguguucagcaccagcuucuaccugaucagcaucuuccugcaccuggugaagauccccacccacagacacguggugggcaagcccugccccaagccccacagacugaaccacaugggcaucugcagcugcggcuucuacaagcagcccggcgugcccgugagauggaagagaugaggacuaguaauaaggaaacuguaugaaugucugugggcaggaagugaagagauccuucuguaaagguuuuuggaauuaugucugcugaauaauaaacuuuuuugaaauaauaaaucugguagaaaaaugagaucucaaaggcucuuuucagagccaccaaaaaaaaaaaaaaaaaaaaaaaaaaaaaaaaaaaaaaaaaaaaaaaaaaaaaaaaaaaaaaaaaaaaaaaaaaaaaaaaaaaaaaaaaaaaaaaaaaaaa

SEQ ID NO: 41060 - RNA, 1812 nt, Artificial Sequence
  mRNA product Design b-4 (hSL-A100) comprising derived and/or modified sequence from LASV(Z0947-SLE-2011;Clade IV)__AIT17840__GPCmut12 (opt4)
aggagagucccgcagucggcguccagcggcucugcuuguucgugugugugucguugcaggccuuauucaagcuuaccaugggccagaucgugaccuucuuccaggaggugccccacgugaucgaggaggugaugaacaucgugcugaucgcccugagcauccuggccgugcugaagggccuguacaacuucgccaccugcggccuggugggccuggugaccuuccugcugcugugcggcagaagcugcaccaucagccuguacaagggcguguacgagcugcagacccuggagcugaacauggagacccugaacaugugcaugccccugagcugcaccaagaacaacagccaccacuacaucauggugggcaacgagaccggccuggagcugacccugaccaacaccagcaucaucaaccacaaguucugcaaccugagcgacgcccacaagaagaaccuguacgaccacgcccugaugagcaucaucagcaccuuccaccugagcauccccaacuucaaccaguacgaggccaugagcugcgacuucaacggcggcaagaucagcgugcaguacaaccugagccacagcuacgccggcgacgccgccaaccacugcggcaccguggccaacggcgugcugcagaccuucaugagaauggccuggggcggcagcuacaucgcccuggacagcggcagagacagaugggacugcaucaugaccagcuaccaguaccugaucauccagaacaccaccugggaggaccacugccaguucagcagacccagccccaucggcuaccugggccugcugagccagagaaccagagacaucuacaucagcagaagacugcugggcaccuucaccuggacccugagcgacagcgagggcaaggacacccccggcggcuacugccugaccagauggaugcugaucgaggccgagcugaagugcuucggcaacaccgccguggccaagugcaacgagaagcacgacgaggaguucugcgacaugcugagacuguucgacuucugcaagcaggccauccagagacugaaggccgaggcccagaugagcauccagcugaucaacaaggccgugaacgcccugaucaacgaccagcugaucaugaagaaccaccugagagacaucaugggcauccccuacugcaacuacagcaaguacugcuaccugaaccacaccaccaccggcaagaccagccugcccaagugcugccuggugagcaacggcagcuaccugaacgagacccacuucagcgacgacaucgagcagcaggccgacaacaugaucaccgagaugcugcagaaggaguacauggagagacagggcaagaccccccugggccugguggaccuguucguguucagcaccagcuucuaccugaucagcaucuuccugcaccuggugaagauccccacccacagacacaucgugggcaagcccugccccaagccccacagacugaaccacaugggcaucugcagcugcggccuguacaagcagcccggcgugcccgugaaguggaagagaugaggacuaguaauaaggaaacuguaugaaugucugugggcaggaagugaagagauccuucuguaaagguuuuuggaauuaugucugcugaauaauaaacuuuuuugaaauaauaaaucugguagaaaaaugagaucucaaaggcucuuuucagagccaccaaaaaaaaaaaaaaaaaaaaaaaaaaaaaaaaaaaaaaaaaaaaaaaaaaaaaaaaaaaaaaaaaaaaaaaaaaaaaaaaaaaaaaaaaaaaaaaaaaaaa

SEQ ID NO: 41061 - RNA, 1812 nt, Artificial Sequence
  mRNA product Design b-4 (hSL-A100) comprising derived and/or modified sequence from LASV(Josiah;Clade IV)__NP_694870__GPCmut12 (opt5)
aggagagucccgcagucggcguccagcggcucugcuuguucgugugugugucguugcaggccuuauucaagcuuaccaugggccagaucgugaccuucuuucaagaggucccccacguuauugaagaggugaugaacaucgugcugauugcccucagcguccuggcugugcuuaaggggcuguacaauuucgccacaugcggacucguuggccuggugacguuucuucugcucugugggagauccugcaccacaucucuguauaaaggagucuacgaacugcagacccucgagcugaacauggaaacacuuaauauguguaugccucugagcugcaccaagaacaauucccaucacuauaucauggugggcaacgagacagggcucgagcugacccuuacgaauaccucuauuaucaaccauaaauucuguaaucugagcgacgcgcacaagaaaaaccucuacgaucaugcucugauguccaucauuucuacauuucaccugagcaucccgaauuucaaccaguaugaagccauguccugcgacuuuaauggaggcaagauuagcguucaguacaaccucucucacuccuaugccggcgaugcugccaaucauugugggaccguggcuaacggaguccugcaaacauucaugcggauggccuggggcgggagcuacaucgcgcuugacucuggacgcggcaacugggauugcauuaugaccuccuaccaguaucugaucauucagaauacgacaugggaggaccacugucaguuuagcagacccucuccuaucggguaccucggacugcuuucccaacggacccgcgauaucuauauuagcagacggcugcucggcacauucaccuggacccuguccgacucugaaggcaaggauacacccgggggauacugccugacgcgcuggaugcucaucgaggccgagcugaaauguuuuggcaacaccgcuguggccaagugcaaugaaaaacaugacgaggaguucugcgauaugcuuagacuguuugacuucuguaagcaggcuauucagcggcucaaagccgaagcgcagaugagcauccaacugauuaacaaggccgugaaugcucuuaucaacgaucagcugaucaugaagaaucaccuccgcgacauuauggggaucccuuauugcaacuacuccaaauauuguuaccugaaucacacaaccacaggaagaaccagccugcccaagugcugucucgucucuaacggcuccuaccugaaugaaacgcauuucagcgacgauauugagcagcaagccgacaacaugaucacagagaugcuucagaaagaauauauggagcggcaggggaagaccccucugggacucguugaucuguuuguguucucuaccagcuuuuaccugauuuccaucuuccuucaccucgugaaaaucccgacacaucgccacauugucggcaagucuugccccaaaccucauagacugaaucacaugggcaucuguagcugcgggcuguauaagcagcccggagugccuguuaaguggaaacggugaggacuaguaauaaggaaacuguaugaaugucugugggcaggaagugaagagauccuucuguaaagguuuuuggaauuaugucugcugaauaauaaacuuuuuugaaauaauaaaucugguagaaaaaugagaucucaaaggcucuuuucagagccaccaaaaaaaaaaaaaaaaaaaaaaaaaaaaaaaaaaaaaaaaaaaaaaaaaaaaaaaaaaaaaaaaaaaaaaaaaaaaaaaaaaaaaaaaaaaaaaaaaaaaa

SEQ ID NO: 41062 - RNA, 1809 nt, Artificial Sequence
  mRNA product Design b-4 (hSL-A100) comprising derived and/or modified sequence from LASV(LP;Clade I)__AAF86701__GPCmut12 (opt5)
aggagagucccgcagucggcguccagcggcucugcuuguucgugugugugucguugcaggccuuauucaagcuuaccaugggccagaucauuaccuucuuucaagaggugccccacgucaucgaagagguuaugaacauugugcugaucgcccucagccugcuugcuauucugaaggggcucuacaauaucgccacaugcggaaucauuggccugguggcguuccuuuuucugugugggaaauccugcucucucacgcugaagggaggcuaugaacugcagacccucgagcugaacauggaaacacuuaauauguguaugccucugagcugcaccaaaaacuccucucaucacuacaucagagucgggaaugagacaggacucgagcugacccuuacaaacaccagcauuaucaaucauaaguucuguaaccuguccgacgcucacaaaaagaaucucuaugaucaugcccugaugucuauuaucagcacguuucaccuguccauuccgaacuucaaucaguacgaagccaugagcugcgacuuuaacggcggcaagaucucugugcaguauaaucucucccacagcuacgcuggggaugccgcugagcauuguggaaccguugccaacggcgugcugcaaacauucaugcggauggcguggggagggcgcuauaucgcccuugacucuggcaaagggaauugggauugcauuaugaccuccuaccaguaccugaucauucagaacacaaccugggaagaccacugucaguuuagcagacccucuccuaucggauaucucggccugcuuucccaacggacgcgcgauauuuacaucagcagacggcugcucggcacauucaccuggacacuguccgacucugaggggaacgagacccccggaggcuauugccugacccgcuggaugcucaucgaagcugagcugaaguguuuugggaauacagccgucgcuaaaugcaacgaaaagcaugaugaggaguucugcgacaugcuuagacuguuugauuucuguaaacaggccauucggcgccucaaggcggaagcccagaugagcauccagcugauuaauaaggcugugaacgcccuuaucaaugaccaacugauuaugaaaaaccaccucagagauaucaugggaaucccuuacugcaauuauuccaaguacuguuaucugaaccacacgagcucuggccggaccucccugcccaaaugcugucucauuagcaaugggucuuaccugaacgagacacaguucagcgacgacaucgaacagcaagcugauaauaugauuaccgagaugcuucagaaggaauacaucgagcgccagggaaaaacaccucugggccucguugacauuuuuaucuucuccaccucuuuuuaucugauuagcaucuuccugcaucuuaucaagauuccgacgcacagacauaucgugggcaaacccugcccuaagccccaccggcucaaccauaugggggucuguuccugcggacuguacaagcacccuggcgugcccacaaaauggaagcgcugaggacuaguaauaaggaaacuguaugaaugucugugggcaggaagugaagagauccuucuguaaagguuuuuggaauuaugucugcugaauaauaaacuuuuuugaaauaauaaaucugguagaaaaaugagaucucaaaggcucuuuucagagccaccaaaaaaaaaaaaaaaaaaaaaaaaaaaaaaaaaaaaaaaaaaaaaaaaaaaaaaaaaaaaaaaaaaaaaaaaaaaaaaaaaaaaaaaaaaaaaaaaaaaaa

SEQ ID NO: 41063 - RNA, 1809 nt, Artificial Sequence
  mRNA product Design b-4 (hSL-A100) comprising derived and/or modified sequence from LASV(803213;Clade II)__AAF86703__GPCmut12 (opt5)
aggagagucccgcagucggcguccagcggcucugcuuguucgugugugugucguugcaggccuuauucaagcuuaccaugggccagaucauuaccuucuuucaagaggugccccacgucaucgaagagguuaugaacauugugcugaucgcccucagccugcuugcuauucugaaggggaucuacaauguggccacaugcggacucuucggccugaucuccuuucuucugcucugugggagaucuugcagcgucacguauaaaggaguguacgaacugcagacccuggagcucaacauggcgaaucugaacauguguaugccucuuuccugcacaaagaauaacucucaucacuauauuaugguuggcaaugaaaccgggcuggagcucacacugaccaacacaagcaucauuaaucauaaauucuguaaccuuuccgacgcucacaagaaaaaucuguacgaucaugcccucaugucuaucauuagcaccuuucaccuguccaucccgaacuucaaucaguaugaggccaugagcugcgacuuuaacggaggcaagauuucugugcaguacaaucugucccacagcuucgcugucgaugccgcuaaccauuguggcacgaucgccaacggggugcuccaaaccuuuaugcggauggcguggggaggcucuuauaucgcccuggacuccgggaagggaaauugggauugcauuaugacaagcuaccaguaccuuaucauucagaacaccacaugggaagaccacugucaguucucucgccccuccccuaucggcuaucuggggcuccugagccaaagaacccgggauauuuacaucucccgcagacuucugggaacguuuacauggacccucucugacagcgagggcaaugaagcucccggcggguauugccugacacgguggaugcugaucgaggccgagcucaaauguuucggaaacaccgcuguugccaagugcaaugaaaaacaugaugaggaauuuugcgacaugcugcgccuuuucgauuucuguaagcaggcgauuaaaagacugaagaccgaggcccagauguccauccagcucauuaacaaggcugugaaugcccugaucaacgaccaacuuauuaugaaaaaucaucugcgggauaucaugggcaucccuuacugcaacuauagccgcuacuguuaucucaaucacacagucacggggaagaccucucugcccagaugcugucugguguccaacggaagcuaccucaaugaaacacacuuuucugacgacauugagcagcaggcugauaacaugaucaccgagaugcugcaaaaagaauacauggaccggcagggcaagacaccucuugggcugguggaucucuucgucuuuagcaccuccuucuaucugauuucuaucuuucugcaccuuguuaaaauuccgacgcaucgccacaucgugggaaagcccugcccuaaaccccauagacucaaucacaugggcauuuguagcugcggccuguacaagcacccuggggugcccgucaaguggaaacggugaggacuaguaauaaggaaacuguaugaaugucugugggcaggaagugaagagauccuucuguaaagguuuuuggaauuaugucugcugaauaauaaacuuuuuugaaauaauaaaucugguagaaaaaugagaucucaaaggcucuuuucagagccaccaaaaaaaaaaaaaaaaaaaaaaaaaaaaaaaaaaaaaaaaaaaaaaaaaaaaaaaaaaaaaaaaaaaaaaaaaaaaaaaaaaaaaaaaaaaaaaaaaaaaa

SEQ ID NO: 41064 - RNA, 1809 nt, Artificial Sequence
  mRNA product Design b-4 (hSL-A100) comprising derived and/or modified sequence from LASV(GA391;Clade III)__CAA36645__GPCmut12 (opt5)
aggagagucccgcagucggcguccagcggcucugcuuguucgugugugugucguugcaggccuuauucaagcuuaccaugggccagaucgugaccuucuuucaagaggucccccacguuauugaagaggugaugaacaucgugcugauugcccucagcauccuggcuauucuuaaggggcuguacaaugucgccacaugcggacucaucggccuggugacguuccuucugcucuccgggagaucuuguagccugaucuauaaaggaaccuacgaacugcagacacucgagcugaacauggaaacccuuaauaugugcaugccucuguccuguacaaagaacaauucucaucacuauauucggguuggcaacgagaccgggcucgagcugacacuuaccaauacgagcauccugaaccauaaauuuugcaaucucuccgacgcgcacaagcgcaaccuguacgaucauucucugaugagcauuaucuccaccuuccaccucagcauuccgaauuuuaaccaguaugaagcuaugucuugugacuucaauggaggcaaaaucacagugcaguacaaccugucccacagcuuugccgucgaugccgcuggccauugcgggacccuugccaauggagugcugcaaacauucaugagaauggcuuggggcgggucuuauauugcccucgacuccggacggggcaacugggauuguaucaugaccagcuaccaguaccugaucauucagaacacgacaugggacgaucacugccaguuuucucgccccuccccuaucggguaucuuggacugcucagccaaagaacccgggacauuuacaucucccgcagacugcugggcacauucaccuggacccucucugauagcgagggcaaugaaacacccgggggauauugucugacgcgguggaugcuuauugaggcggagcugaagugcuuuggcaacaccgccguugcuaaguguaaugaaaaacaugacgaggaguucugcgauaugcuccgccuguuugacuucugcaagcaggccaucagacggcuuaaaacagaagcucagauguccauccagcugauuaacaaggccgugaaugcgcucaucaacgaucaacugauuaugaaaaaucaucugcgcgacaucauggggauuccuuacuguaacuauagcagauacugcuaucucaaucacaccucuacaggaaagaccucccugccccgguguugccuuaucagcaacggcucuuaccugaaugaaacgaaguucagcgacgauaucgagcagcaggccgacaacaugauuacagagaugcuccaaaaagaauacaucgaucgccaggggaagaccccucugggacuggucgaccuuuuuguguucuccaccucuuuuuaucucauuagcaucuuccugcaccuggugaaaauuccgacacacagacauaucgucggcaagcccuguccuaaaccccaccggcucaaucauaugggcauuugcuccugugggcuguacaagcagccuggaguucccgugagauggaaacgcugaggacuaguaauaaggaaacuguaugaaugucugugggcaggaagugaagagauccuucuguaaagguuuuuggaauuaugucugcugaauaauaaacuuuuuugaaauaauaaaucugguagaaaaaugagaucucaaaggcucuuuucagagccaccaaaaaaaaaaaaaaaaaaaaaaaaaaaaaaaaaaaaaaaaaaaaaaaaaaaaaaaaaaaaaaaaaaaaaaaaaaaaaaaaaaaaaaaaaaaaaaaaaaaaa

SEQ ID NO: 41065 - RNA, 1812 nt, Artificial Sequence
  mRNA product Design b-4 (hSL-A100) comprising derived and/or modified sequence from LASV(AV;Clade V)__CCA30314__GPCmut12 (opt5)
aggagagucccgcagucggcguccagcggcucugcuuguucgugugugugucguugcaggccuuauucaagcuuaccaugggccagaucgugaccuucuuucaagaggucccccacguuauugaagaggugaugaacaucgugcugauugcccucagcauccuggcuguccuuaaggggcuguacaauauugccacaugcggacucaucggccugaucacguuccuucugcucugugggagauccugcucuagcaaccuguauaaaggaguguacgaacugcagucccucgaccugaauauggagacccuuaacauguguaugccucugucuugcacaaagaauaacagccaucacuauauucggguuggcaaugauaccgggcucgaacugacacuuaccaacacauccauccugaaucauaaauuuuguaaccucucugacgcgcacaagaaagaucuguacgaccaugcucugaugagcauuaucuccaccuuccaccucagcauuccgaauuuuaaccaguaugaggccaugucuugcgauuucaauggaggcaagaucuccgugcaguacaaccugagccacucuuaugccauugacgcugccaaucauuguggcacggucgcuaacgggauccuucaaaccuuuaugcgcauggccuggggaggcuccuacaucgcgcuggauagcgggagaggaaacugggacugcauuaugacaucuuaccaguaucucaucauucagaauaccacaugggagaaccacugucaguucucccggcccagcccuaucggcuaccuggggcuucugucccaacgcaccagagauauuuauaucucucggcgccuccugggaacguuuacauggacccugagcgacuccgaaggcaaugccacacccggcggguacugccucaccagauggaugcugaucgaggcugaacuuaaguguuucggaaacaccgccguggcuaaaugcaaugagaagcaugaugaggaauuuugcgacaugcugcgccucuucgauuuuuguaaacaggccauuagccggcugaagucugaggcgcagauguccauccagcuuauuaacaaagccguuaaugcucugaucaacgaccaacucauuaugaagaaucaccugagagacaucaugggcaucccuuauugcaacuacagcaaguauuguuaccugaaucacacaauuacggggaaaaccucucuccccaagugcugucuggugagcaacggauccuaccuuaaugaaacacauuucucugaugacaucgagcagcaggccgauaacaugauuaccgaaaugcugcaaaaagaguauauggagcggcagggcaagacaccucucgggcuggucgaccuguucguguuuagcaccuccuucuaccuuaucagcauuuuucuccgccuggugaaaaucccgacgcacagacauauugucggaaagcccugcccuaaaccccaccggcugaaucauaugggcaucuguucuugcggccucuauaagcagccugggguucccgugcgcuggaagagaugaggacuaguaauaaggaaacuguaugaaugucugugggcaggaagugaagagauccuucuguaaagguuuuuggaauuaugucugcugaauaauaaacuuuuuugaaauaauaaaucugguagaaaaaugagaucucaaaggcucuuuucagagccaccaaaaaaaaaaaaaaaaaaaaaaaaaaaaaaaaaaaaaaaaaaaaaaaaaaaaaaaaaaaaaaaaaaaaaaaaaaaaaaaaaaaaaaaaaaaaaaaaaaaaa

SEQ ID NO: 41066 - RNA, 1809 nt, Artificial Sequence
  mRNA product Design b-4 (hSL-A100) comprising derived and/or modified sequence from LASV(Togo/2016/7082;Clade VI)__AMR44577__GPCmut12 (opt5)
aggagagucccgcagucggcguccagcggcucugcuuguucgugugugugucguugcaggccuuauucaagcuuaccaugggccagaucauuaccuucuuucaagaggugccccacgucaucgaagagguuaugaacauugugcugaucgcccucagccugcuugcuauucugaaggggguguacaaugucgccacaugcggaaucaucggccucgugacguuccuguuucuuugugggagauccugcucucugauuuauaaaggaagcuacgaacuccagacccuggagcugaacauggaaacacucaauauguguaugccucuguccugcaccaagaacucuagccaucacuauauccggguuggcaaugagacagggcuugagcugacccucacaaacaccuccauuaucaaucauaaauucuguaaccugucugacgcgcacaagcgcaaucuuuacgaucaugcucugaugagcauucucuccacguuucaccugagcaucccgaacuucaaucaguaugaagccaugucuugcgacuuuaacggaggcaaaauuuccgugcaguacaaucugagccacgccuaugcugucgaugccgcugagcauuguggcaccguggccaacgggguucuccaaacauucaugagaauggcguggggaggcucuuacaucgcccuggacuccgggcggggaaauugggauugcaucaugaccagcuaccaguaucuuauuauccagaacacaaccugggaagaccacugucaguuuucucgccccuccccuauuggcuaccuggggcuccugagccaaagaacgcgggauaucuauauuucccgcagacuucugggaacauucaccuggacacucucugacagcgagggcaacgagacccccggcggguacugccugacccgguggaugcugaucgaagcugagcucaaguguuuuggaaauacagccguggcuaagugcaacgaaaaacaugaugaggaguucugcgacaugcugcgccuuuuugauuucuguaagcaggccauccagagacugaaauccgaagcgcagaugagcauucaacucaucaauaaggccgucaacgcucugauuaaugaccagcuuaucaugaaaaaccaucugcgggauaugaugggcauuccuuauugcaauuacucuaaguauuguuaccucaaccacacguccagcgggcgcaccucucugcccaagugcugucuggugagcaauggauccuaccucaacgagacacacuucucugacgacaucgaacagcaagccgauaauaugaucaccgagaugcugcagaaagaauauauugacagacagggcaagacaccucuugggcugguggaucucuuugucuucagcaccuccuuuuaccugaucagcauuuuccugcaccuuaucaaaauuccgacgcaucggcacaucguuggaaagcccugcccuaaaccccaucgccucaaccacaugggcauuuguucuugcggccuguauaagcagccuggggugcccacaagauggaaacggugaggacuaguaauaaggaaacuguaugaaugucugugggcaggaagugaagagauccuucuguaaagguuuuuggaauuaugucugcugaauaauaaacuuuuuugaaauaauaaaucugguagaaaaaugagaucucaaaggcucuuuucagagccaccaaaaaaaaaaaaaaaaaaaaaaaaaaaaaaaaaaaaaaaaaaaaaaaaaaaaaaaaaaaaaaaaaaaaaaaaaaaaaaaaaaaaaaaaaaaaaaaaaaaaa

SEQ ID NO: 41067 - RNA, 1809 nt, Artificial Sequence
  mRNA product Design b-4 (hSL-A100) comprising derived and/or modified sequence from LASV(KAK-428;Clade n.d. (VII))__ANH09740__GPCmut12 (opt5)
aggagagucccgcagucggcguccagcggcucugcuuguucgugugugugucguugcaggccuuauucaagcuuaccaugggccagaucgugaccuucuuucaagaggucccccacguuauugaagaggugaugaacaucgugcugauugcccucagccugcuugcuauccugaaggggcucuacaauuucgccacaugcggagucauuggccugaucacguuucuucugcucugugggagauccugcucugcgaccuauaaaggacaguacgaacugcagacacuggagcucaacauggaaagccugaauauguguaugccucuuuccugcaccaagaacaauucucaucacuauauccgggcuggcaacaauacagggcuggagcucacccugacaaacaccagcauuaucucccauaaauucuguaaucuuucugacgcccacaagaaaaaccuguacgaucauacgcucaugagcauuaucaccacauuucaccuguccauuccgaauuucaaccaguaugaggccaugagcugcgacuuuaauggaggcaagaucucuauucaauacaaccugucccacagcuaugcuggcgaugccgcucagcauugugggaccguggccaauggaguucuccagacauucaugcgcauggcguggggcgggucuuaccuggcccuugacuccggaagacggggcugggauugcaucaucagcucuuaccaguaucugauuauccaaaacaccacgugggacgaucacugucaguuuucccgccccagcccuauuggguaccucggauucgugucccagaagacaagagacaucuauauuucucggcgccugcuuggcaccuuuacauggacccugagcgauuccgaaggccaugacaugcccgggggauacugccucaccagauggaugcugaucgaggcugaucugaaauguuucggcaacacagccgucgcuaagugcaaugaaaaacacgacgaggaguuuugcgauauguggcgccucuucgacuucuguaagcaggccauccaacggcugaaagcggaagcccagaugaacauucagcuuaucaauaaggcugugaacgcccugauuaaugaccaacucaugaugaagaaccaccugagagauaucauggggauuccuuauugcaauuacagcaaauuuuguuaucuuaacaauacgaccacaggacggaccucucugccccgcugcugucucaucuccaacggcagcuaccugaaugagacacauuucucugacgauaucgaacagcaggcugacaacaugauuaccgagaugcugcagaaggaauacauggauagacaagggaaaacgccucucggacugguugaccuuuuuguguucagcacauccuuuuaucugaucaccauuuuccuccaccuggucaagaucccgacccaucggcacauugugggcaaacccugcccuaagccccaucgccugaaucacaugggcaucuguucuugcgggcuuuacaaacagccuggagugcccgucagauggaagcggugaggacuaguaauaaggaaacuguaugaaugucugugggcaggaagugaagagauccuucuguaaagguuuuuggaauuaugucugcugaauaauaaacuuuuuugaaauaauaaaucugguagaaaaaugagaucucaaaggcucuuuucagagccaccaaaaaaaaaaaaaaaaaaaaaaaaaaaaaaaaaaaaaaaaaaaaaaaaaaaaaaaaaaaaaaaaaaaaaaaaaaaaaaaaaaaaaaaaaaaaaaaaaaaaa

SEQ ID NO: 41068 - RNA, 1809 nt, Artificial Sequence; identical to SEQ ID NO: 41062
  mRNA product Design b-4 (hSL-A100) comprising derived and/or modified sequence from LASV(Pinneo-NIG-1969;Clade I)__AIT17836__GPCmut12 (opt5)

SEQ ID NO: 41069 - RNA, 1809 nt, Artificial Sequence
  mRNA product Design b-4 (hSL-A100) comprising derived and/or modified sequence from LASV(ISTH0009-NIG-2011;Clade II)__AIT17404__GPCmut12 (opt5)
aggagagucccgcagucggcguccagcggcucugcuuguucgugugugugucguugcaggccuuauucaagcuuaccaugggccagaucauuaccuucuuucaagaggugccccacgucaucgaagagguuaugaacauugugcugaucgcccucagccugcuugcuauucugaaggggaucuacaauguggccacaugcggacucuucggccuggucuccuuucuucugcucugugggagaucuugcagcacgaccuauaaaggaguguacgaacugcagacacuggagcucgacauggcgucccugaacauguguaugccucuuucuugcaccaagaauaacagccaucacuauaucaugguuggcaaugaaacagggcuggagcucacccugacaaacaccuccauuaucaaucauaaauucuguaaccuuucugaugcucacaagaaaaaucuguacgaccaugcccucaugagcauuaucuccacguuucaccugagcauuccgaacuucaaucaguaugaggccaugucuugcgauuuuaacggaggcaagaucuccgugcaguacaaucugagccacgcuuaugccgucgacgcugccaaccauuguggcaccauugcgaauggggugcuccaaacauucaugcggauggccuggggaggcucuuacaucgcucuggauuccgggaagggaagcugggacugcaucaugaccucuuaccaguaucuuauuauccagaacacaaccugggaagaucacugucaguuuucccgccccagcccuauuggcuaccuggggcuccugucccaaagaacgcgggacaucuauauuucucgcagacuucugggaacauucaccuggacacucagcgauuccgagggcaacgaaacccccggcggguacugccugacccgguggaugcugaucgaggccgagcucaaauguuuuggaaauacagcuguugccaagugcaacgaaaaacaugacgaggaguucugcgauaugcugcgccuuuuugacuucuguaagcaggcgaucagacggcugaaaacggaagcccagaugagcauucagcucaucaauaaggcugugaacgcccugauuaaugaucaacuuaucaugaagaaccaucugcgcgacauuaugggcaucccuuauugcaauuacucuaaauauuguuaccucaaccacaccgucacagggaagaccucccugcccagaugcugucuggugagcaauggaucuuaccucaacgaaacacacuucagcgacgauaucgagcagcaggcugacaauaugauuaccgagcugcuucaaaaagaauauauggaucggcagggcaagacgccucuggggcucguggaccuguuugucuucuccacaucuuuuuaccugaucagcauuuuccuucaccucaucaaaauuccgacccaucgccacaucaccggaaagcccugcccuaaaccccauagacugaaccacaugggcauuuguuccugcggccuguauaagcacccugggguucccgugaaguggaaacggugaggacuaguaauaaggaaacuguaugaaugucugugggcaggaagugaagagauccuucuguaaagguuuuuggaauuaugucugcugaauaauaaacuuuuuugaaauaauaaaucugguagaaaaaugagaucucaaaggcucuuuucagagccaccaaaaaaaaaaaaaaaaaaaaaaaaaaaaaaaaaaaaaaaaaaaaaaaaaaaaaaaaaaaaaaaaaaaaaaaaaaaaaaaaaaaaaaaaaaaaaaaaaaaaa

SEQ ID NO: 41070 - RNA, 1809 nt, Artificial Sequence
  mRNA product Design b-4 (hSL-A100) comprising derived and/or modified sequence from LASV(ISTH2010-NIG-2012;Clade II)__AIT17482__GPCmut12 (opt5)
aggagagucccgcagucggcguccagcggcucugcuuguucgugugugugucguugcaggccuuauucaagcuuaccaugggccagaucauuaccuucuuucaagaggugccccacgucaucgaagagguuaugaacauugugcugaucgcccucagccugcuugcuauucugaaggggaucuacaauguggccacaugcggacucuucggccuggucuccuuucuucugcucugugggagaucuugcagcacgaccuauaaaggaguguacgaacugcagacacuggagcucgacauggcgucccugaacauguguaugccucuuucuugcaccaagaauaacagccaucacuauaucaugguuggcaaugaaacagggcuggagcucacccugacaaacaccuccauuaucaaucauaaauucuguaaccuuucugaugcucacaagaaaaaucuguacgaccaugcccucaugagcauuaucuccacguuucaccugagcauuccgaacuucaaucaguaugaggccaugucuugcgauuuuaacggaggcaagaucuccgugcaguacaaucugagccacgcuuaugccgucgacgcugccaaccauuguggcaccauugcgaauggggugcuccaaacauucaugcggauggccuggggaggcucuuacaucgcucuggauuccgggaagggaagcugggacugcaucaugaccucuuaccaguaucuuauuauccagaacauuacaugggaagaucacugucaguuuucccgccccagcccuaucggcuaccuggggcuccugucccaaagaacccgggacauuuauaucucucgcagacuucugggaacguucacauggacccucagcgauuccgagggcaacgaaacacccggcggguacugccugacccgguggaugcugaucgaggccgagcucaaauguuuuggaaauaccgcuguugccaagugcaacgaaaaacaugacgaggaguucugcgauaugcugcgccuuuuugacuucuguaagcaggcgauuagacggcugaaaacagaagcccagaugagcauccagcucauuaauaaggcugugaacgcccugaucaaugaucaacuuauuaugaagaaccaucugcgcgacaucaugggcaucccuuauugcaauuacucuaaauauuguuaccucaaccacacggucaccgggaagacaucccugcccagaugcugucuggugagcaauggaucuuaccucaacgaaacccacuucagcgacgauauugagcagcaggcugacaauaugaucacagagcugcuucaaaaagaauauauugaucggcagggcaagaccccucuggggcucguggaccuguuugucuucuccacgucuuuuuaccugaucagcauuuuccuucaccucguuaaaaucccgacacaucgccacguggugggaaagcccugcccuaaaccccauagacugaaccacaugggcauuuguuccugcggccuguauaagcacccugggguccccgugaaguggaaacggugaggacuaguaauaaggaaacuguaugaaugucugugggcaggaagugaagagauccuucuguaaagguuuuuggaauuaugucugcugaauaauaaacuuuuuugaaauaauaaaucugguagaaaaaugagaucucaaaggcucuuuucagagccaccaaaaaaaaaaaaaaaaaaaaaaaaaaaaaaaaaaaaaaaaaaaaaaaaaaaaaaaaaaaaaaaaaaaaaaaaaaaaaaaaaaaaaaaaaaaaaaaaaaaaa

SEQ ID NO: 41071 - RNA, 1809 nt, Artificial Sequence
  mRNA product Design b-4 (hSL-A100) comprising derived and/or modified sequence from LASV(Lassa virus/H.sapiens-wt/NGA/2015/ISTH_0543;Clade II)__AVO03639__GPCmut12 (opt5)
aggagagucccgcagucggcguccagcggcucugcuuguucgugugugugucguugcaggccuuauucaagcuuaccaugggccagaucauuaccuucuuucaagaggugccccacgucaucgaagagguuaugaacauugugcugaucgcccucagccugcuugcuauucugaaggggaucuacaauguggccacaugcggacucuucggccuggucuccuuucuucugcucugugggagaucuugcagcacgaccuauaaaggaguguacgaacugcagacacuggagcucgacauggcgaaccugaauauguguaugccucuuuccugcaccaagaacaauucucaucacuauaucaugguuggcaacgaaacagggcuggagcucacccugacaaauaccagcauuaucaaccauaaauucuguaaucuuuccgaugcucacaagaaaaaccuguacgaccaugcccucaugucuauuaucagcacguuucaccuguccauuccgaauuucaaccaguaugaggccaugagcugcgauuuuaauggaggcaagaucucugugcaguacaaccugucccacaccuaugcugucgacgccgcuaaucauuguggcacaauugccaacggggugcuccaaaccuucaugcggauggcguggggaggcagcuacaucgcccuggauucugggaagggauccugggacugcaucaugacaagcuaccaguaucuuguuauucagaacaccacgugggaagaucacugucaguuuucucgccccuccccuaucggcuaccuggggcuccugagccaaagaacacgggacauuuauaucucccgcagacuucugggaaccuucacauggacccucucugauagcgagggcaaugaaacccccggcggguacugccugacacgguggaugcugauugaggcugagcucaaauguuuuggaaacacggccguggcuaagugcaaugaaaaacaugacgaggaguucugcgauaugcugcgccuuuuugacuucuguaagcaggccaucagacggcugaaaaccgaagcgcagauguccauccagcucauuaacaaggccgucaaugcucugaucaacgaucaacuuauuaugaagaaucaucugcgcgacaucaugggcauuccuuauugcaacuacagcaaauauuguuaccucaaucacacagugaccgggaagacaucucugcccagaugcugucugguguccaacggaagcuaccucaaugaaacccacuucucugacgauaucgagcagcaggccgacaacaugaucacggagcugcuucaaaaagaauauauugaucggcagggcaagacaccucuggggcucgucgaccuguuuguuuucagcaccuccuuuuaccugaucucuauuuuccuucaccucgugaaaaucccgacccaucgccacauuacaggaaagcccugcccuaaaccccauagacugaaucacaugggcaucuguagcugcggccuguauaagcacccuggggugcccgucaaguggaaacggugaggacuaguaauaaggaaacuguaugaaugucugugggcaggaagugaagagauccuucuguaaagguuuuuggaauuaugucugcugaauaauaaacuuuuuugaaauaauaaaucugguagaaaaaugagaucucaaaggcucuuuucagagccaccaaaaaaaaaaaaaaaaaaaaaaaaaaaaaaaaaaaaaaaaaaaaaaaaaaaaaaaaaaaaaaaaaaaaaaaaaaaaaaaaaaaaaaaaaaaaaaaaaaaaa

SEQ ID NO: 41072 - RNA, 1809 nt, Artificial Sequence
  mRNA product Design b-4 (hSL-A100) comprising derived and/or modified sequence from LASV(Lassa virus/H.sapiens-wt/NGA/2016/ISTH_0009;Clade II)__AVO03571__GPCmut12 (opt5)
aggagagucccgcagucggcguccagcggcucugcuuguucgugugugugucguugcaggccuuauucaagcuuaccaugggccagaucauuaccuucuuucaagaggugccccacgucaucgaagagguuaugaacauugugcugaucgcccucagccugcuugcuauucugaaggggaucuacaauguggccacaugcggacuccugggccuugucuccuuccugcuccugugugggagaucuugcagcacgaccuauaaaggaguguacgaacugcagacacucgagcuggacauggcgucccuuaacauguguaugccucugucuugcaccaagaauaacagccaucacuauaucaugguuggcaaugaaacagggcucgagcugacccuuacaaacaccuccauuaucaaucauaaauuuuguaaccugucugaugcucacaagaaaaaucucuacgaccaugcccugaugagcauuaucuccacguuccaccugagcauuccgaacuuuaaucaguaugaggccaugucuugcgauuucaacggaggccggaucuccgugcaguacaaucucagccacucuuaugcugucgacgccgcuaaccauuguggcaccauugccaauggggugcugcaaacauuuaugcgcauggcguggggaggcuccuacaucgcccuugauagcgggaagggaucuugggacugcaucaugaccuccuaccaguaucugauuauccagaacacaaccugggaagaucacugucaguucagcagacccuccccuauuggcuaccucgggcugcuuucucaacggacgcgcgacaucuauauuagcagacggcugcucggaacauuuaccuggacacuguccgauagcgagggcaacgaaacccccggcggguacugccugacccgcuggaugcucaucgaggcugagcugaaguguuucggaaauacagccguugcuaaaugcaacgaaaagcaugacgaggaauuuugcgauaugcuuagacuguucgacuuuuguaaacaggccauccggcgccucaagacggaggcgcagaugucuauucagcugaucaauaaagccgugaacgcucuuauuaaugaucaacugaucaugaagaaccaccucagagacauuaugggcaucccuuauugcaauuacuccaaguauuguuaccugaaccacaccgucacagggaaaaccagccugccccggugcugucucgugucuaauggaagcuaccugaacgaaacacauuucuccgacgauaucgagcagcaggccgacaauaugauuaccgagcuucugcaaaaggaauauaucgaucgccagggcaaaacgccucucgggcugguggaccuguucgucuuuucuaccagcuucuaccuuauuuccaucuuucuccaccugguuaagauuccgacacauagacacaucaccggaaaacccugcccuaagccccaucggcugaaccacaugggcauuuguagcugcggccucuauaaucacccuggggugcccgugaaauggaagcgcugaggacuaguaauaaggaaacuguaugaaugucugugggcaggaagugaagagauccuucuguaaagguuuuuggaauuaugucugcugaauaauaaacuuuuuugaaauaauaaaucugguagaaaaaugagaucucaaaggcucuuuucagagccaccaaaaaaaaaaaaaaaaaaaaaaaaaaaaaaaaaaaaaaaaaaaaaaaaaaaaaaaaaaaaaaaaaaaaaaaaaaaaaaaaaaaaaaaaaaaaaaaaaaaaa

SEQ ID NO: 41073 - RNA, 1809 nt, Artificial Sequence
  mRNA product Design b-4 (hSL-A100) comprising derived and/or modified sequence from LASV(Lassa virus/H.sapiens-wt/NGA/2016/ISTH_0017;Clade II)__AVO03567__GPCmut12 (opt5)
aggagagucccgcagucggcguccagcggcucugcuuguucgugugugugucguugcaggccuuauucaagcuuaccaugggccagaucauuaccuucuuucaagaggugccccacgucaucgaagagguuaugaacauugugcugaucgcccucagccugcuugcuauucugaaggggaucuacaauguggccacaugcggacucuucggccuggucuccuuucuucugcucugugggagaucuugcagcacgaccuauaaaggaguguacgaacugcagacacuggagcucgacauggcgucccugaacauguguaugccucuuucuugcaccaagaauaacagccaucacuauaucaugguuggcaaugaaacagggcuggagcucacccugacaaacaccuccauuaucaaucauaaauucuguaaccuuucugaugcucacaagaaaaaucuguacgaccaugcccucaugagcauuaucuccacguuucaccugagcauuccgaacuucaaucaguaugaggccaugucuugcgauuuuaacggaggcaagaucuccgugcaguacaaucugagccacaccuaugcuauugacgccgcuaaccauuguggcacaaucgccaaugggguccuccaaaccuucaugcggauggcguggggaggcucuuacaucgcccuggauuccgggaagggaagcugggacugcauuaugacaucuuaccaguaucuuaucauucagaacaccacgugggaagaucacugucaguuuucccgccccagcccuaucggcuaccuggggcuccugucccaaagaacacgggacauuuauaucucucgcagacuucugggaaccuucacauggacccucagcgauuccgagggcaacgaaacccccggcggguacugccugacacgguggaugcugaucgaggcugagcucaaauguuuuggaaauacggccguggcuaagugcaacgaaaaacaugacgaggaguucugcgauaugcugcgccuuuuugacuucuguaagcaggccauuagacggcugaaaaccgaagcgcagaugagcauccagcucauuaauaaggccguuaacgcucugaucaaugaucaacuuauuaugaagaaccaucugcgcgacaucaugggcaucccuuauugcaauuacucuaaauauuguuaccucaaccacacagugaccgggaagacaucccugcccagaugcugucuggucagcaauggaucuuaccucaacgaaacccacuucagcgacgauauugagcagcaggccgacaauaugaucacggagcugcuucaaaaagaauauauggaucggcagggcaagacaccucuggggcucguggaccuguuuguguucuccaccucuuuuuaccugauuagcaucuuccuucaccucguccgcauuccgacccauagacacguuaucggaaaacccugcccuaagccccaucggcugaaccacaugggcauuuguuccugcggccuguauaaacacccuggggugcccgugaaguggaagcgcugaggacuaguaauaaggaaacuguaugaaugucugugggcaggaagugaagagauccuucuguaaagguuuuuggaauuaugucugcugaauaauaaacuuuuuugaaauaauaaaucugguagaaaaaugagaucucaaaggcucuuuucagagccaccaaaaaaaaaaaaaaaaaaaaaaaaaaaaaaaaaaaaaaaaaaaaaaaaaaaaaaaaaaaaaaaaaaaaaaaaaaaaaaaaaaaaaaaaaaaaaaaaaaaaa

SEQ ID NO: 41074 - RNA, 1809 nt, Artificial Sequence
  mRNA product Design b-4 (hSL-A100) comprising derived and/or modified sequence from LASV(Lassa virus/H.sapiens-wt/NGA/2018/ISTH_0959;Clade II)__AVV65099__GPCmut12 (opt5)
aggagagucccgcagucggcguccagcggcucugcuuguucgugugugugucguugcaggccuuauucaagcuuaccaugggccagaucauuaccuucuuucaagaggugccccacgucaucgaagagguuaugaacauugugcugaucgcccucagccugcuugcuauucugaaggggaucuacaauguggucacaugcggacucuucggccugguguccuuucuucugcucugugggagaucuugcagcacgaccuauaaaggaguuuacgaacugcagacacuggagcucgacauggccucccugaacauguguaugccucuuucuugcaccaagaauaacagccaucacuauaucauggugggcaaugaaacagggcuggagcucacccugacaaacaccuccauuaucaaucauaaauucuguaaccuuucugaugcgcacaagaaaaaucuguacgaccaugcucucaugagcauuaucuccacguuucaccugagcauuccgaacuucaaucaguaugaggccaugucuugcgauuuuaacggaggcaagaucuccguccaguacaaucugagccacgccuaugcuauugacgccgcuaaccauuguggcaccaucgccaauggggugcuccaaacauucaugcggauggcguggggaggcucuuacaucgcccuggauuccgggaagggaagcugggacugcauuaugaccucuuaccaguaucuuaucauucagaacacaaccugggaagaucacugucaguuuucccgccccagcccuaucggcuaccuggggcuccugucccaaagaacgcgggacauuuauaucucucgcagacuucugggaacauucaccuggacacucagcgauuccgagggcaacgaaacccccggcggguacugccugacccgguggaugcugaucgaggcugagcucaaauguuuuggaaauacagccguugcuaagugcaacgaaaaacaugacgaggaguucugcgauaugcugcgccuuuuugacuucuguaagcaggccauuagacggcugaaaacggaagcgcagaugagcauccagcucauuaauaaggccgugaacgcucugaucaaugaucaacuuauuaugaagaaccaucugcgcgacaucaugggcaucccuuauugcaauuacucuaaauauuguuaccucaaccacaccgucacagggaagaccucccugcccagaugcugucuggugagcaauggaucuuaccucaacgaaacacacuucagcgacgauauugagcagcaggccgacaauaugaucaccgagcugcuucaaaaagaauauauugaucggcagggcaagacgccucuggggcucguggaccuguuugucuucuccacaucuuuuuaccugaucagcauuuuccuucaccucguuaaaaucccgacccaucgccacgugauuggaaagcccugcccuaaaccccauagacugaaccacaugggcaucuguuccugcggccuguauaagcacccuggggugcccgucaaguggaaacggugaggacuaguaauaaggaaacuguaugaaugucugugggcaggaagugaagagauccuucuguaaagguuuuuggaauuaugucugcugaauaauaaacuuuuuugaaauaauaaaucugguagaaaaaugagaucucaaaggcucuuuucagagccaccaaaaaaaaaaaaaaaaaaaaaaaaaaaaaaaaaaaaaaaaaaaaaaaaaaaaaaaaaaaaaaaaaaaaaaaaaaaaaaaaaaaaaaaaaaaaaaaaaaaaa

SEQ ID NO: 41075 - RNA, 1809 nt, Artificial Sequence
  mRNA product Design b-4 (hSL-A100) comprising derived and/or modified sequence from LASV(LASV003-NIG-2008;Clade II)__AIT17580__GPCmut12 (opt5)
aggagagucccgcagucggcguccagcggcucugcuuguucgugugugugucguugcaggccuuauucaagcuuaccaugggccagaucauuaccuucuuucaagaggugccccacgucaucgaagagguuaugaacauugugcugaucgcccucagccugcuugcuauucugaaggggaucuacaauguggccacaugcggacucuucggccuggucuccuuucuucugcucugugggagaucuugcagcacgaccuauaaaggaguguacgaacugcagacacuggagcucgacauggcgucccugaacauguguaugccucuuucuugcaccaagaauaacagccaucacuauaucaugguuggcaaugaaacagggcuggagcucacccugacaaacaccuccauuaucaaucauaaauucuguaaccuuucugaugcucacaagaaaaaucuguacgaccaugcccucaugagcauuaucuccacguuucaccugagcauuccgaacuucaaucaguaugaggccaugucuugcgauuuuaacggaggcaagaucuccgugcaguacaaucugagccacaccuaugcugucgacgccgcuaaccauuguggcacaauugccaauggggugcuccaaaccuucaugcggauggcguggggaggcucuuacaucgcccuggauuccgggaagggaagcugggacugcaucaugacaucuuaccaguaucuuauuauccagaacaccacgugggaagaucacugucaguuuucccgccccagcccuauuggcuaccuggggcuccugucccaaagaacacgggacaucuauauuucucgcagacuucugggaaccuucacauggacccucagcgauuccgagagcaacgaaacccccggcggcuacugccugacacgguggaugcugaucgaggcugagcucaaauguuuugggaauacggccguugcuaagugcaacgaaaaacaugacgaggaguucugcgauaugcugcgccuuuuugacuucuguaagcaggccaucagacggcugaaagcggaagcccagaugucuauucagcucaucaauaaggcugugaacgcccugauuaaugaucaacuuaucaugaagaaccaucugcgcgacauuaugggaaucccuuauugcaauuacuccaaauauuguuaccucaaccacaccgucacaggcagaaccagccugccccggugcugucuggugucuaaugggagcuaccucaacgaaacacacuucuccgacgauaucgagcagcaggcugacaauaugauuaccgagcugcuucaaaaggaauauauggaucgccagggaaaaacgccucugggccucguggaccuguuugucuucucuaccagcuuuuaccugaucuccauuuuccuucaccucguuaagaucccgacacauagacacgugauugggaaacccugcccuaagccccaucggcugaaccacaugggaaucuguagcugcggccuguauaaacacccuggcgugcccgucaaguggaagcgcugaggacuaguaauaaggaaacuguaugaaugucugugggcaggaagugaagagauccuucuguaaagguuuuuggaauuaugucugcugaauaauaaacuuuuuugaaauaauaaaucugguagaaaaaugagaucucaaaggcucuuuucagagccaccaaaaaaaaaaaaaaaaaaaaaaaaaaaaaaaaaaaaaaaaaaaaaaaaaaaaaaaaaaaaaaaaaaaaaaaaaaaaaaaaaaaaaaaaaaaaaaaaaaaaa

SEQ ID NO: 41076 - RNA, 1809 nt, Artificial Sequence
  mRNA product Design b-4 (hSL-A100) comprising derived and/or modified sequence from LASV(LASV035-NIG-2009;Clade II)__AIT17588__GPCmut12 (opt5)
aggagagucccgcagucggcguccagcggcucugcuuguucgugugugugucguugcaggccuuauucaagcuuaccaugggccagaucauuaccuucuuucaagaggugccccacgucaucgaagagguuaugaacauugugcugaucgcccucagccugcuugcuauucugaaggggaucuacaauguggccacaugcggacucuucggccuggucuccuuucuucugcucugugggagaucuugcagcacgaccuauaaaggaguguacgaacugcagacacuggagcucgacauggcgucccugaacauguguaugccucuuucuugcaccaagaauaacagccaucacuauaucaugguuggcaaugaaacagggcuggagcucacccugacaaacaccuccauuaucaaucauaaauucuguaaccuuucugaugcucacaagaaaaaucuguacgaccaugcccucaugagcauuaucuccacguuucaccugagcauuccgaacuucaaucaguaugaggccaugucuugcgauuuuaacggaggcaagaucuccgugcaguacaaucugagccacgcuuaugccgucgacgcugccaaccauuguggcaccauugcgaauggggugcuccaaacauucaugcggauggccuggggaggcucuuacaucgcucuggauuccgggaagggaagcugggacugcaucaugaccucuuaccaguaucuuauuauccagaacacaaccugggaagaucacugucaguuuucccgccccagcccuauuggcuaccuggggcuccugucccaaagaacgcgggacaucuauauuucucgcagacuucugggaacauucaccuggacacucagcgauuccgagggcaacgaaacccccggcggguacugccugacccgguggaugcugaucgaggccgagcucaaauguuuuggaaauacagcuguugccaagugcaacgaaaaacaugacgaggaguucugcgauaugcugcgccuuuuugacuucuguaagcaggcgaucagacggcugaaagccgaagcucagaugagcauucagcucaucaauaaggccgugaacgcucugauuaaugaucaacuuaucaugaagaaccaucugcgcgacauuaugggcaucccuuauugcaauuacucuaaauauuguuaccucaaccacacggucaccgggaagacaucccugcccagaugcugucuggugagcaauggaucuuaccucaacgaaacccacuucagcgacgauaucgagcagcaggccgacaauaugauuacagagcugcuucaaaaagaauauaucgaucggcagggcaagaccccucuggggcucguggaccuguuugucuucuccacgucuuuuuaccugauuagcaucuuccuucaccucguuaaaauuccgacacaucgccacgugaucggaaagcccugcccuaaaccccauagacugaaccacaugggcauuuguuccugcggccuguauaagcacccuggggugcccgucaaguggaaacggugaggacuaguaauaaggaaacuguaugaaugucugugggcaggaagugaagagauccuucuguaaagguuuuuggaauuaugucugcugaauaauaaacuuuuuugaaauaauaaaucugguagaaaaaugagaucucaaaggcucuuuucagagccaccaaaaaaaaaaaaaaaaaaaaaaaaaaaaaaaaaaaaaaaaaaaaaaaaaaaaaaaaaaaaaaaaaaaaaaaaaaaaaaaaaaaaaaaaaaaaaaaaaaaaa

SEQ ID NO: 41077 - RNA, 1809 nt, Artificial Sequence
  mRNA product Design b-4 (hSL-A100) comprising derived and/or modified sequence from LASV(LASV1000-NIG-2009;Clade II)__AIT17782__GPCmut12 (opt5)
aggagagucccgcagucggcguccagcggcucugcuuguucgugugugugucguugcaggccuuauucaagcuuaccaugggccagaucauuaccuucuuucaagaggugccccacgucaucgaagagguuaugaacauugugcugaucgcccucagccugcuugcuauucugaaggggaucuacaauguggccacaugcggacucuucggccuggucuccuuucuucugcucugugggagaucuugcagcacgaccuauaaaggaguguacgaacugcagacacuggagcucgacauggcgucccugaacauguguaugccucuuucuugcaccaagaauaacagccaucacuauaucaugguuggcaaugaaacagggcuggagcucacccugacaaacaccuccauuaucaaucauaaauucuguaaccuuucugaugcucacaagaaaaaucuguacgaccaugcccucaugagcauuaucuccacguuucaccugagcauuccgaacuucaaucaguaugaggccaugucuugcgauuuuaacggaggcaagaucuccgugcaguacaaucugagccacaccuaugcugucgacgccgcuaaccauuguggcacaauugccaauggggugcuccaaaccuucaugcggauggcguggggaggcucuuacaucgcccuggauuccgggaagggaagcugggacugcaucaugacaucuuaccaguaucuuauuauccagaacaccacgugggaagaucacugucaguuuucccgccccagcccuauuggcuaccuggggcuccugucccaaagaacacgggacaucuauauuucucgcagacuucugggaaccuucacauggacccucagcgauuccgagggcaacgaaacccccggcggguacugccugacacgguggaugcugaucgaggcugagcucaaauguuuuggaaauacggccguugcuaagugcaacgaaaaacaugacgaggaguucugcgauaugcugcgccuuuuugacuucuguaagcaggccaucaaaagacugaagaccgaagcgcagaugagcauucagcucaucaauaaggccgugaacgcucugauuaaugaucaacuuaucaugaaaaaccaucugcgggacauuaugggcaucccuuauugcaauuacucuaaguauuguuaccucaaccacacagucaccgggaaaacaucccugccccgcugcugucuggugagcaauggaucuuaccucaacgaaacccacuucagcgacgauaucgagcagcaggccgacaauaugauuacggagcugcuucaaaaggaauauaucgauagacagggcaaaacaccucuggggcucguggaccuguuugucuucuccaccucuuuuuaccugauuagcaucuuccuucaccucguuaagauuccgacccaucggcacguggugggaaaacccugcccuaagccccaucgccugaaccacaugggcaucuguuccugcggccuguauaagcacccugggguccccgugaaauggaagagaugaggacuaguaauaaggaaacuguaugaaugucugugggcaggaagugaagagauccuucuguaaagguuuuuggaauuaugucugcugaauaauaaacuuuuuugaaauaauaaaucugguagaaaaaugagaucucaaaggcucuuuucagagccaccaaaaaaaaaaaaaaaaaaaaaaaaaaaaaaaaaaaaaaaaaaaaaaaaaaaaaaaaaaaaaaaaaaaaaaaaaaaaaaaaaaaaaaaaaaaaaaaaaaaaa

SEQ ID NO: 41078 - RNA, 1809 nt, Artificial Sequence
  mRNA product Design b-4 (hSL-A100) comprising derived and/or modified sequence from LASV(LASV221-NIG-2010;Clade II)__AIT17624__GPCmut12 (opt5)
aggagagucccgcagucggcguccagcggcucugcuuguucgugugugugucguugcaggccuuauucaagcuuaccaugggccagaucauuaccuucuuucaagaggugccccacgucaucgaagagguuaugaacauugugcugaucgcccucagccugcuugcuauucugaaggggaucuacaauguggccacaugcggacucuucggccuggucuccuuucuucugcucugugggagaucuugcagcacgaccuauaaaggaguguacgaacugcagacacuggagcucgacauggcgucccugaacauguguaugccucuuucuugcaccaagaauaacagccaucacuauaucaugguuggcaaugaaacagggcuggagcucacccugacaaacaccuccauuaucaaucauaaauucuguaaccuuucugaugcucacaagaaaaaucuguacgaccaugcccucaugagcauuaucuccacguuucaccugagcauuccgaacuucaaucaguaugaggccaugucuugcgauuuuaacggaggcaagaucuccgugcaguacaaucugagccacaccuaugcuauugacgccgcuaaccauuguggcacaaucgccaaugggguccuccaaaccuucaugcggauggcguggggaggcucuuacaucgcccuggauuccgggaagggaagcugggacugcauuaugacaucuuaccaguaucuuaucauucagaacaccacgugggaagaucacugucaguuuucccgccccagcccuaucggcuaccuggggcuccugucccaaagaacacgggacauuuauaucucucgcagacuucugggaaccuucacauggacccucagcgauuccgagggcaacgaaacccccggcggguacugccugacacgguggaugcugaucgaggcugagcucaaauguuuuggaaauacggccguggcuaagugcaacgaaaaacaugacgaggaguucugcgauaugcugcgccuuuuugacuucuguaagcaggccauuagacggcugaaaaccgaagcgcagaugagcauccagcucauuaauaaggccguuaacgcucugaucaaugaucaacuuauuaugaagaaccaucugcgcgacaucaugggcaucccuuauugcaauuacucuaaauauuguuaccucaaccacacagugaccgggaagacaucccugcccagaugcugucuggucagcaauggaucuuaccucaacgaaacccacuucagcgacgauauugagcagcaggccgacaauaugaucacggagaugcugcaaaaagaauauauggaucggcagggcaagacaccucuugggcugguggaccucuuuguguucuccaccucuuuuuaccugauuagcaucuuccugcaccuugucaaaauuccgacccaucgccacguuaucggaaagcccugcccuaaaccccauagacucaaccacaugggcauuuguuccugcggccuguauaagcacccuggggugcccgugaaguggaaacggugaggacuaguaauaaggaaacuguaugaaugucugugggcaggaagugaagagauccuucuguaaagguuuuuggaauuaugucugcugaauaauaaacuuuuuugaaauaauaaaucugguagaaaaaugagaucucaaaggcucuuuucagagccaccaaaaaaaaaaaaaaaaaaaaaaaaaaaaaaaaaaaaaaaaaaaaaaaaaaaaaaaaaaaaaaaaaaaaaaaaaaaaaaaaaaaaaaaaaaaaaaaaaaaaa

SEQ ID NO: 41079 - RNA, 1809 nt, Artificial Sequence
  mRNA product Design b-4 (hSL-A100) comprising derived and/or modified sequence from LASV(LASV237-NIG-2010;Clade II)__AIT17638__GPCmut12 (opt5)
aggagagucccgcagucggcguccagcggcucugcuuguucgugugugugucguugcaggccuuauucaagcuuaccaugggccagaucauuaccuucuuucaagaggugccccacgucaucgaagagguuaugaacauugugcugaucgcccucagccugcuugcuauucugaaggggaucuacaauguggccacaugcggacucuucggccuggucuccuuucuucugcucugugggagaucuugcagcacgaccuauaaaggaguguacgaacugcagacacuggagcucgacauggcgucccugaacauguguaugccucuuucuugcaccaagaauaacagccaucacuauaucaugguuggcaaugaaacagggcuggagcucacccugacaaacaccuccauuaucaaucauaaauucuguaaccuuucugaugcucacaagaaagaccuguacgaucaugcccucaugagcauuaucuccacguuucaccugagcauuccgaauuucaaccaguaugaggccaugucuugcgacuuuaauggaggcaagaucuccgugcaguacaaccugagccacaccuaugcugucgaugccgcuaaucauuguggcacaauugccaacggggugcuccaaaccuucaugcggauggcguggggaggcucuuacaucgcccuggacuccgggaagggaagcugggauugcaucaugacaucuuaccaguaucuuauuauccagaauaccacgugggaagaccacugucaguuuucccgccccagcccuauuggcuaccuggggcuccugucccaaagaacacgggauaucuauauuucucgcagacuucugggaaccuucacauggacccucagcgacuccgagggcaacgaaacccccggcggguacugccugacacgguggaugcugaucgaggcugagcucaaauguuuuggaaacacggccguugcuaagugcaaugaaaaacaugaugaggaguucugcgacaugcugcgccuuuuugauuucuguaagcaggccaucagacggcugaaaaccgaagcgcagaugagcauucagcucaucaacaaggccgugaaugcucugauuaacgaccaacuuaucaugaagaaucaucugcgcgacauuaugggcaucccuuauugcaacuacucuaaauauuguuaccucaaucacacagucaccgggaagacaucccugcccagaugcugucuggugagcaacggaucuuaccucaaugaaacccacuucagcgaugacaucgagcagcaggccgauaacaugauuacggagcugcuucaaaaagaauauauggaccggcagggcaagacaccucuggggcucguggaucuguuugucuucuccaccucuuuuuaccugaucagcauuuuccuucaccucaucaaaauuccgacccaucgccacaucacaggaaagcccugcccuaaaccccauagacugaaucacaugggcauuuguuccugcggccuguauaagcacccugggguucccgugaaguggaaacggugaggacuaguaauaaggaaacuguaugaaugucugugggcaggaagugaagagauccuucuguaaagguuuuuggaauuaugucugcugaauaauaaacuuuuuugaaauaauaaaucugguagaaaaaugagaucucaaaggcucuuuucagagccaccaaaaaaaaaaaaaaaaaaaaaaaaaaaaaaaaaaaaaaaaaaaaaaaaaaaaaaaaaaaaaaaaaaaaaaaaaaaaaaaaaaaaaaaaaaaaaaaaaaaaa

SEQ ID NO: 41080 - RNA, 1809 nt, Artificial Sequence
  mRNA product Design b-4 (hSL-A100) comprising derived and/or modified sequence from LASV(LASV253-NIG-2011;Clade II)__AIT17670__GPCmut12 (opt5)
aggagagucccgcagucggcguccagcggcucugcuuguucgugugugugucguugcaggccuuauucaagcuuaccaugggccagaucauuaccuucuuucaagaggugccccacgucaucgaagagguuaugaacauugugcugaucgcccucagccugcuugcuauucugaaggggaucuacaauguggccacaugcggacucuucggccuggucuccuuucuucugcucugugggagaucuugcagcacgaccuauaaaggaguguacgaacugcagacacuggagcucgacauggcgucccugaacauguguaugccucuuucuugcaccaagaauaacagccaucacuauaucaugguuggcaaugaaacagggcuggagcucacccugacaaacaccuccauuaucaaucauaaauucuguaaccuuucugaugcucacaagaaaaaucuguacgaccaugcccucaugagcauuaucuccacguuucaccugagcauuccgaacuucaaucaguaugaggccaugucuugcgauuuuaacggaggcaagaucuccgugcaguacaaucugagccacaccuaugcugucgacgccgcuaaccauuguggcacaauugccaauggggugcuccaaaccuucaugcggauggcguggggaggcucuuacaucgcccuggauuccgggaagggaagcugggacugcaucaugacaucuuaccaguaucuuauuauccagaacaccacgugggaagaucacugucaguuuucccgccccagcccuauuggcuaccuggggcuccugucccaaagaacacgggacaucuauauuucucgcagacuucugggaaccuucacauggacccucagcgauuccgagggcaacgaaacccccggcggguacugccugacacgguggaugcugaucgaggcugagcucaaauguuuuggaaauacggccguugcuaagugcaacgaaaaacaugacgaggaguucugcgauaugcugcgccuuuuugacuucuguaagcaggccaucagacggcugaaagcggaagcccagaugagcauucagcucaucaauaaggcugugaacgcccugauuaaugaucaacuuaucaugaagaaccaucugcgcgacauuaugggcaucccuuauugcaauuacucuaaauauuguuaccucaaccacaccgucacagggagaaccucccugccccggugcugucuggugagcaauggaucuuaccucaacgaaacacacuucagcgacgauaucgagcagcaggcugacaauaugauuaccgagcugcuucaaaaggaauauaucgaucgccagggcaaaacgccucuggggcucguggaccuguuugucuucuccacaucuuuuuaccugauuagcaucuuccuucaccucguuaagauuccgacccauagacacaucauuggaaaacccugcccuaagccccaucggcugaaccacaugggcaucuguuccugcggccuguauaaacacccuggggugcccgugaaguggaagcgcugaggacuaguaauaaggaaacuguaugaaugucugugggcaggaagugaagagauccuucuguaaagguuuuuggaauuaugucugcugaauaauaaacuuuuuugaaauaauaaaucugguagaaaaaugagaucucaaaggcucuuuucagagccaccaaaaaaaaaaaaaaaaaaaaaaaaaaaaaaaaaaaaaaaaaaaaaaaaaaaaaaaaaaaaaaaaaaaaaaaaaaaaaaaaaaaaaaaaaaaaaaaaaaaaa

SEQ ID NO: 41081 - RNA, 1809 nt, Artificial Sequence
  mRNA product Design b-4 (hSL-A100) comprising derived and/or modified sequence from LASV(LASV254-NIG-2011;Clade II)__AIT17674__GPCmut12 (opt5)
aggagagucccgcagucggcguccagcggcucugcuuguucgugugugugucguugcaggccuuauucaagcuuaccaugggccagaucauuaccuucuuucaagaggugccccacgucaucgaagagguuaugaacauugugcugaucgcccucagccugcuugcuauucugaaggggaucuacaauguggccacaugcggacucuucggccuggucuccuuucuucugcucugugggagaucuugcagcacgaccuauaaaggaguguacgaacugcagacacuggagcucgacaugaccaaccugaauauguguaugccucuuuccugcacaaagaacaauucucaucacuauaucaugguuggcaacgaaaccgggcuggagcucacacugaccaauacgagcauuaucaaccauaaauucuguaaucuuuccgaugcgcacaagaaaaaccuguacaaucaugcucucaugucuauuaucagcaccuuucaccuguccauuccgaacuucaaucaguaugaggccaugagcugcgacuuuaacggaggcaagaucucugugcaguacaaucugucccacagcuaugccgucgaugcugccaaccauuguggcacaauugcuaacggggugcuccaaaccuucaugcggauggccuggggaggcucuuacaucgcgcuggacuccgggaagggaaauugggauugcaucaugacaagcuaccaguaucuuauuauccagaacaccacgugggaagaccacugucaguuuucucgccccuccccuauuggcuaccuggggcuccugagccaaagaacacgggauaucuauauuucccgcagacuucugggaaccuucacauggacccucucugacagcgagggcaaugaaacccccggcggguacugccugacacgguggaugcugaucgaggccgagcucaaauguuuuggaaacacggcuguugccaagugcaaugaaaaacaugaugaggaguucugcgacaugcugcgccuuuuugauuucuguaagcaggcuaucagacggcugaaaaccgaagcccaggcgaacauucagcucaucaauaaggccgugaacgcucugauuaaugaccaacuuaucaugaagaaccaucugcgcgauauuaugggcaucccuuauugcaauuacuccaaauauuguuaccucaaccacacagucaccgggaagacaagccugcccagaugcugucuggugucuaauggauccuaccucaacgaaacccacuucagcgacgacaucgagcagcaggccgauaauaugauuacggagcugcuucaaaaagaauauauggaccggcagggcaagacaccucuggggcucguggaucuguuugucuucucuaccagcuuuuaccugaucuccauuuuccuucaccucguuaaaaucccgacccaucgccacgugauuggaaagcccugcccuaaaccccauagacugaaccacaugggcaucuguucuugcggccuguauaagcacccuggggugcccgucaaguggaaacggugaggacuaguaauaaggaaacuguaugaaugucugugggcaggaagugaagagauccuucuguaaagguuuuuggaauuaugucugcugaauaauaaacuuuuuugaaauaauaaaucugguagaaaaaugagaucucaaaggcucuuuucagagccaccaaaaaaaaaaaaaaaaaaaaaaaaaaaaaaaaaaaaaaaaaaaaaaaaaaaaaaaaaaaaaaaaaaaaaaaaaaaaaaaaaaaaaaaaaaaaaaaaaaaaa

SEQ ID NO: 41082 - RNA, 1809 nt, Artificial Sequence
  mRNA product Design b-4 (hSL-A100) comprising derived and/or modified sequence from LASV(Nig08-A19;Clade III)__ADU56618__GPCmut12 (opt5)
aggagagucccgcagucggcguccagcggcucugcuuguucgugugugugucguugcaggccuuauucaagcuuaccaugggccagaucgugaccuucuuucaagaggucccccacguuauugaagaggugaugaacaucgugcugauugcccucagcauccuggcuauucuuaaggggcuguacaauaucgccacaugcggacucaucggccuggucacguuccuucugcucuccgggagaucuuguagcaugaccuauaaaggaguguacgaacugcagacacuggagcucaacaugaauacccugaacaugugcaugccucuuuccuguacaaagaauaacucucaucacuauauuaugguuggcaaugaaaccgggcuggagcucacacugaccaacacgagccuucugcaucacaaauuuugcaaucucuccgacgcgcauaagaaaaaccuguacgaucacacccugaugucuaucauuagcacauuccaccucuccaucccgaauuuuaaccaguaugaggcuaugagcugugacuucaauggaggcaagauuaccgugcaguacaaccugucucauuccuaugccaucgaugccgcuaaucacugcggcacagucgccaacggggugcuucaaaccuuuaugcggauggcuuggggaggcagcuacauugcccuggacucugggcgcggaaagugggauuguaucaugacguccuaccaguaucucaucauucagaacacaaccugggaagaccauugccaguucagcagacccucuccuaucggcuaccuggggcuucugucccaacggacacgcgauauuuauaucagcagacggcuccugggaaccuuuaccuggacacuguccgacucugagggcaaugaaacgcccggcggguacugucucacccgcuggaugcugauugaggcggagcuuaaaugcuucggaaacacagccguugcuaaguguaaugaaaaacacgaugaggaauuuugcgacaugcugagacucuucgauuuuugcaagcaggccauccggcgccugaaagcugaggcccagaugagcauccagcuuauuaacaaggcggugaaugcccugaucaacgaccaacucauuaugaagaaucaccugagagauaucaugggcauuccuuauuguaacuacuccaaauauugcuaccugaaucauaccagcacagggcggaccucucucccccgcuguugccuggucuccaacggaagcuaccuuaaugaaacgcacuucucugacgacaucgagcagcaggcugauaacaugaucacagagaugcugcaaaaggaauaucucgacagacagggcaaaaccccucuggggcugguggaucuuuucguguuuagcaccuccuucuaccucauuucuaucuuucugcaucuggucaagauuccgacacaccggcauaucguuggaaaacccuguccuaagccccaccgccucaaucacaugggcauuugcagcuguggccuguauaaacagccuggggugcccgugagauggaagcggugaggacuaguaauaaggaaacuguaugaaugucugugggcaggaagugaagagauccuucuguaaagguuuuuggaauuaugucugcugaauaauaaacuuuuuugaaauaauaaaucugguagaaaaaugagaucucaaaggcucuuuucagagccaccaaaaaaaaaaaaaaaaaaaaaaaaaaaaaaaaaaaaaaaaaaaaaaaaaaaaaaaaaaaaaaaaaaaaaaaaaaaaaaaaaaaaaaaaaaaaaaaaaaaaa

SEQ ID NO: 41083 - RNA, 1812 nt, Artificial Sequence
  mRNA product Design b-4 (hSL-A100) comprising derived and/or modified sequence from LASV(G1180-SLE-2010;Clade IV)__AIT17168__GPCmut12 (opt5)
aggagagucccgcagucggcguccagcggcucugcuuguucgugugugugucguugcaggccuuauucaagcuuaccaugggccagaucgugaccuucuuucaagaggucccccacguuauugaagaggugaugaacaucgugcugauugcccucagcauccuggcuguccuuaaggggcuguacaauuucgccacaugcggacucgugggccugcuuacguuucugcuccugugugggagauccugcaccgcgucucgguauaaaggaguuuacgaacugcagacacucgagcugaacauggaaacccuuaauauguguaugccucugagcugcacaaagaacaauucccaucacuauauuauggugggcaacgagaccgggcucgagcugacacuuaccaauacgucuaucaucaaccauaaauucuguaaucugagcgacgcucacaagaaaaaccucuacgaucaugcccugauguccauuaucucuaccuuucaccugagcauuccgaauuucaaccaguaugaagccauguccugcgacuuuaauggaggcaagaucagcguccaguacaaccucucucacuccuaugcuggcgaugccgcuaaucauugugggacaguggccaacggaguucugcaaaccuucaugcgcauggcguggggcgggagcuacauugcccuugacucuggacacggcuccugggauugcaucaugacaagcuaccaguaucugauuauccagaacaccacgugggaggaccauugucaguuuucuagacccuccccuaucggguaccucggacugcuuagccaacggacacgcgauauuuauaucuccagacggcugcucggcaccuucacauggacccugucugacagcgaaggcaaggauacccccgggggauacugccugacacgcuggaugcucauugaggcugagcugaaauguuuuggcaauacggccguggcuaagugcaacgaaaaacacgacgaggaguucugcgauaugcuuagacuguuugacuucuguaagcaggccauccagcggcucaaagcggaagcccagauguccauucaacugaucaauaaggcugucaacgcccuuaucaaugaucagcugauuaugaagaaccaccuccgcgacaucauggggauuccuuauugcaauuacagcaaauauuguuaccugaaccauaccacaaccggaaagacaucucugcccaaaugcugucucguguccaauggcagcuaccugaacgaaacccacuucucugacgauaucgagcagcaagcugacaauaugauuacggagaugcuucagaaggaauauauggagagacaggggaaaacaccucugggacucguggaucuguuugucuucagcaccuccuuuuaccugaucucuaucuuccuucaucucguuaagauuccgacccaccggcauaucgugggcaaaagcugccccaagccucaccgccugaaccacaugggcauuuguuccugcgggcuguauaagcagcccggagugccugucaaauggaagagaugaggacuaguaauaaggaaacuguaugaaugucugugggcaggaagugaagagauccuucuguaaagguuuuuggaauuaugucugcugaauaauaaacuuuuuugaaauaauaaaucugguagaaaaaugagaucucaaaggcucuuuucagagccaccaaaaaaaaaaaaaaaaaaaaaaaaaaaaaaaaaaaaaaaaaaaaaaaaaaaaaaaaaaaaaaaaaaaaaaaaaaaaaaaaaaaaaaaaaaaaaaaaaaaaa

SEQ ID NO: 41084 - RNA, 1812 nt, Artificial Sequence
  mRNA product Design b-4 (hSL-A100) comprising derived and/or modified sequence from LASV(G1442-SLE-2011;Clade IV)__AIT17180__GPCmut12 (opt5)
aggagagucccgcagucggcguccagcggcucugcuuguucgugugugugucguugcaggccuuauucaagcuuaccaugggccagaucgugaccuucuuucaagaggucccccacguuauugaagaggugaugaacaucgugcugauugcccucagcauccuggcuguccuuaaggggcuguacaauguggccacaugcggacucauuggccugguuacguuccuucugcucugugggagauccugcaccacaacccuguauaaaggaguguacgaacugcagacacucgagcugaacauggaaacccuuaauauguguaugccucugucuugcacaaagaacaauagccaucacuauauccgggucggcaacgagaccgggcucgagcugacgcuuaccaauacauccaucauuaaccauaaauuuuguaaucugucugacgcgcacaagaaaaaccucuacgaucaugcucugaugagcaucauuuccaccuuccaccugucuaucccgaauuuuaaccaguaugaagccaugagcugcgacuucaauggaggcaagauuuccgugcaguacaaccucagccacucuuaugccggcgaugcugccaaucauugugggacaguugcuaacggagugcugcaaaccuuuaugcgcauggccuggggcggguccuacaucgcgcuugacagcggaagaggcaacugggauugcauuaugacgucuuaccaguaucugaucauccagaauacaaccugggacgaucacugucaguucucccggcccagcccuauuggguaccucggacugcuuucucaacgcacaagagacgucuauaucucccggcgccugcucggcaccuuuaccuggacacugagcgauuccgagggcaaggacacgcccgggggauacugccugaccagauggaugcucauugaagccgagcugaaauguuucggcaacacagcuguggccaagugcaaugagaaacaugaugaagaguuuugcgacaugcuucggcuguucgauuuuuguaagcaggcuauccagcgccucaaagccgaagcgcagaugucuauucaacugaucaacaaggccgugaaugcucuuaucaacgaccagcugauuaugaagaaucaccucagagacaucauggggauuccuuauugcaacuacagcaaauauuguuaccugaauaacaccgccacaggaaagaccucccugcccaaaugcugucucaucagcaauggcucuuaccugaacgagacgcacuucuccgaugacauugaacaggaggcugauaauaugaucacagagaugcuucaaaaggaauauauggagcggcaggggaaaaccccucugggacucgucgaccuguucguuuuuagcaccucuuucuaccugaucagcauuuuucuucaucucgugaagaucccgacacaccgccauauugugggcaaauccugccccaagccucacagacugaaccauaugggcaucuguucuugcgggcuguauaagcagcccggagucccugugcgguggaaacgcugaggacuaguaauaaggaaacuguaugaaugucugugggcaggaagugaagagauccuucuguaaagguuuuuggaauuaugucugcugaauaauaaacuuuuuugaaauaauaaaucugguagaaaaaugagaucucaaaggcucuuuucagagccaccaaaaaaaaaaaaaaaaaaaaaaaaaaaaaaaaaaaaaaaaaaaaaaaaaaaaaaaaaaaaaaaaaaaaaaaaaaaaaaaaaaaaaaaaaaaaaaaaaaaaa

SEQ ID NO: 41085 - RNA, 1812 nt, Artificial Sequence
  mRNA product Design b-4 (hSL-A100) comprising derived and/or modified sequence from LASV(G3010-SLE-2013;Clade IV)__AIT17344__GPCmut12 (opt5)
aggagagucccgcagucggcguccagcggcucugcuuguucgugugugugucguugcaggccuuauucaagcuuaccaugggccagaucgugaccuucuuucaagaggucccccacguuauugaagaggugaugaacaucgugcugauugcccucagcauccuggcuguccuuaaggggcuguacaauuucgccacaugcggacucgugggccugguuacguuucuucugcucugugggagauccugcaccacaucucuguauaaaggaguguacgaacugcagacccucgagcugaacauggaaacacuuaauauguguaugccucugagcugcaccaagaacaauucccaucacuauauuauggucggcaacgagacagggcucgagcugacccuuacgaauaccucuaucaucaaccauaaauucuguaaucugagcgacgcgcacaagaaaaaccucuacaaucaugcucugauguccauuaucucuacauuucaccugagcauuccgaacuucaaucaguaugaagccauguccugcgauuuuaacggaggcaagaucagcgugcaguacaaucucucucacuccuaugccggcgacgcugccagccauugugggaccguugcuaacggagugcugcaaacauucaugcggauggccuggggcgggucuuacauugcgcuugauuccggauacggcaagugggacugcaucaugaccagcuaucaguaccugauuauccagaacacgacaugggaggaucacugucaguuuucucgccccuccccuaucggguaucucggacugcuuagccaaagaacccgggacauuuacaucucccgcagacugcucggcacauucaccuggacccugucugauagcgaaggcaaagacacacccgggggauauugccugacgcgguggaugcucauugaggccgagcugaaguguuuuggcaauaccgcugucgccaaaugcaacgaaaagcaugaugaggaguucugcgacaugcuucgccuguuugauuucuguaaacaggcuauccagagacucaagacagaagcccagauguccauucaacugaucaauaaggcggugaacgcccuuaucaaugaccagcugauuaugaaaaaccaccuccgggauaucauggggauuccuuacugcaauuauagcaaguacuguuaccugaaccacaccacaaccggaaaaacgucucugcccaagugcugucucguguccaauggcagcuaucugaacgaaacacauuucucugacgacaucgagcagcaagcugauaauaugauuaccgagaugcuucagaaagaauacauggagcgccaggggaagaccccucugggacucgucgaccuguuuguuuucagcacauccuuuuaucugaucucuaucuuccuucaccucgugaaaauuccgacccauagacacaucgugggcaagagcugccccaagccucaucggcugaaccacaugggcauuuguuccugcgggcuguacaaacagcccggagucccugugcgcuggaagagaugaggacuaguaauaaggaaacuguaugaaugucugugggcaggaagugaagagauccuucuguaaagguuuuuggaauuaugucugcugaauaauaaacuuuuuugaaauaauaaaucugguagaaaaaugagaucucaaaggcucuuuucagagccaccaaaaaaaaaaaaaaaaaaaaaaaaaaaaaaaaaaaaaaaaaaaaaaaaaaaaaaaaaaaaaaaaaaaaaaaaaaaaaaaaaaaaaaaaaaaaaaaaaaaaa

SEQ ID NO: 41086 - RNA, 1812 nt, Artificial Sequence
  mRNA product Design b-4 (hSL-A100) comprising derived and/or modified sequence from LASV(G502-SLE-2009;Clade IV)__AIT17126__GPCmut12 (opt5)
aggagagucccgcagucggcguccagcggcucugcuuguucgugugugugucguugcaggccuuauucaagcuuaccaugggccagaucgugaccuucuuucaagaggucccccacguuauugaagaggugaugaacaucgugcugauugcccucagcauccuggcuguccuuaaggggcuguacaauuucgccacaugcggacucgugggccugcuuacguuucugcuccugugugggagauccugcaccacaggacuguauaaaggcguuuacgaacuccagacccuggagcuuaacauggaaacacugaauauguguaugccucucucuugcaccaagaacaauagccaucacuauauuaugguggggaacgagacaggacuggagcuuacccugacgaauaccuccaucaucaaccauaaauucuguaaucucucugacgcgcacaagaaaaaccuguacgaucaugcucugaugagcauuaucuccacauuucaccucucuauuccgaauuucaaccaguaugaagccaugagcugcgacuuuaauggcggcaagaucuccguccaguacaaccugagccacucuuaugccggggaugcugccgaccauuguggaaccguggcuaauggcguucuucaaacauucaugcggauggccuggggaggguccuacauugcgcuggauagcggccgcgggagaugggacugcaucaugaccucuuaccaguaucucauuauccagaacacgacaugggaggaucacugucaguuuucccggcccagcccuaucggauaccugggccuucugucucaacgcaccagagacauuuauaucucccggcgccuccugggcacauucaccuggacccugagcgauuccgaagggaaggacacacccggaggcuacugccucacgagauggaugcugauugaggccgagcuuaaauguuuugggaacaccgcuguggccaagugcaaugaaaaacaugaugaggaguucugcgacaugcugcggcucuuugauuucuguaagcaggcuauccagcgccugaaagccgaagcgcagaugucuauucaacuuaucaacaaggccgucaaugcucugaucaacgaccagcucgugaugaagaaucaccugagagacauuaugggaaucccuuauugcaacuacagccgguauuguuaccugaaucacacaaccacaggccgcaccucccuccccaaaugcugucuggugagcaacgggucuuaccuuaaugaaacgcauuucuccgaugacauugagcagcaagccgauaacaugaucacagagaugcugcagaaggaauauauggagagacagggaaaaaccccucucggccuggucgaccuguuuguuuucagcaccucuuuuuaccuuauuagcaucuuccuccaccuggugaagaucccgacacaucggcacauugugggcaaauccugccccaagccucaucgccugaaucacauggggaucuguucuugcggacucuauaaacagcccggcgucccugugaaguggaagagaugaggacuaguaauaaggaaacuguaugaaugucugugggcaggaagugaagagauccuucuguaaagguuuuuggaauuaugucugcugaauaauaaacuuuuuugaaauaauaaaucugguagaaaaaugagaucucaaaggcucuuuucagagccaccaaaaaaaaaaaaaaaaaaaaaaaaaaaaaaaaaaaaaaaaaaaaaaaaaaaaaaaaaaaaaaaaaaaaaaaaaaaaaaaaaaaaaaaaaaaaaaaaaaaaa

SEQ ID NO: 41087 - RNA, 1812 nt, Artificial Sequence
  mRNA product Design b-4 (hSL-A100) comprising derived and/or modified sequence from LASV(G733-SLE-2010;Clade IV)__AIT17154__GPCmut12 (opt5)
aggagagucccgcagucggcguccagcggcucugcuuguucgugugugugucguugcaggccuuauucaagcuuaccaugggccagaucgugaccuucuuucaagaggucccccacguuauugaagaggugaugaacaucgugcugauugcccucagcauccuggcuguccuuaaggggcuguacaauuucgccacaugcggaauugugggccucguuuccuuucugcuucugugugggagaucuugcacgaccagccucuauaaaggaguguacgaacugcagacacuggagcucaacauggaaacccugaauauguguaugccucuuuccugcacaaagaacaauucucaucacuauaucauggucggcaacgagaccgggcuggagcucacacugaccaauacgagcaucauuaaccauaaauucuguaaucuuuccgacgcgcacaagaaaaaccuguacgaucaugcucucaugucuaucauuagcaccuuucaccuguccaucccgaauuucaaccaguaugaagccaugagcugcgacuuuaauggaggcaagauuucugugcaguacaaccugucccacagcuaugccggcgaugcugccaaucauugugggacaaucgcuaacggaguucuccaaaccuucaugcggauggccuggggcgggucuuacauugcgcuggacuccggacgcgauagaugggacugcaucaugacaagcuaccaguaucuuaucauucagaacaccacgugggaggaucacugucaguuuucucggcccuccccuaucggcuaccuggggcuccugagccaacgcacaagagacauuuauaucucccggcgccuucugggaaccuucacauggacccucucugauagcgaaggcaaggacacccccggcggguacugccugacaagauggaugcugauugaggccgagcucaaauguuuuggaaauacggcuguggccaagugcaacgaaaaacaugaugaggaguucugcgacaugcugcggcuuuuugauuucuguaagcaggcuauccagcgccugaaagccgaagcgcagauguccauccaacucauuaauaaggccgucaacgcucugaucaaugaccagcuuauuaugaagaaccaccugagagacaucaugggcauuccuuauugcaauuacagcaaauauuguuaccucaaccacaccacaaccgggaagacaucucugcccaaaugcugucugguguccaauggaagcuaccucaacgaaacccauuucucugaugacaucgagcagcaagccgauaauaugaucacggagaugcugcagaaggaauauauggagcggcagggcaaaacaccucuugggcugguggaccucuuugucuucagcaccuccuuuuaccugauuucuaucuuccugcaccuuguuaagauuccgacccaucgccacguggugggaaaaagcugccccaagccucauagacucaaccacaugggcaucuguuccugcggccuguaugggcagcccggagucccugugaaguggaaacggugaggacuaguaauaaggaaacuguaugaaugucugugggcaggaagugaagagauccuucuguaaagguuuuuggaauuaugucugcugaauaauaaacuuuuuugaaauaauaaaucugguagaaaaaugagaucucaaaggcucuuuucagagccaccaaaaaaaaaaaaaaaaaaaaaaaaaaaaaaaaaaaaaaaaaaaaaaaaaaaaaaaaaaaaaaaaaaaaaaaaaaaaaaaaaaaaaaaaaaaaaaaaaaaaa

SEQ ID NO: 41088 - RNA, 1812 nt, Artificial Sequence
  mRNA product Design b-4 (hSL-A100) comprising derived and/or modified sequence from MOPV/LASV reassortant(IGS-1;Clade IV)__AFY05576__GPCmut12 (opt5)
aggagagucccgcagucggcguccagcggcucugcuuguucgugugugugucguugcaggccuuauucaagcuuaccaugggccagaucgugaccuucuuucaagaggucccccacguuauugaagaggugaugaacaucgugcugauugcccucagcguccuggcugugcuuaaggggcuguacaauuucgccacaugcggacucguuggccuggugacguuucuucugcucugugggagauccugcaccacaucucuguauaaaggagucuacgaacugcagacccucgagcugaacauggaaacacuuaauauguguaugccucugagcugcaccaagaacaauucccaucacuauaucauggugggcaacgagacagggcucgagcugacccuuacgaauaccucuauuaucaaccauaaauucuguaaucugagcgacgcgcacaagaaaaaccucuacgaucaugcucugauguccaucauuucuacauuucaccugagcaucccgaauuucaaccaguaugaagccauguccugcgacuuuaauggaggcaagauuagcguucaguacaaccucucucacuccuaugccggcgaugcugccaaucauugugggaccguggcuaacggaguccugcaaacauucaugcggauggccuggggcgggagcuacaucgcgcuugacucuggacgcggcaacugggauugcauuaugaccuccuaccaguaucugaucauucagaauacgacaugggaggaccacugucaguuuagcagacccucuccuaucggguaccucggacugcuuucccaacggacccgcgauaucuauauuagcagacggcugcucggcacauucaccuggacccuguccgacucugaaggcgaggauacacccgggggauacugccugacgcgcuggaugcucaucgaggccgaacugaaguguuuuggcaacaccgcuguggccaaaugcaaugagaagcaugacgaagaguucugcgauaugcuuagacuguuugacuucuguaaacaggcuauucagcggcucaaggccgaagcgcagaugagcauccaacugauuaacaaagccgugaaugcucuuaucaacgaucagcugaucaugaagaaucaccuccgcgacauuauggggaucccuuauugcaacuacuccaaguauuguuaccugaaucacacaaccacaggaagaaccagccugcccaaaugcugucucgucucuaacggcuccuaccugaaugagacgcauuucagcgacgauauugagcagcaagccgacaacaugaucacagaaaugcuucagaaggaguauauggaacggcaggggaaaaccccucugggacucguugaucuguuuguguucucuaccagcuuuuaccugauuuccaucuuccuucaccucgugaagaucccgacacaucgccacauugucggcaaaucuugccccaagccucauagacugaaucacaugggcaucuguagcugcgggcuguauaaacagcccggagugccuguuaaguggaagcggugaggacuaguaauaaggaaacuguaugaaugucugugggcaggaagugaagagauccuucuguaaagguuuuuggaauuaugucugcugaauaauaaacuuuuuugaaauaauaaaucugguagaaaaaugagaucucaaaggcucuuuucagagccaccaaaaaaaaaaaaaaaaaaaaaaaaaaaaaaaaaaaaaaaaaaaaaaaaaaaaaaaaaaaaaaaaaaaaaaaaaaaaaaaaaaaaaaaaaaaaaaaaaaaaa

SEQ ID NO: 41089 - RNA, 1812 nt, Artificial Sequence
  mRNA product Design b-4 (hSL-A100) comprising derived and/or modified sequence from LASV(LM765-SLE-2012;Clade IV)__AIT17814__GPCmut12 (opt5)
aggagagucccgcagucggcguccagcggcucugcuuguucgugugugugucguugcaggccuuauucaagcuuaccaugggccagaucgugaccuucuuucaagaggucccccacguuauugaagaggugaugaacaucgugcugauugcccucagcauccuggcuguccuuaaggggcuguacaauuucgccacaugcggacucgugggccugguuacguuucuucugcucugugggagauccugcaccacaucucuguauaaaggaguguacgaacugcagacccucgagcugaacauggaaacacuuaauauguguaugccucugagcugcaccaagaacaauucccaucacuauauuauggucggcaacgagacagggcucgagcugacccuuacgaauaccucuaucaucgaccauaaauucuguaaccugagcgaugcgcaccggaagaaucucuacgaccaugcucugauguccauuaucucuacauuucaccugagcauuccgaacuucaaucaguaugaagccauguccugcgauuuuaacggaggcaaaaucagcgugcaguacaaucucucucacuccuaugccaaggacgcugccgaucauuguggcaccguugcuaacggggugcugcaaacauucaugcgcauggccuggggaggcagcuacauugcgcuugacucugggagaggacggugggauugcaucaugaccuccuaccaguaucugauuauccagaauacgacaugggaggaccacugucaguuuagccgccccucuccuaucggcuaccucgggcugcuuucccaaagaacccgggauauuuauaucagccgcagacugcucggaacauucaccuggacccuguccgacucugaaggcaaggauacacccggcggguacugccugacgcgguggaugcucauugaggccgagcugaaauguuuuggaaacaccgcugucgccaagugcaacgaaaaacaugacgaggaguucugcgauaugcuucgccuguuugacuucuguaagcaggcuauccagagacucaaagccgaagcgcagaugagcauucaacugaucaauaaggccgugaacgcucuuaucaaugaccagcugauuaugaagaaccaccuccgggauaucaugggcauuccuuauugcaauuacuccaaauauuguuaccugaaccacacaaccacagggaagaccagccugcccaaaugcugucucgugucuaauggauccuaccugaacgaaacgcauuucagcgacgauaucgagcagcaagccgacaauaugauuacagagaugcuucagaaggaauauauggagcgccagggcaaaaccccucuggggcucgucgaucuguuuguuuucucuaccagcuuuuaccugaucuccaucuuccuucaccucgugaagauuccgacacauagacacaucgugggaaaacccugcccuaagccccaucggcugaaccacaugggcauuuguucuugcggccuguauaagcagccugggguccccgugaaauggaagcgcugaggacuaguaauaaggaaacuguaugaaugucugugggcaggaagugaagagauccuucuguaaagguuuuuggaauuaugucugcugaauaauaaacuuuuuugaaauaauaaaucugguagaaaaaugagaucucaaaggcucuuuucagagccaccaaaaaaaaaaaaaaaaaaaaaaaaaaaaaaaaaaaaaaaaaaaaaaaaaaaaaaaaaaaaaaaaaaaaaaaaaaaaaaaaaaaaaaaaaaaaaaaaaaaaa

SEQ ID NO: 41090 - RNA, 1812 nt, Artificial Sequence
  mRNA product Design b-4 (hSL-A100) comprising derived and/or modified sequence from LASV(LM776-SLE-2012;Clade IV)__AIT17824__GPCmut12 (opt5)
aggagagucccgcagucggcguccagcggcucugcuuguucgugugugugucguugcaggccuuauucaagcuuaccaugggccagaucgugaccuucuuucaagaggucccccacguuauugaagaggugaugaacaucgugcugauugcccucagcauccuggcuguccuuaaggggcuguacaauuucgccacaugcggacucgugggccugguuacguuucuucugcucugugggagauccugcaccacaucuguguauaaaggagucuacgaacugcagacccuggagcucaacauggaaacacugaauauguguaugccucuuagcugcaccaagaacaauucccaucacuauauuauggugggcaacgagacagggcuggagcucacccugacgaauaccucuaucaucaaccauaaauucuguaaucuuagcgacgcgcacaagaaaaaccuguacgaucaugcucucauguccauuaucucuacauuucaccugagcauuccgaauuucaaccaguaugaagccauguccugcgacuuuaauggaggcaagaucagcguucaguacaaccugucucacuccuaugccggcgaugcugccaaucauugugggaccguggcuaacggaguccuccaaacauucaugcggauggccuggggcgggagcuacauugcgcuggacucuggacacggcaagugggauugcaucaugaccuccuaccaguaucuuauuauccagaacacgacaugggaggaccauugucaguuuagccgccccucuccuaucggguaccugggacuccugucccaaagaacccgggauauuuauaucagccgcagacuucugggcacauucaccuggacccucuccgacucugaaggcaaagauacacccgggggauacugccugacgcgguggaugcugauugaggccgagcucaaguguuuuggcaauaccgcuguggccaaaugcaacgaaaagcacgacgaggaguucugcgauaugcugcgccuuuuugacuucuguaaacaggcuauccagagacugaaggccgaagcgcagaugagcauucaacucaucaauaaggccgugaacgcucugaucaaugaucagcuuauuaugaaaaaccaucugcgggacaucauggggauuccuuauugcaauuacuccaaguauuguuaccucaaccacacaaccacaggaaaaaccagccugcccaagugcugucuggucucuaauggcuccuaccucaacgaaacgcacuucagcgacgauaucgagcagcaagccgacaauaugauuacagagaugcugcagaaagaauauauggagcgccaggggaagaccccucuuggacugguugaucucuuuguguucucuaccagcuuuuaccugaucuccaucuuccugcaucuugugaaaauuccgacacacagacauaucgucggcaagucuugccccaagccucaccggcucaaccacaugggcauuuguagcugcgggcuguauaaacagcccggagugccuguucgcuggaagagaugaggacuaguaauaaggaaacuguaugaaugucugugggcaggaagugaagagauccuucuguaaagguuuuuggaauuaugucugcugaauaauaaacuuuuuugaaauaauaaaucugguagaaaaaugagaucucaaaggcucuuuucagagccaccaaaaaaaaaaaaaaaaaaaaaaaaaaaaaaaaaaaaaaaaaaaaaaaaaaaaaaaaaaaaaaaaaaaaaaaaaaaaaaaaaaaaaaaaaaaaaaaaaaaaa

SEQ ID NO: 41091 - RNA, 1812 nt, Artificial Sequence
  mRNA product Design b-4 (hSL-A100) comprising derived and/or modified sequence from LASV(Mad39;Clade IV)__ANH09722__GPCmut12 (opt5)
aggagagucccgcagucggcguccagcggcucugcuuguucgugugugugucguugcaggccuuauucaagcuuaccaugggccagaucgugaccuucuuucaagaggucccccacguuauugaagaggugaugaacaucgugcugauugcccucagcauccuggcuguccuuaaggggcuguacaauguggccacaugcggacucauuggccugguuacguuccuucugcucugugggagauccugcaccacaacccuguauaaaggaguguacgaacugcaggcgcucgagcugaacauggaaacacuuaauauguguaugccucugucuugcaccaagaacaauagccaucacuauauccgggucggcaacgagacagggcucgagcugacccuuacgaauaccucccugaucaaccauaaauuuuguaaucucucugacgcucacaagaaaaaccuguacgaucaugcccugaugagcauuaucuccacauuccaccucucuauuccgaauuuuaaccaguaugaagccaugagcugcgacuucaaugauggaaagaucuccgugcaguacaaccugagccacaccuaugcuggcgacacagccaaucauuguggcaccguugcuaacggggugcuucaaacguuuaugcgcauggccuggggaggcucuuacauugcgcuggauuccgggagaggaggcugggacugcaucaugacaagcuaccaguaucucauuauccagaacaccacaugggaggaucacugucaguucucucggcccuccccuaucggguaccugggacuucugagccaacgcaccagagacauuuauaucucucggcgccuccugggcaccuuuacauggacgcuguccgauagcgaaggcaaggacacccccgggggauacugccucacaagauggaugcugauugaggccgagcuuaaauguuucggcaauaccgcugucgccaagugcaacgaaaaacaugaugaggaauuuugcgacaugcugcgccucuucgauuuuuguaagcaggcuauccagcggcugaaagccgaggcgcagauguccauucaacuuaucaauaaggccgugaacgcucugaucaaugaccagcucauuaugaagaaccaccugagagacaucauggggauuccuuauugcaauuacucuaaauauuguuaccugaaccacacagugaccggaaagacgagccuccccaaaugcugucuggucuccaauggcagcuaccuuaacgaaacacauuucucugaugacaucgagcagcaagccgauaauaugauuaccgagaugcugcagaaggaauauauggagcggcaggggaaaaccccucucggacugguugaccuguucguguuuuccaccagcuucuaccuuaucucuaucuuucuccaccuggugaagauuccgacacaucgccacgucgugggcaaacccugcccuaagccccauagacugaaccacaugggcaucuguagcugcggguucuauaagcagccuggaguucccgugcgguggaaacgcugaggacuaguaauaaggaaacuguaugaaugucugugggcaggaagugaagagauccuucuguaaagguuuuuggaauuaugucugcugaauaauaaacuuuuuugaaauaauaaaucugguagaaaaaugagaucucaaaggcucuuuucagagccaccaaaaaaaaaaaaaaaaaaaaaaaaaaaaaaaaaaaaaaaaaaaaaaaaaaaaaaaaaaaaaaaaaaaaaaaaaaaaaaaaaaaaaaaaaaaaaaaaaaaaa

SEQ ID NO: 41092 - RNA, 1812 nt, Artificial Sequence
  mRNA product Design b-4 (hSL-A100) comprising derived and/or modified sequence from LASV(Z0947-SLE-2011;Clade IV)__AIT17840__GPCmut12 (opt5)
aggagagucccgcagucggcguccagcggcucugcuuguucgugugugugucguugcaggccuuauucaagcuuaccaugggccagaucgugaccuucuuucaagaggucccccacguuauugaagaggugaugaacaucgugcugauugcccucagcauccuggcuguccuuaaggggcuguacaauuucgccacaugcggacucgugggccugguuacguuucuucugcucugugggagauccugcaccauuucucuguauaaaggaguguacgaacugcagacacucgagcugaacauggaaacccuuaauauguguaugccucugagcugcacaaagaacaauucccaucacuauaucauggucggcaacgagaccgggcucgagcugacacuuaccaauacgucuaucauuaaccauaaauucuguaaucugagcgacgcgcacaagaaaaaccucuacgaucaugcucugauguccaucauuucuaccuuucaccugagcaucccgaauuucaaccaguaugaagccauguccugcgacuuuaauggaggcaagauuagcgugcaguacaaccucucucacuccuaugccggcgaugcugccaaucauugugggacaguugcuaacggagugcugcaaaccuucaugcggauggccuggggcgggagcuacaucgcgcuugacucuggacgcgauagaugggacugcauuaugacauccuaccaguaucugaucauccagaacaccacgugggaggaucacugucaguuuagccggcccucuccuauuggcuaccucgggcugcuuucccaacgcacaagagacaucuauauuagccggcgccugcucggaaccuucacauggacccuguccgauucugaaggcaaggacacccccggcggguacugccugacaagauggaugcucaucgaggccgagcugaaauguuuuggaaauacggcugucgccaagugcaacgaaaaacaugaugaggaguucugcgacaugcuucggcuguuugauuucuguaagcaggcuauucagcgccucaaagccgaagcgcagaugagcauccaacugaucaauaaggccgugaacgcucuuauuaaugaccagcugaucaugaagaaccaccucagagacauuaugggcaucccuuauugcaauuacuccaaauauuguuaccugaaccacaccacaaccgggaagacaagccugcccaaaugcugucucgugucuaauggauccuaccugaacgaaacccauuucagcgaugacauugagcagcaagccgauaauaugaucacggagaugcuucagaaggaauauauggagcggcagggcaaaacaccucuggggcucgucgaccuguuuguuuucucuaccagcuuuuaccugaucuccauuuuccuucaccucgugaagaucccgacccaucgccacauugugggaaaacccugcccuaagccccauagacugaaccacaugggcaucuguucuugcggccuguauaagcagccugggguccccgugaaauggaagcggugaggacuaguaauaaggaaacuguaugaaugucugugggcaggaagugaagagauccuucuguaaagguuuuuggaauuaugucugcugaauaauaaacuuuuuugaaauaauaaaucugguagaaaaaugagaucucaaaggcucuuuucagagccaccaaaaaaaaaaaaaaaaaaaaaaaaaaaaaaaaaaaaaaaaaaaaaaaaaaaaaaaaaaaaaaaaaaaaaaaaaaaaaaaaaaaaaaaaaaaaaaaaaaaaa

SEQ ID NO: 41093 - RNA, 1788 nt, Artificial Sequence
  mRNA product Design b-4 (A100) comprising derived and/or modified sequence from LASV(Josiah;Clade IV)__NP_694870__GPCmut12 (opt1)
aggagagucccgcagucggcguccagcggcucugcuuguucgugugugugucguugcaggccuuauucaagcuuaccaugggccagaucgugaccuucuuccaggaggucccccacgugaucgaggaggugaugaacaucguccugaucgcccucagcgugcuggccgugcugaaggggcucuacaacuucgcgaccugcggccuggucgggcuggugacguuccuccugcugugcggccgcuccugcaccaccagccucuacaaggggguguacgagcugcagacccuggagcucaacauggagacgcugaacaugugcaugccgcuguccugcaccaagaacaacagccaccacuacaucauggucggcaacgagaccggccucgagcugacgcugaccaacaccuccaucaucaaccacaaguucugcaaccucagcgacgcccacaagaagaaccuguacgaccacgcccugauguccaucaucagcaccuuccaccucuccauccccaacuucaaccaguacgaggccaugagcugcgacuucaacgggggcaagaucuccgugcaguacaaccugagccacuccuacgccggggacgcggccaaccacugcggcacgguggccaacgggguccugcagaccuucaugcggauggccuggggcggcagcuacaucgcgcucgacuccgggcgcggcaacugggacugcaucaugaccagcuaccaguaccugaucauccagaacaccacgugggaggaccacugccaguucucccggcccagccccaucggguaccugggccuccugucccagcgcacccgggacaucuacaucagccgccggcugcucggcaccuucaccuggacgcugagcgacuccgaggggaaggacaccccgggcggguacugccugacccgcuggaugcucaucgaggccgagcugaagugcuucggcaacaccgccguggccaagugcaacgagaagcacgacgaggaguucugcgacaugcugcggcuguucgacuucugcaagcaggccauccagcgccugaaggcggaggcccagaugagcauccagcugaucaacaaggccgugaacgcccucaucaacgaccagcugaucaugaagaaccaccuccgggacaucauggggauccccuacugcaacuacuccaaguacugcuaccucaaccacacgaccaccggccgcaccagccugcccaagugcugccuggucuccaacggcagcuaccucaacgagacgcacuucuccgacgacaucgagcagcaggccgacaacaugaucaccgagaugcugcagaaggaguacauggagcggcaggggaagacgccccugggccucguggaccuguucguguucagcaccuccuucuaccugaucagcaucuuccugcaccucgucaagaucccgacccaccgccacaucguggggaaguccugccccaagccccaccggcugaaccacaugggcaucugcagcugcgggcuguacaagcagcccggcgugccggucaaguggaagcgcugaggacuaguaauaaggaaacuguaugaaugucugugggcaggaagugaagagauccuucuguaaagguuuuuggaauuaugucugcugaauaauaaacuuuuuugaaauaauaaaucugguagaaaaaugagaucuaaaaaaaaaaaaaaaaaaaaaaaaaaaaaaaaaaaaaaaaaaaaaaaaaaaaaaaaaaaaaaaaaaaaaaaaaaaaaaaaaaaaaaaaaaaaaaaaaaaa

SEQ ID NO: 41094 - RNA, 1785 nt, Artificial Sequence
  mRNA product Design b-4 (A100) comprising derived and/or modified sequence from LASV(LP;Clade I)__AAF86701__GPCmut12 (opt1)
aggagagucccgcagucggcguccagcggcucugcuuguucgugugugugucguugcaggccuuauucaagcuuaccaugggccagaucaucaccuucuuccaggaggugccccacgucaucgaggaggugaugaacaucgugcugaucgcccucagccugcuggccauccucaaggggcuguacaacaucgcgaccugcggcaucaucgggcuggucgccuuccucuuccugugcggcaaguccugcagccugacgcucaagggcggguacgagcugcagacccuggagcucaacauggagacccugaacaugugcaugccgcuguccugcacgaagaacagcucccaccacuacauccgcgugggcaacgagaccgggcucgagcugacccugaccaacacgagcaucaucaaccacaaguucugcaaccucuccgacgcccacaagaagaaccuguacgaccacgcccugaugagcaucaucuccaccuuccaccucagcauccccaacuucaaccaguacgaggccauguccugcgacuucaacggcgggaagaucagcgugcaguacaaccugucccacagcuacgcgggcgacgccgccgagcacugcgggaccgucgccaacggcgugcugcagaccuucaugcggauggcguggggcgggcgcuacaucgcccucgacuccggcaaggggaacugggacugcaucaugacgagcuaccaguaccugaucauccagaacaccaccugggaggaccacugccaguucucccggcccagccccaucggcuaccugggccuccugucccagcgcacccgggacaucuacaucagccgccggcugcucgggacguucaccuggacccugagcgacuccgagggcaacgagacccccgggggcuacugccugacgcgcuggaugcucaucgaggccgagcugaagugcuucgggaacaccgccguggccaagugcaacgagaagcacgacgaggaguucugcgacaugcugcggcuguucgacuucugcaagcaggcgauccgccggcugaaggccgaggcccagaugagcauccagcugaucaacaaggccgucaacgcccucaucaacgaccagcugaucaugaagaaccaccuccgcgacaucaugggcauccccuacugcaacuacuccaaguacugcuaccucaaccacaccagcuccggccggaccagccugcccaagugcugccugaucuccaacgggagcuaccucaacgagacgcaguucuccgacgacaucgagcagcaggcggacaacaugaucaccgagaugcugcagaaggaguacaucgagcgccagggcaagaccccgcuggggcucguggacaucuucaucuucagcaccuccuucuaccugaucagcaucuuccugcaccugaucaagaucccgacgcaccggcacaucgugggcaagcccugccccaagccccaccgccucaaccacaugggggucugcuccugcggccuguacaagcacccgggcgugcccaccaaguggaagcggugaggacuaguaauaaggaaacuguaugaaugucugugggcaggaagugaagagauccuucuguaaagguuuuuggaauuaugucugcugaauaauaaacuuuuuugaaauaauaaaucugguagaaaaaugagaucuaaaaaaaaaaaaaaaaaaaaaaaaaaaaaaaaaaaaaaaaaaaaaaaaaaaaaaaaaaaaaaaaaaaaaaaaaaaaaaaaaaaaaaaaaaaaaaaaaaaa

SEQ ID NO: 41095 - RNA, 1785 nt, Artificial Sequence
  mRNA product Design b-4 (A100) comprising derived and/or modified sequence from LASV(803213;Clade II)__AAF86703__GPCmut12 (opt1)
aggagagucccgcagucggcguccagcggcucugcuuguucgugugugugucguugcaggccuuauucaagcuuaccaugggccagaucaucaccuucuuccaggaggugccccacgucaucgaggaggugaugaacaucgugcugaucgcccucagccugcuggccauccucaaggggaucuacaacgucgcgaccugcggccuguucgggcugaucuccuuccuccugcugugcggccgcagcugcuccgugacguacaaggggguguacgagcuccagacccuggagcugaacauggccaaccucaacaugugcaugccgcugagcugcaccaagaacaacucccaccacuacaucauggucggcaacgagacgggccuggagcucacccugaccaacaccagcaucaucaaccacaaguucugcaaccuguccgacgcccacaagaagaaccucuacgaccacgcccugaugagcaucaucuccacguuccaccugagcauccccaacuucaaccaguacgaggccauguccugcgacuucaacgggggcaagaucagcgugcaguacaaccucucccacagcuucgcgguggacgccgccaaccacugcgggaccaucgccaacggcguccugcagaccuucaugcggauggcguggggcggguccuacaucgcccuggacagcggcaaggggaacugggacugcaucaugaccuccuaccaguaccucaucauccagaacacgaccugggaggaccacugccaguucagccgccccucccccaucggcuaccuggggcugcucagccagcggacccgcgacaucuacaucagccggcgccugcugggcaccuucacguggacccucuccgacagcgagggcaacgaggcccccgggggcuacugccugacccgguggaugcugaucgaggccgagcucaagugcuucgggaacaccgccguggcgaagugcaacgagaagcacgacgaggaguucugcgacaugcugcgccuguucgacuucugcaagcaggccaucaagcggcucaagacggaggcccagauguccauccagcugaucaacaaggccgugaacgcccugaucaacgaccagcucaucaugaagaaccaccuccgcgacaucaugggcauccccuacugcaacuacagccgguacugcuaccugaaccacaccgucaccgggaagaccucccugccccgcugcugccuggugagcaacggcuccuaccugaacgagacgcacuucagcgacgacaucgagcagcaggcggacaacaugaucaccgagaugcuccagaaggaguacauggaccggcagggcaagaccccgcuggggcugguggaccucuucgucuucuccaccagcuucuaccugaucuccaucuuccugcaccuggugaagaucccgacgcaccgccacaucgugggcaagcccugccccaagccccaccggcucaaccacauggggaucugcagcugcggccuguacaagcacccggggguccccgugaaguggaagcgcugaggacuaguaauaaggaaacuguaugaaugucugugggcaggaagugaagagauccuucuguaaagguuuuuggaauuaugucugcugaauaauaaacuuuuuugaaauaauaaaucugguagaaaaaugagaucuaaaaaaaaaaaaaaaaaaaaaaaaaaaaaaaaaaaaaaaaaaaaaaaaaaaaaaaaaaaaaaaaaaaaaaaaaaaaaaaaaaaaaaaaaaaaaaaaaaaa

SEQ ID NO: 41096 - RNA, 1785 nt, Artificial Sequence
  mRNA product Design b-4 (A100) comprising derived and/or modified sequence from LASV(GA391;Clade III)__CAA36645__GPCmut12 (opt1)
aggagagucccgcagucggcguccagcggcucugcuuguucgugugugugucguugcaggccuuauucaagcuuaccaugggccagaucgugaccuucuuccaggaggucccccacgugaucgaggaggugaugaacaucguccugaucgcccucagcauccuggccauccugaaggggcucuacaacguggcgaccugcggccugaucgggcuggugacguuccuccugcuguccggccgcagcugcucccucaucuacaaggggaccuacgagcugcagacccuggagcucaacauggagacccugaacaugugcaugccgcugagcugcaccaagaacaacucccaccacuacauccgggucggcaacgagaccggccucgagcugacccugacgaacaccagcauccucaaccacaaguucugcaaccuguccgacgcccacaagcgcaaccuguacgaccacagccucauguccaucaucagcaccuuccaccuguccauccccaacuucaaccaguacgaggccaugagcugcgacuucaacgggggcaagaucaccgugcaguacaaccugucccacagcuucgccguggacgccgcggggcacugcggcacgcucgccaacgggguccugcagaccuucaugcggauggccuggggcggcuccuacaucgcccuggacagcgggcgcggcaacugggacugcaucaugaccuccuaccaguaccucaucauccagaacaccacgugggacgaccacugccaguucagccggcccucccccaucggguaccugggccugcucagccagcgcacccgggacaucuacaucagccgccggcugcugggcaccuucaccuggacgcucuccgacagcgaggggaacgagaccccgggcggguacugccugacccgcuggaugcugaucgaggcggagcucaagugcuucggcaacaccgccguggccaagugcaacgagaagcacgacgaggaguucugcgacaugcugcggcuguucgacuucugcaagcaggccauccgccggcucaagacggaggcccagauguccauccagcugaucaacaaggcggugaacgcccugaucaacgaccagcucaucaugaagaaccaccuccgcgacaucauggggauccccuacugcaacuacagccgguacugcuaccugaaccacaccuccaccggcaagaccagccugccccgcugcugccugaucuccaacggcagcuaccugaacgagacgaaguucuccgacgacaucgagcagcaggccgacaacaugaucaccgagaugcuccagaaggaguacaucgaccggcaggggaagacgccccugggccuggucgaccuguucguguucagcaccuccuucuaccucaucagcaucuuccugcaccuggugaagaucccgacccaccgccacaucgucgggaagcccugccccaagccccaccggcucaaccacaugggcaucugcuccugcgggcuguacaagcagccgggcgugcccgugcgcuggaagcggugaggacuaguaauaaggaaacuguaugaaugucugugggcaggaagugaagagauccuucuguaaagguuuuuggaauuaugucugcugaauaauaaacuuuuuugaaauaauaaaucugguagaaaaaugagaucuaaaaaaaaaaaaaaaaaaaaaaaaaaaaaaaaaaaaaaaaaaaaaaaaaaaaaaaaaaaaaaaaaaaaaaaaaaaaaaaaaaaaaaaaaaaaaaaaaaaa

SEQ ID NO: 41097 - RNA, 1788 nt, Artificial Sequence
  mRNA product Design b-4 (A100) comprising derived and/or modified sequence from LASV(AV;Clade V)__CCA30314__GPCmut12 (opt1)
aggagagucccgcagucggcguccagcggcucugcuuguucgugugugugucguugcaggccuuauucaagcuuaccaugggccagaucgugaccuucuuccaggaggucccccacgugaucgaggaggugaugaacaucguccugaucgcccucagcauccuggccgugcugaaggggcucuacaacaucgcgaccugcggccugaucgggcugaucacguuccuccugcugugcggccgcuccugcagcuccaaccucuacaaggggguguacgagcugcagagccuggaccucaacauggagacccugaacaugugcaugccgcuguccugcaccaagaacaacagccaccacuacauccgggucggcaacgacacgggccucgagcugacccugaccaacaccuccauccucaaccacaaguucugcaaccugagcgacgcccacaagaaggaccuguacgaccacgcccucauguccaucaucagcacguuccaccuguccauccccaacuucaaccaguacgaggccaugagcugcgacuucaacgggggcaagaucuccgugcaguacaaccugagccacuccuacgccaucgacgcggccaaccacugcgggaccguggccaacggcauccuccagaccuucaugcgcauggccuggggcgggagcuacaucgcgcuggacuccggccgggggaacugggacugcaucaugaccagcuaccaguaccugaucauccagaacacgaccugggagaaccacugccaguucucccgccccagccccaucggcuaccucgggcugcugagccagcggacccgcgacaucuacaucucccggcgccuccugggcaccuucacguggacccugagcgacuccgagggcaacgccacccccgggggcuacugccucacccgguggaugcugaucgaggccgagcugaagugcuucgggaacacggccgucgccaagugcaacgagaagcacgacgaggaguucugcgacaugcuccgccuguucgacuucugcaagcaggcgaucagccggcugaaguccgaggcccagaugagcauccagcucaucaacaaggccgugaacgcccugaucaacgaccagcugaucaugaagaaccaccuccgcgacaucaugggcauccccuacugcaacuacuccaaguacugcuaccugaaccacaccaucaccgggaagaccagccugcccaagugcugccucguguccaacggcagcuaccugaacgagacgcacuucuccgacgacaucgagcagcaggccgacaacaugaucaccgagaugcugcagaaggaguacauggagcggcagggcaagaccccgcucgggcuggucgaccuguucguguucagcaccuccuucuaccugaucagcaucuuccuccgccuggugaagaucccgacgcaccggcacaucgucggcaagcccugccccaagccccaccgccugaaccacauggggaucugcuccugcggccucuacaagcagccgggggugcccgugcgguggaagcgcugaggacuaguaauaaggaaacuguaugaaugucugugggcaggaagugaagagauccuucuguaaagguuuuuggaauuaugucugcugaauaauaaacuuuuuugaaauaauaaaucugguagaaaaaugagaucuaaaaaaaaaaaaaaaaaaaaaaaaaaaaaaaaaaaaaaaaaaaaaaaaaaaaaaaaaaaaaaaaaaaaaaaaaaaaaaaaaaaaaaaaaaaaaaaaaaaa

SEQ ID NO: 41098 - RNA, 1785 nt, Artificial Sequence
  mRNA product Design b-4 (A100) comprising derived and/or modified sequence from LASV(Togo/2016/7082;Clade VI)__AMR44577__GPCmut12 (opt1)
aggagagucccgcagucggcguccagcggcucugcuuguucgugugugugucguugcaggccuuauucaagcuuaccaugggccagaucaucaccuucuuccaggaggugccccacgucaucgaggaggugaugaacaucgugcugaucgcccucagccugcuggccauccucaagggggucuacaacguggcgaccugcggcaucaucgggcuggugacguuccuguuccucugcggccgcuccugcagccugaucuacaagggguccuacgagcugcagacccucgagcugaacauggagacccugaacaugugcaugccgcucagcugcacgaagaacuccagccaccacuacauccgggucggcaacgagaccggccuggagcugacccucaccaacacguccaucaucaaccacaaguucugcaaccugagcgacgcccacaagcgcaaccuguacgaccacgcccucauguccauccugagcaccuuccaccuguccauccccaacuucaaccaguacgaggccaugagcugcgacuucaacgggggcaagaucuccgugcaguacaaccucagccacgccuacgcgguggacgccgccgagcacugcgggaccgucgccaacggcgugcugcagaccuucaugcggauggcguggggcggguccuacaucgcccuggacagcggccgcgggaacugggacugcaucaugacguccuaccaguaccucaucauccagaacaccaccugggaggaccacugccaguucagccggcccucccccaucggcuaccuggggcugcucagccagcgcacccgggacaucuacaucagccgccggcugcugggcacguucaccuggacccucuccgacagcgagggcaacgagacccccgggggcuacugccugacgcgcuggaugcugaucgaggccgagcucaagugcuucgggaacaccgccguggccaagugcaacgagaagcacgacgaggaguucugcgacaugcugcggcuguucgacuucugcaagcaggcgauccagcgccucaaguccgaggcccagaugagcauccagcugaucaacaaggccgucaacgcccugaucaacgaccagcucaucaugaagaaccaccuccgggacaugaugggcauccccuacugcaacuacuccaaguacugcuaccugaaccacaccagcuccgggcgcaccagccugcccaagugcugccugguguccaacggcagcuaccugaacgagacgcacuucuccgacgacaucgagcagcaggccgacaacaugaucaccgagaugcuccagaaggaguacaucgaccggcagggcaagaccccgcuggggcugguggaccucuucgucuucagcaccuccuucuaccugaucagcaucuuccugcaccugaucaagaucccgacgcaccgccacaucgugggcaagcccugccccaagccccaccggcucaaccacauggggaucugcuccugcggccuguacaagcagccgggggugcccacccgcuggaagcggugaggacuaguaauaaggaaacuguaugaaugucugugggcaggaagugaagagauccuucuguaaagguuuuuggaauuaugucugcugaauaauaaacuuuuuugaaauaauaaaucugguagaaaaaugagaucuaaaaaaaaaaaaaaaaaaaaaaaaaaaaaaaaaaaaaaaaaaaaaaaaaaaaaaaaaaaaaaaaaaaaaaaaaaaaaaaaaaaaaaaaaaaaaaaaaaaa

SEQ ID NO: 41099 - RNA, 1785 nt, Artificial Sequence
  mRNA product Design b-4 (A100) comprising derived and/or modified sequence from LASV(KAK-428;Clade n.d. (VII))__ANH09740__GPCmut12 (opt1)
aggagagucccgcagucggcguccagcggcucugcuuguucgugugugugucguugcaggccuuauucaagcuuaccaugggccagaucgugaccuucuuccaggaggucccccacgugaucgaggaggugaugaacaucguccugaucgcccucagccugcuggccauccucaaggggcuguacaacuucgcgaccugcggcgugaucgggcugaucacguuccuccugcugugcggccgcuccugcagcgccaccuacaaggggcaguacgagcuccagacccuggagcugaacauggagucccucaacaugugcaugccgcugagcugcacgaagaacaacucccaccacuacauccgggccggcaacaacaccggccuggagcucacccugaccaacacgagcaucaucucccacaaguucugcaaccugagcgacgcccacaagaagaaccucuacgaccacacccugauguccaucaucaccaccuuccaccugagcauccccaacuucaaccaguacgaggccauguccugcgacuucaacgggggcaagaucagcauccaguacaaccucucccacagcuacgcgggggacgccgcccagcacugcggcacgguggccaacgggguccugcagaccuucaugcgcauggcguggggcggcuccuaccuggcccucgacagcgggcggcgcggcugggacugcaucaucuccagcuaccaguaccugaucauccagaacaccaccugggacgaccacugccaguucucccggcccagccccaucggguaccugggcuucgugagccagaagacgcgcgacaucuacaucucccggcgccuccugggcaccuucaccuggacccugagcgacuccgaggggcacgacaugccgggcggguacugccucacgcgguggaugcugaucgaggccgaccugaagugcuucggcaacaccgccguggccaagugcaacgagaagcacgacgaggaguucugcgacauguggcgccucuucgacuucugcaagcaggcgauccagcggcugaaggccgaggcccagaugaacauccagcugaucaacaaggccgucaacgcccucaucaacgaccagcugaugaugaagaaccaccuccgcgacaucauggggauccccuacugcaacuacagcaaguucugcuaccugaacaacaccaccacgggccggaccucccugccccgcugcugccugaucagcaacggcuccuaccucaacgagacccacuucagcgacgacaucgagcagcaggcggacaacaugaucaccgagaugcugcagaaggaguacauggaccggcaggggaagacgccccugggccucguggaccuguucguguucuccaccagcuucuaccugaucaccaucuuccuccaccuggucaagaucccgacccaccgccacaucguggggaagcccugccccaagccccaccggcugaaccacaugggcaucugcuccugcgggcuguacaagcagccgggcgugcccguccgcuggaagcggugaggacuaguaauaaggaaacuguaugaaugucugugggcaggaagugaagagauccuucuguaaagguuuuuggaauuaugucugcugaauaauaaacuuuuuugaaauaauaaaucugguagaaaaaugagaucuaaaaaaaaaaaaaaaaaaaaaaaaaaaaaaaaaaaaaaaaaaaaaaaaaaaaaaaaaaaaaaaaaaaaaaaaaaaaaaaaaaaaaaaaaaaaaaaaaaaa

SEQ ID NO: 41100 - RNA, 1785 nt, Artificial Sequence; identical to SEQ ID NO: 41094
  mRNA product Design b-4 (A100) comprising derived and/or modified sequence from LASV(Pinneo-NIG-1969;Clade I)__AIT17836__GPCmut12 (opt1)

SEQ ID NO: 41101 - RNA, 1785 nt, Artificial Sequence
  mRNA product Design b-4 (A100) comprising derived and/or modified sequence from LASV(ISTH0009-NIG-2011;Clade II)__AIT17404__GPCmut12 (opt1)
aggagagucccgcagucggcguccagcggcucugcuuguucgugugugugucguugcaggccuuauucaagcuuaccaugggccagaucaucaccuucuuccaggaggugccccacgucaucgaggaggugaugaacaucgugcugaucgcccucagccugcuggccauccucaaggggaucuacaacgucgcgaccugcggccuguucgggcugguguccuuccuccugcugugcggccgcagcugcuccacgaccuacaaggggguguacgagcuccagacccuggagcuggacauggccagccucaacaugugcaugccgcuguccugcacgaagaacaacagccaccacuacaucauggucggcaacgagaccggccuggagcucacccugaccaacacguccaucaucaaccacaaguucugcaaccugagcgacgcccacaagaagaaccucuacgaccacgcccugauguccaucaucagcaccuuccaccuguccauccccaacuucaaccaguacgaggccaugagcugcgacuucaacgggggcaagaucuccgugcaguacaaccucagccacgcguacgccguggacgccgccaaccacugcgggaccaucgcgaacggcguccugcagaccuucaugcggauggccuggggcggguccuacaucgcccuggacagcggcaagggguccugggacugcaucaugacgagcuaccaguaccucaucauccagaacaccaccugggaggaccacugccaguucucccgccccagccccaucggcuaccuggggcugcucagccagcggacccgcgacaucuacaucucccggcgccugcugggcacguucaccuggacccucagcgacuccgagggcaacgagacccccgggggcuacugccugacgcgguggaugcugaucgaggccgagcucaagugcuucgggaacaccgccguggcgaagugcaacgagaagcacgacgaggaguucugcgacaugcugcgccuguucgacuucugcaagcaggccauccggcgccucaagaccgaggcccagaugagcauccagcugaucaacaaggccgugaacgcccugaucaacgaccagcucaucaugaagaaccaccuccgggacaucaugggcaucccguacugcaacuacuccaaguacugcuaccugaaccacaccgucacggggaagaccagccugccccgcugcugccugguguccaacggcagcuaccugaacgagacccacuucuccgacgacaucgagcagcaggcggacaacaugaucaccgagcuccugcagaaggaguacauggaccggcagggcaagacgccccuggggcucguggaccuguucgucuucagcaccuccuucuaccugaucagcaucuuccugcaccucaucaagaucccgacccaccgccacaucaccggcaagcccugccccaagccccaccggcugaaccacauggggaucugcuccugcggccuguacaagcacccgggggugcccgugaaguggaagcgcugaggacuaguaauaaggaaacuguaugaaugucugugggcaggaagugaagagauccuucuguaaagguuuuuggaauuaugucugcugaauaauaaacuuuuuugaaauaauaaaucugguagaaaaaugagaucuaaaaaaaaaaaaaaaaaaaaaaaaaaaaaaaaaaaaaaaaaaaaaaaaaaaaaaaaaaaaaaaaaaaaaaaaaaaaaaaaaaaaaaaaaaaaaaaaaaaa

SEQ ID NO: 41102 - RNA, 1785 nt, Artificial Sequence
  mRNA product Design b-4 (A100) comprising derived and/or modified sequence from LASV(ISTH2010-NIG-2012;Clade II)__AIT17482__GPCmut12 (opt1)
aggagagucccgcagucggcguccagcggcucugcuuguucgugugugugucguugcaggccuuauucaagcuuaccaugggccagaucaucaccuucuuccaggaggugccccacgucaucgaggaggugaugaacaucgugcugaucgcccucagccugcuggccauccucaaggggaucuacaacgucgcgaccugcggccuguucgggcugguguccuuccuccugcugugcggccgcagcugcuccacgaccuacaaggggguguacgagcuccagacccuggagcuggacauggccagccucaacaugugcaugccgcuguccugcacgaagaacaacagccaccacuacaucauggucggcaacgagaccggccuggagcucacccugaccaacacguccaucaucaaccacaaguucugcaaccugagcgacgcccacaagaagaaccucuacgaccacgcccugauguccaucaucagcaccuuccaccuguccauccccaacuucaaccaguacgaggccaugagcugcgacuucaacgggggcaagaucuccgugcaguacaaccucagccacgcguacgccguggacgccgccaaccacugcgggaccaucgcgaacggcguccugcagaccuucaugcggauggccuggggcggguccuacaucgcccuggacagcggcaagggguccugggacugcaucaugacgagcuaccaguaccucaucauccagaacaucaccugggaggaccacugccaguucucccgccccagccccaucggcuaccuggggcugcucagccagcggacccgcgacaucuacaucucccggcgccugcugggcaccuucacguggacccucagcgacuccgagggcaacgagacccccgggggcuacugccugacccgguggaugcugaucgaggccgagcucaagugcuucgggaacacggccguggcgaagugcaacgagaagcacgacgaggaguucugcgacaugcugcgccuguucgacuucugcaagcaggccauccggcgccucaagaccgaggcccagaugagcauccagcugaucaacaaggccgugaacgcccugaucaacgaccagcucaucaugaagaaccaccuccgggacaucaugggcauccccuacugcaacuacuccaaguacugcuaccugaaccacaccgucaccgggaagacgagccugccccgcugcugccugguguccaacggcagcuaccugaacgagacccacuucuccgacgacaucgagcagcaggcggacaacaugaucaccgagcuccugcagaaggaguacaucgaccggcagggcaagaccccgcuggggcucguggaccuguucgucuucagcacguccuucuaccugaucagcaucuuccugcaccucgugaagaucccgacccaccgccacguggucggcaagcccugccccaagccccaccggcugaaccacauggggaucugcuccugcggccuguacaagcacccgggggugcccgugaaguggaagcgcugaggacuaguaauaaggaaacuguaugaaugucugugggcaggaagugaagagauccuucuguaaagguuuuuggaauuaugucugcugaauaauaaacuuuuuugaaauaauaaaucugguagaaaaaugagaucuaaaaaaaaaaaaaaaaaaaaaaaaaaaaaaaaaaaaaaaaaaaaaaaaaaaaaaaaaaaaaaaaaaaaaaaaaaaaaaaaaaaaaaaaaaaaaaaaaaaa

SEQ ID NO: 41103 - RNA, 1785 nt, Artificial Sequence
  mRNA product Design b-4 (A100) comprising derived and/or modified sequence from LASV(Lassa virus/H.sapiens-wt/NGA/2015/ISTH_0543;Clade II)__AVO03639__GPCmut12 (opt1)
aggagagucccgcagucggcguccagcggcucugcuuguucgugugugugucguugcaggccuuauucaagcuuaccaugggccagaucaucaccuucuuccaggaggugccccacgucaucgaggaggugaugaacaucgugcugaucgcccucagccugcuggccauccucaaggggaucuacaacgucgcgaccugcggccuguucgggcugguguccuuccuccugcugugcggccgcagcugcuccacgaccuacaaggggguguacgagcuccagacccuggagcuggacauggccaaccucaacaugugcaugccgcugagcugcacgaagaacaacucccaccacuacaucauggucggcaacgagaccggccuggagcucacccugaccaacacgagcaucaucaaccacaaguucugcaaccuguccgacgcccacaagaagaaccucuacgaccacgcccugaugagcaucaucuccaccuuccaccugagcauccccaacuucaaccaguacgaggccauguccugcgacuucaacgggggcaagaucagcgugcaguacaaccucucccacaccuacgcgguggacgccgccaaccacugcgggaccaucgccaacggcguccugcagacguucaugcggauggcguggggcgggagcuacaucgcccuggacuccggcaaggggagcugggacugcaucaugaccuccuaccaguaccucgugauccagaacaccaccugggaggaccacugccaguucagccgccccucccccaucggcuaccuggggcugcucagccagcggacgcgcgacaucuacaucagccggcgccugcugggcaccuucaccuggacccucuccgacagcgagggcaacgagacgcccgggggcuacugccugacccgguggaugcugaucgaggccgagcucaagugcuucgggaacaccgccguggccaagugcaacgagaagcacgacgaggaguucugcgacaugcugcgccuguucgacuucugcaagcaggcgauccggcgccucaagaccgaggcccagauguccauccagcugaucaacaaggccgucaacgcccugaucaacgaccagcucaucaugaagaaccaccuccgggacaucaugggcauccccuacugcaacuacagcaaguacugcuaccugaaccacacggugaccgggaagaccucccugccccgcugcugccuggugagcaacggcuccuaccugaacgagacccacuucagcgacgacaucgagcagcaggccgacaacaugaucacggagcuccugcagaaggaguacaucgaccggcagggcaagaccccgcuggggcucgucgaccuguucguguucuccaccagcuucuaccugaucuccaucuuccugcaccucgugaagaucccgacccaccgccacaucacgggcaagcccugccccaagccccaccggcugaaccacauggggaucugcagcugcggccuguacaagcacccggggguccccgugaaguggaagcgcugaggacuaguaauaaggaaacuguaugaaugucugugggcaggaagugaagagauccuucuguaaagguuuuuggaauuaugucugcugaauaauaaacuuuuuugaaauaauaaaucugguagaaaaaugagaucuaaaaaaaaaaaaaaaaaaaaaaaaaaaaaaaaaaaaaaaaaaaaaaaaaaaaaaaaaaaaaaaaaaaaaaaaaaaaaaaaaaaaaaaaaaaaaaaaaaaa

SEQ ID NO: 41104 - RNA, 1785 nt, Artificial Sequence
  mRNA product Design b-4 (A100) comprising derived and/or modified sequence from LASV(Lassa virus/H.sapiens-wt/NGA/2016/ISTH_0009;Clade II)__AVO03571__GPCmut12 (opt1)
aggagagucccgcagucggcguccagcggcucugcuuguucgugugugugucguugcaggccuuauucaagcuuaccaugggccagaucaucaccuucuuccaggaggugccccacgucaucgaggaggugaugaacaucgugcugaucgcccucagccugcuggccauccucaaggggaucuacaacgucgcgaccugcggccugcuggggcucguguccuuccugcugcucugcggccgcagcugcuccacgaccuacaaggggguguacgagcugcagacccuggagcucgacauggccagccugaacaugugcaugccgcuguccugcacgaagaacaacagccaccacuacaucauggucggcaacgagaccggccucgagcugacccugaccaacacguccaucaucaaccacaaguucugcaaccucagcgacgcccacaagaagaaccuguacgaccacgcccugauguccaucaucagcaccuuccaccucuccauccccaacuucaaccaguacgaggccaugagcugcgacuucaacgggggccggaucuccgugcaguacaaccugagccacuccuacgcgguggacgccgccaaccacugcgggaccaucgccaacggcguccugcagaccuucaugcgcauggcguggggcgggagcuacaucgcccucgacuccggcaaggggagcugggacugcaucaugacguccuaccaguaccugaucauccagaacaccaccugggaggaccacugccaguucagccggcccagccccaucggcuaccuggggcuccugucccagcgcacccgggacaucuacaucagccgccggcugcucggcacguucaccuggacccuguccgacagcgagggcaacgagacccccgggggcuacugccugacgcgcuggaugcucaucgaggccgagcugaagugcuucgggaacaccgccguggccaagugcaacgagaagcacgacgaggaguucugcgacaugcugcggcuguucgacuucugcaagcaggcgauccgccggcugaagaccgaggcccagauguccauccagcugaucaacaaggccgugaacgcccucaucaacgaccagcugaucaugaagaaccaccuccgcgacaucaugggcaucccguacugcaacuacagcaaguacugcuaccucaaccacaccgucacggggaagaccucccugccccggugcugccuggugagcaacggcuccuaccucaacgagacccacuucagcgacgacaucgagcagcaggccgacaacaugaucaccgagcugcugcagaaggaguacaucgaccgccagggcaagacgccccucgggcugguggaccuguucgucuucuccaccagcuucuaccugaucuccaucuuccuccaccuggugaagaucccgacccaccggcacaucaccggcaagcccugccccaagccccaccgccugaaccacauggggaucugcagcugcggccucuacaaccacccgggggugcccgucaaguggaagcggugaggacuaguaauaaggaaacuguaugaaugucugugggcaggaagugaagagauccuucuguaaagguuuuuggaauuaugucugcugaauaauaaacuuuuuugaaauaauaaaucugguagaaaaaugagaucuaaaaaaaaaaaaaaaaaaaaaaaaaaaaaaaaaaaaaaaaaaaaaaaaaaaaaaaaaaaaaaaaaaaaaaaaaaaaaaaaaaaaaaaaaaaaaaaaaaaa

SEQ ID NO: 41105 - RNA, 1785 nt, Artificial Sequence
  mRNA product Design b-4 (A100) comprising derived and/or modified sequence from LASV(Lassa virus/H.sapiens-wt/NGA/2016/ISTH_0017;Clade II)__AVO03567__GPCmut12 (opt1)
aggagagucccgcagucggcguccagcggcucugcuuguucgugugugugucguugcaggccuuauucaagcuuaccaugggccagaucaucaccuucuuccaggaggugccccacgucaucgaggaggugaugaacaucgugcugaucgcccucagccugcuggccauccucaaggggaucuacaacgucgcgaccugcggccuguucgggcugguguccuuccuccugcugugcggccgcagcugcuccacgaccuacaaggggguguacgagcuccagacccuggagcuggacauggccagccucaacaugugcaugccgcuguccugcacgaagaacaacagccaccacuacaucauggucggcaacgagaccggccuggagcucacccugaccaacacguccaucaucaaccacaaguucugcaaccugagcgacgcccacaagaagaaccucuacgaccacgcccugauguccaucaucagcaccuuccaccuguccauccccaacuucaaccaguacgaggccaugagcugcgacuucaacgggggcaagaucuccgugcaguacaaccucagccacaccuacgcgaucgacgccgccaaccacugcgggaccaucgccaacggcgugcugcagacguucaugcggauggcguggggcggguccuacaucgcccuggacagcggcaagggguccugggacugcaucaugaccagcuaccaguaccucaucauccagaacaccaccugggaggaccacugccaguucucccgccccagccccaucggcuaccuggggcugcucagccagcggacgcgcgacaucuacaucucccggcgccugcugggcaccuucaccuggacccucagcgacuccgagggcaacgagacgcccgggggcuacugccugacccgguggaugcugaucgaggccgagcucaagugcuucgggaacaccgccgucgccaagugcaacgagaagcacgacgaggaguucugcgacaugcugcgccuguucgacuucugcaagcaggcgauccggcgccucaagaccgaggcccagaugagcauccagcugaucaacaaggccgugaacgcccugaucaacgaccagcucaucaugaagaaccaccuccgggacaucaugggcauccccuacugcaacuacuccaaguacugcuaccugaaccacacggugaccgggaagaccagccugccccgcugcugccuggucuccaacggcagcuaccugaacgagacccacuucuccgacgacaucgagcagcaggccgacaacaugaucacggagcuccugcagaaggaguacauggaccggcagggcaagaccccgcuggggcucguggaccuguucguguucagcaccuccuucuaccugaucagcaucuuccugcaccucguccgcaucccgacccaccggcacgugaucggcaagcccugccccaagccccaccgccugaaccacauggggaucugcuccugcggccuguacaagcacccgggggugcccgucaaguggaagcggugaggacuaguaauaaggaaacuguaugaaugucugugggcaggaagugaagagauccuucuguaaagguuuuuggaauuaugucugcugaauaauaaacuuuuuugaaauaauaaaucugguagaaaaaugagaucuaaaaaaaaaaaaaaaaaaaaaaaaaaaaaaaaaaaaaaaaaaaaaaaaaaaaaaaaaaaaaaaaaaaaaaaaaaaaaaaaaaaaaaaaaaaaaaaaaaaa

SEQ ID NO: 41106 - RNA, 1785 nt, Artificial Sequence
  mRNA product Design b-4 (A100) comprising derived and/or modified sequence from LASV(Lassa virus/H.sapiens-wt/NGA/2018/ISTH_0959;Clade II)__AVV65099__GPCmut12 (opt1)
aggagagucccgcagucggcguccagcggcucugcuuguucgugugugugucguugcaggccuuauucaagcuuaccaugggccagaucaucaccuucuuccaggaggugccccacgucaucgaggaggugaugaacaucgugcugaucgcccucagccugcuggccauccucaaggggaucuacaacgucgugaccugcggccuguucgggcugguguccuuccuccugcugugcggccgcagcugcuccacgaccuacaagggggucuacgagcuccagacccuggagcuggacauggcgagccucaacaugugcaugccgcuguccugcacgaagaacaacagccaccacuacaucauggugggcaacgagaccggccuggagcucacccugaccaacacguccaucaucaaccacaaguucugcaaccugagcgacgcccacaagaagaaccucuacgaccacgcccugauguccaucaucagcaccuuccaccuguccauccccaacuucaaccaguacgaggccaugagcugcgacuucaacgggggcaagaucuccgugcaguacaaccucagccacgccuacgcgaucgacgccgccaaccacugcgggaccaucgccaacggcguccugcagaccuucaugcggauggcguggggcggguccuacaucgcccuggacagcggcaagggguccugggacugcaucaugacgagcuaccaguaccucaucauccagaacaccaccugggaggaccacugccaguucucccgccccagccccaucggcuaccuggggcugcucagccagcggacccgcgacaucuacaucucccggcgccugcugggcacguucaccuggacccucagcgacuccgagggcaacgagacccccgggggcuacugccugacgcgguggaugcugaucgaggccgagcucaagugcuucgggaacaccgccguggccaagugcaacgagaagcacgacgaggaguucugcgacaugcugcgccuguucgacuucugcaagcaggcgauccggcgccucaagaccgaggcccagaugagcauccagcugaucaacaaggccgugaacgcccugaucaacgaccagcucaucaugaagaaccaccuccgggacaucaugggcaucccguacugcaacuacuccaaguacugcuaccugaaccacaccgucacggggaagaccagccugccccgcugcugccugguguccaacggcagcuaccugaacgagacccacuucuccgacgacaucgagcagcaggccgacaacaugaucaccgagcuccugcagaaggaguacaucgaccggcagggcaagacgccccuggggcucguggaccuguucgucuucagcaccuccuucuaccugaucagcaucuuccugcaccucgugaagaucccgacccaccgccacgugaucggcaagcccugccccaagccccaccggcugaaccacauggggaucugcuccugcggccuguacaagcacccggggguccccgugaaguggaagcgcugaggacuaguaauaaggaaacuguaugaaugucugugggcaggaagugaagagauccuucuguaaagguuuuuggaauuaugucugcugaauaauaaacuuuuuugaaauaauaaaucugguagaaaaaugagaucuaaaaaaaaaaaaaaaaaaaaaaaaaaaaaaaaaaaaaaaaaaaaaaaaaaaaaaaaaaaaaaaaaaaaaaaaaaaaaaaaaaaaaaaaaaaaaaaaaaaa

SEQ ID NO: 41107 - RNA, 1785 nt, Artificial Sequence
  mRNA product Design b-4 (A100) comprising derived and/or modified sequence from LASV(LASV003-NIG-2008;Clade II)__AIT17580__GPCmut12 (opt1)
aggagagucccgcagucggcguccagcggcucugcuuguucgugugugugucguugcaggccuuauucaagcuuaccaugggccagaucaucaccuucuuccaggaggugccccacgucaucgaggaggugaugaacaucgugcugaucgcccucagccugcuggccauccucaaggggaucuacaacgucgcgaccugcggccuguucgggcugguguccuuccuccugcugugcggccgcagcugcuccacgaccuacaaggggguguacgagcuccagacccuggagcuggacauggccagccucaacaugugcaugccgcuguccugcacgaagaacaacagccaccacuacaucauggucggcaacgagaccggccuggagcucacccugaccaacacguccaucaucaaccacaaguucugcaaccugagcgacgcccacaagaagaaccucuacgaccacgcccugauguccaucaucagcaccuuccaccuguccauccccaacuucaaccaguacgaggccaugagcugcgacuucaacgggggcaagaucuccgugcaguacaaccucagccacaccuacgcgguggacgccgccaaccacugcgggaccaucgccaacggcguccugcagacguucaugcggauggcguggggcggguccuacaucgcccuggacagcggcaagggguccugggacugcaucaugaccagcuaccaguaccucaucauccagaacaccaccugggaggaccacugccaguucucccgccccagccccaucggcuaccuggggcugcucagccagcggacgcgcgacaucuacaucucccggcgccugcugggcaccuucaccuggacccucagcgacuccgagagcaacgagacgccgggcggguacugccugacccgguggaugcugaucgaggccgagcucaagugcuucggcaacaccgccguggccaagugcaacgagaagcacgacgaggaguucugcgacaugcugcgccuguucgacuucugcaagcaggcgauccggcgccucaaggccgaggcccagauguccauccagcugaucaacaaggccgugaacgcccugaucaacgaccagcucaucaugaagaaccaccuccgggacaucauggggauccccuacugcaacuacagcaaguacugcuaccugaaccacaccgucacgggccgcaccucccugccccggugcugccuggugagcaacggguccuaccugaacgagacccacuucagcgacgacaucgagcagcaggcggacaacaugaucaccgagcuccugcagaaggaguacauggaccgccagggcaagacgccccugggccucguggaccuguucgucuucuccaccagcuucuaccugaucuccaucuuccugcaccucgugaagaucccgacccaccggcacgugaucgggaagcccugccccaagccccaccgccugaaccacaugggcaucugcagcugcgggcuguacaagcacccgggcguccccgugaaguggaagcggugaggacuaguaauaaggaaacuguaugaaugucugugggcaggaagugaagagauccuucuguaaagguuuuuggaauuaugucugcugaauaauaaacuuuuuugaaauaauaaaucugguagaaaaaugagaucuaaaaaaaaaaaaaaaaaaaaaaaaaaaaaaaaaaaaaaaaaaaaaaaaaaaaaaaaaaaaaaaaaaaaaaaaaaaaaaaaaaaaaaaaaaaaaaaaaaaa

SEQ ID NO: 41108 - RNA, 1785 nt, Artificial Sequence
  mRNA product Design b-4 (A100) comprising derived and/or modified sequence from LASV(LASV035-NIG-2009;Clade II)__AIT17588__GPCmut12 (opt1)
aggagagucccgcagucggcguccagcggcucugcuuguucgugugugugucguugcaggccuuauucaagcuuaccaugggccagaucaucaccuucuuccaggaggugccccacgucaucgaggaggugaugaacaucgugcugaucgcccucagccugcuggccauccucaaggggaucuacaacgucgcgaccugcggccuguucgggcugguguccuuccuccugcugugcggccgcagcugcuccacgaccuacaaggggguguacgagcuccagacccuggagcuggacauggccagccucaacaugugcaugccgcuguccugcacgaagaacaacagccaccacuacaucauggucggcaacgagaccggccuggagcucacccugaccaacacguccaucaucaaccacaaguucugcaaccugagcgacgcccacaagaagaaccucuacgaccacgcccugauguccaucaucagcaccuuccaccuguccauccccaacuucaaccaguacgaggccaugagcugcgacuucaacgggggcaagaucuccgugcaguacaaccucagccacgcguacgccguggacgccgccaaccacugcgggaccaucgcgaacggcguccugcagaccuucaugcggauggccuggggcggguccuacaucgcccuggacagcggcaagggguccugggacugcaucaugacgagcuaccaguaccucaucauccagaacaccaccugggaggaccacugccaguucucccgccccagccccaucggcuaccuggggcugcucagccagcggacccgcgacaucuacaucucccggcgccugcugggcacguucaccuggacccucagcgacuccgagggcaacgagacccccgggggcuacugccugacgcgguggaugcugaucgaggccgagcucaagugcuucgggaacaccgccguggcgaagugcaacgagaagcacgacgaggaguucugcgacaugcugcgccuguucgacuucugcaagcaggccauccggcgccucaaggccgaggcccagaugagcauccagcugaucaacaaggccgugaacgcgcugaucaacgaccagcucaucaugaagaaccaccuccgggacaucaugggcauccccuacugcaacuacuccaaguacugcuaccugaaccacaccgucaccgggaagacgagccugccccgcugcugccugguguccaacggcagcuaccugaacgagacccacuucuccgacgacaucgagcagcaggccgacaacaugaucaccgagcuccugcagaaggaguacaucgaccggcagggcaagaccccgcuggggcucguggaccuguucgucuucagcacguccuucuaccugaucagcaucuuccugcaccucgugaagaucccgacccaccgccacgugaucggcaagcccugccccaagccccaccggcugaaccacauggggaucugcuccugcggccuguacaagcacccggggguccccgugaaguggaagcgcugaggacuaguaauaaggaaacuguaugaaugucugugggcaggaagugaagagauccuucuguaaagguuuuuggaauuaugucugcugaauaauaaacuuuuuugaaauaauaaaucugguagaaaaaugagaucuaaaaaaaaaaaaaaaaaaaaaaaaaaaaaaaaaaaaaaaaaaaaaaaaaaaaaaaaaaaaaaaaaaaaaaaaaaaaaaaaaaaaaaaaaaaaaaaaaaaa

SEQ ID NO: 41109 - RNA, 1785 nt, Artificial Sequence
  mRNA product Design b-4 (A100) comprising derived and/or modified sequence from LASV(LASV1000-NIG-2009;Clade II)__AIT17782__GPCmut12 (opt1)
aggagagucccgcagucggcguccagcggcucugcuuguucgugugugugucguugcaggccuuauucaagcuuaccaugggccagaucaucaccuucuuccaggaggugccccacgucaucgaggaggugaugaacaucgugcugaucgcccucagccugcuggccauccucaaggggaucuacaacgucgcgaccugcggccuguucgggcugguguccuuccuccugcugugcggccgcagcugcuccacgaccuacaaggggguguacgagcuccagacccuggagcuggacauggccagccucaacaugugcaugccgcuguccugcacgaagaacaacagccaccacuacaucauggucggcaacgagaccggccuggagcucacccugaccaacacguccaucaucaaccacaaguucugcaaccugagcgacgcccacaagaagaaccucuacgaccacgcccugauguccaucaucagcaccuuccaccuguccauccccaacuucaaccaguacgaggccaugagcugcgacuucaacgggggcaagaucuccgugcaguacaaccucagccacaccuacgcgguggacgccgccaaccacugcgggaccaucgccaacggcguccugcagacguucaugcggauggcguggggcggguccuacaucgcccuggacagcggcaagggguccugggacugcaucaugaccagcuaccaguaccucaucauccagaacaccaccugggaggaccacugccaguucucccgccccagccccaucggcuaccuggggcugcucagccagcggacgcgcgacaucuacaucucccggcgccugcugggcaccuucaccuggacccucagcgacuccgagggcaacgagacgcccgggggcuacugccugacccgguggaugcugaucgaggccgagcucaagugcuucgggaacaccgccguggccaagugcaacgagaagcacgacgaggaguucugcgacaugcugcgccuguucgacuucugcaagcaggcgaucaagcggcucaagaccgaggcccagaugagcauccagcugaucaacaaggccgugaacgcccugaucaacgaccagcucaucaugaagaaccaccuccgcgacaucaugggcauccccuacugcaacuacuccaaguacugcuaccugaaccacacggucaccgggaagaccagccugccccggugcugccugguguccaacggcagcuaccugaacgagacccacuucuccgacgacaucgagcagcaggccgacaacaugaucacggagcuccugcagaaggaguacaucgaccgccagggcaagaccccgcuggggcucguggaccuguucgucuucagcaccuccuucuaccugaucagcaucuuccugcaccucgugaagaucccgacccaccggcacguggucggcaagcccugccccaagccccaccgccugaaccacauggggaucugcuccugcggccuguacaagcacccgggggugcccgugaaguggaagcggugaggacuaguaauaaggaaacuguaugaaugucugugggcaggaagugaagagauccuucuguaaagguuuuuggaauuaugucugcugaauaauaaacuuuuuugaaauaauaaaucugguagaaaaaugagaucuaaaaaaaaaaaaaaaaaaaaaaaaaaaaaaaaaaaaaaaaaaaaaaaaaaaaaaaaaaaaaaaaaaaaaaaaaaaaaaaaaaaaaaaaaaaaaaaaaaaa

SEQ ID NO: 41110 - RNA, 1785 nt, Artificial Sequence
  mRNA product Design b-4 (A100) comprising derived and/or modified sequence from LASV(LASV221-NIG-2010;Clade II)__AIT17624__GPCmut12 (opt1)
aggagagucccgcagucggcguccagcggcucugcuuguucgugugugugucguugcaggccuuauucaagcuuaccaugggccagaucaucaccuucuuccaggaggugccccacgucaucgaggaggugaugaacaucgugcugaucgcccucagccugcuggccauccucaaggggaucuacaacgucgcgaccugcggccuguucgggcugguguccuuccuccugcugugcggccgcagcugcuccacgaccuacaaggggguguacgagcuccagacccuggagcuggacauggccagccucaacaugugcaugccgcuguccugcacgaagaacaacagccaccacuacaucauggucggcaacgagaccggccuggagcucacccugaccaacacguccaucaucaaccacaaguucugcaaccugagcgacgcccacaagaagaaccucuacgaccacgcccugauguccaucaucagcaccuuccaccuguccauccccaacuucaaccaguacgaggccaugagcugcgacuucaacgggggcaagaucuccgugcaguacaaccucagccacaccuacgcgaucgacgccgccaaccacugcgggaccaucgccaacggcgugcugcagacguucaugcggauggcguggggcggguccuacaucgcccuggacagcggcaagggguccugggacugcaucaugaccagcuaccaguaccucaucauccagaacaccaccugggaggaccacugccaguucucccgccccagccccaucggcuaccuggggcugcucagccagcggacgcgcgacaucuacaucucccggcgccugcugggcaccuucaccuggacccucagcgacuccgagggcaacgagacgcccgggggcuacugccugacccgguggaugcugaucgaggccgagcucaagugcuucgggaacaccgccgucgccaagugcaacgagaagcacgacgaggaguucugcgacaugcugcgccuguucgacuucugcaagcaggcgauccggcgccucaagaccgaggcccagaugagcauccagcugaucaacaaggccgugaacgcccugaucaacgaccagcucaucaugaagaaccaccuccgggacaucaugggcauccccuacugcaacuacuccaaguacugcuaccugaaccacacggugaccgggaagaccagccugccccgcugcugccuggucuccaacggcagcuaccugaacgagacccacuucuccgacgacaucgagcagcaggccgacaacaugaucacggagaugcuccagaaggaguacauggaccggcagggcaagaccccgcuggggcugguggaccucuucguguucagcaccuccuucuaccugaucagcaucuuccugcaccuggucaagaucccgacccaccgccacgugaucggcaagcccugccccaagccccaccggcucaaccacauggggaucugcuccugcggccuguacaagcacccgggggugcccgucaaguggaagcgcugaggacuaguaauaaggaaacuguaugaaugucugugggcaggaagugaagagauccuucuguaaagguuuuuggaauuaugucugcugaauaauaaacuuuuuugaaauaauaaaucugguagaaaaaugagaucuaaaaaaaaaaaaaaaaaaaaaaaaaaaaaaaaaaaaaaaaaaaaaaaaaaaaaaaaaaaaaaaaaaaaaaaaaaaaaaaaaaaaaaaaaaaaaaaaaaaa

SEQ ID NO: 41111 - RNA, 1785 nt, Artificial Sequence
  mRNA product Design b-4 (A100) comprising derived and/or modified sequence from LASV(LASV237-NIG-2010;Clade II)__AIT17638__GPCmut12 (opt1)
aggagagucccgcagucggcguccagcggcucugcuuguucgugugugugucguugcaggccuuauucaagcuuaccaugggccagaucaucaccuucuuccaggaggugccccacgucaucgaggaggugaugaacaucgugcugaucgcccucagccugcuggccauccucaaggggaucuacaacgucgcgaccugcggccuguucgggcugguguccuuccuccugcugugcggccgcagcugcuccacgaccuacaaggggguguacgagcuccagacccuggagcuggacauggccagccucaacaugugcaugccgcuguccugcacgaagaacaacagccaccacuacaucauggucggcaacgagaccggccuggagcucacccugaccaacacguccaucaucaaccacaaguucugcaaccugagcgacgcccacaagaaggaccucuacgaccacgcccugauguccaucaucagcaccuuccaccuguccauccccaacuucaaccaguacgaggccaugagcugcgacuucaacgggggcaagaucuccgugcaguacaaccucagccacaccuacgcgguggacgccgccaaccacugcgggaccaucgccaacggcguccugcagacguucaugcggauggcguggggcggguccuacaucgcccuggacagcggcaagggguccugggacugcaucaugaccagcuaccaguaccucaucauccagaacaccaccugggaggaccacugccaguucucccgccccagccccaucggcuaccuggggcugcucagccagcggacgcgcgacaucuacaucucccggcgccugcugggcaccuucaccuggacccucagcgacuccgagggcaacgagacgcccgggggcuacugccugacccgguggaugcugaucgaggccgagcucaagugcuucgggaacaccgccguggccaagugcaacgagaagcacgacgaggaguucugcgacaugcugcgccuguucgacuucugcaagcaggcgauccggcgccucaagaccgaggcccagaugagcauccagcugaucaacaaggccgugaacgcccugaucaacgaccagcucaucaugaagaaccaccuccgggacaucaugggcauccccuacugcaacuacuccaaguacugcuaccugaaccacacggucaccgggaagaccagccugccccgcugcugccugguguccaacggcagcuaccugaacgagacccacuucuccgacgacaucgagcagcaggccgacaacaugaucacggagcuccugcagaaggaguacauggaccggcagggcaagaccccgcuggggcucguggaccuguucgucuucagcaccuccuucuaccugaucagcaucuuccugcaccucaucaagaucccgacccaccgccacaucacgggcaagcccugccccaagccccaccggcugaaccacauggggaucugcuccugcggccuguacaagcacccgggggugcccgugaaguggaagcgcugaggacuaguaauaaggaaacuguaugaaugucugugggcaggaagugaagagauccuucuguaaagguuuuuggaauuaugucugcugaauaauaaacuuuuuugaaauaauaaaucugguagaaaaaugagaucuaaaaaaaaaaaaaaaaaaaaaaaaaaaaaaaaaaaaaaaaaaaaaaaaaaaaaaaaaaaaaaaaaaaaaaaaaaaaaaaaaaaaaaaaaaaaaaaaaaaa

SEQ ID NO: 41112 - RNA, 1785 nt, Artificial Sequence
  mRNA product Design b-4 (A100) comprising derived and/or modified sequence from LASV(LASV253-NIG-2011;Clade II)__AIT17670__GPCmut12 (opt1)
aggagagucccgcagucggcguccagcggcucugcuuguucgugugugugucguugcaggccuuauucaagcuuaccaugggccagaucaucaccuucuuccaggaggugccccacgucaucgaggaggugaugaacaucgugcugaucgcccucagccugcuggccauccucaaggggaucuacaacgucgcgaccugcggccuguucgggcugguguccuuccuccugcugugcggccgcagcugcuccacgaccuacaaggggguguacgagcuccagacccuggagcuggacauggccagccucaacaugugcaugccgcuguccugcacgaagaacaacagccaccacuacaucauggucggcaacgagaccggccuggagcucacccugaccaacacguccaucaucaaccacaaguucugcaaccugagcgacgcccacaagaagaaccucuacgaccacgcccugauguccaucaucagcaccuuccaccuguccauccccaacuucaaccaguacgaggccaugagcugcgacuucaacgggggcaagaucuccgugcaguacaaccucagccacaccuacgcgguggacgccgccaaccacugcgggaccaucgccaacggcguccugcagacguucaugcggauggcguggggcggguccuacaucgcccuggacagcggcaagggguccugggacugcaucaugaccagcuaccaguaccucaucauccagaacaccaccugggaggaccacugccaguucucccgccccagccccaucggcuaccuggggcugcucagccagcggacgcgcgacaucuacaucucccggcgccugcugggcaccuucaccuggacccucagcgacuccgagggcaacgagacgcccgggggcuacugccugacccgguggaugcugaucgaggccgagcucaagugcuucgggaacaccgccguggccaagugcaacgagaagcacgacgaggaguucugcgacaugcugcgccuguucgacuucugcaagcaggcgauccggcgccucaaggccgaggcccagaugagcauccagcugaucaacaaggccgugaacgcccugaucaacgaccagcucaucaugaagaaccaccuccgggacaucaugggcaucccguacugcaacuacuccaaguacugcuaccugaaccacaccgucacggggcgcaccagccugccccggugcugccugguguccaacggcagcuaccugaacgagacccacuucuccgacgacaucgagcagcaggcggacaacaugaucaccgagcuccugcagaaggaguacaucgaccgccagggcaagacgccccuggggcucguggaccuguucgucuucagcaccuccuucuaccugaucagcaucuuccugcaccucgugaagaucccgacccaccggcacaucaucggcaagcccugccccaagccccaccgccugaaccacauggggaucugcuccugcggccuguacaagcacccgggggugcccgucaaguggaagcggugaggacuaguaauaaggaaacuguaugaaugucugugggcaggaagugaagagauccuucuguaaagguuuuuggaauuaugucugcugaauaauaaacuuuuuugaaauaauaaaucugguagaaaaaugagaucuaaaaaaaaaaaaaaaaaaaaaaaaaaaaaaaaaaaaaaaaaaaaaaaaaaaaaaaaaaaaaaaaaaaaaaaaaaaaaaaaaaaaaaaaaaaaaaaaaaaa

SEQ ID NO: 41113 - RNA, 1785 nt, Artificial Sequence
  mRNA product Design b-4 (A100) comprising derived and/or modified sequence from LASV(LASV254-NIG-2011;Clade II)__AIT17674__GPCmut12 (opt1)
aggagagucccgcagucggcguccagcggcucugcuuguucgugugugugucguugcaggccuuauucaagcuuaccaugggccagaucaucaccuucuuccaggaggugccccacgucaucgaggaggugaugaacaucgugcugaucgcccucagccugcuggccauccucaaggggaucuacaacgucgcgaccugcggccuguucgggcugguguccuuccuccugcugugcggccgcagcugcuccacgaccuacaaggggguguacgagcuccagacccuggagcuggacaugaccaaccucaacaugugcaugccgcugagcugcaccaagaacaacucccaccacuacaucauggucggcaacgagaccggccuggagcucacccugacgaacaccagcaucaucaaccacaaguucugcaaccuguccgacgcccacaagaagaaccucuacaaccacgcccugaugagcaucaucuccaccuuccaccugagcauccccaacuucaaccaguacgaggccauguccugcgacuucaacgggggcaagaucagcgugcaguacaaccucucccacagcuacgccguggacgcggccaaccacugcgggaccaucgccaacggcguccugcagacguucaugcggauggccuggggcggguccuacaucgcgcuggacagcggcaaggggaacugggacugcaucaugaccuccuaccaguaccucaucauccagaacaccaccugggaggaccacugccaguucagccgccccucccccaucggcuaccuggggcugcucagccagcggacgcgcgacaucuacaucagccggcgccugcugggcaccuucaccuggacccucuccgacagcgagggcaacgagacgcccgggggcuacugccugacccgguggaugcugaucgaggccgagcucaagugcuucgggaacaccgccguggccaagugcaacgagaagcacgacgaggaguucugcgacaugcugcgccuguucgacuucugcaagcaggccauccggcgccucaagaccgaggcgcaggccaacauccagcugaucaacaaggccgugaacgcccugaucaacgaccagcucaucaugaagaaccaccuccgggacaucaugggcauccccuacugcaacuacuccaaguacugcuaccugaaccacacggucaccgggaagaccagccugccccgcugcugccugguguccaacggcagcuaccugaacgagacccacuucuccgacgacaucgagcagcaggccgacaacaugaucacggagcuccugcagaaggaguacauggaccggcagggcaagaccccgcuggggcucguggaccuguucgucuucagcaccuccuucuaccugaucagcaucuuccugcaccucgugaagaucccgacccaccgccacgugaucggcaagcccugccccaagccccaccggcugaaccacauggggaucugcuccugcggccuguacaagcacccggggguccccgugaaguggaagcgcugaggacuaguaauaaggaaacuguaugaaugucugugggcaggaagugaagagauccuucuguaaagguuuuuggaauuaugucugcugaauaauaaacuuuuuugaaauaauaaaucugguagaaaaaugagaucuaaaaaaaaaaaaaaaaaaaaaaaaaaaaaaaaaaaaaaaaaaaaaaaaaaaaaaaaaaaaaaaaaaaaaaaaaaaaaaaaaaaaaaaaaaaaaaaaaaaa

SEQ ID NO: 41114 - RNA, 1785 nt, Artificial Sequence
  mRNA product Design b-4 (A100) comprising derived and/or modified sequence from LASV(Nig08-A19;Clade III)__ADU56618__GPCmut12 (opt1)
aggagagucccgcagucggcguccagcggcucugcuuguucgugugugugucguugcaggccuuauucaagcuuaccaugggccagaucgugaccuucuuccaggaggucccccacgugaucgaggaggugaugaacaucguccugaucgcccucagcauccuggccauccugaaggggcucuacaacaucgcgaccugcggccugaucgggcuggugacguuccuccugcuguccggccgcagcugcuccaugaccuacaaggggguguacgagcuccagacccuggagcugaacaugaacacccucaacaugugcaugccgcugagcugcaccaagaacaacucccaccacuacaucauggucggcaacgagaccggccuggagcucacccugacgaacaccagccugcuccaccacaaguucugcaaccuguccgacgcccacaagaagaaccuguacgaccacacccucaugagcaucaucuccaccuuccaccugagcauccccaacuucaaccaguacgaggccauguccugcgacuucaacgggggcaagaucacggugcaguacaaccugagccacuccuacgccaucgacgccgcgaaccacugcgggaccguggccaacggcguccuccagaccuucaugcggauggccuggggcgggagcuacaucgcccuggacuccggccgcgggaagugggacugcaucaugaccagcuaccaguaccugaucauccagaacacgaccugggaggaccacugccaguucucccggcccagccccaucggcuaccucgggcugcugucccagcgcacccgggacaucuacaucagccgccggcuccugggcaccuucacguggacccugagcgacuccgagggcaacgagacccccgggggcuacugccucacccgcuggaugcugaucgaggcggagcugaagugcuucgggaacacggccguggccaagugcaacgagaagcacgacgaggaguucugcgacaugcuccggcuguucgacuucugcaagcaggccauccgccggcugaaggccgaggcgcagaugagcauccagcucaucaacaaggccgugaacgcccugaucaacgaccagcugaucaugaagaaccaccuccgcgacaucaugggcauccccuacugcaacuacuccaaguacugcuaccugaaccacaccagcaccgggcggaccucccugccccgcugcugccucgucagcaacggcuccuaccugaacgagacgcacuucagcgacgacaucgagcagcaggccgacaacaugaucaccgagaugcugcagaaggaguaccucgaccggcagggcaagaccccgcuggggcugguggaccuguucguguucuccaccagcuucuaccucaucuccaucuuccugcaccuggucaagaucccgacgcaccgccacaucgugggcaagcccugccccaagccccaccggcucaaccacauggggaucugcagcugcggccuguacaagcagccgggggugcccguccgcuggaagcggugaggacuaguaauaaggaaacuguaugaaugucugugggcaggaagugaagagauccuucuguaaagguuuuuggaauuaugucugcugaauaauaaacuuuuuugaaauaauaaaucugguagaaaaaugagaucuaaaaaaaaaaaaaaaaaaaaaaaaaaaaaaaaaaaaaaaaaaaaaaaaaaaaaaaaaaaaaaaaaaaaaaaaaaaaaaaaaaaaaaaaaaaaaaaaaaaa

SEQ ID NO: 41115 - RNA, 1788 nt, Artificial Sequence
  mRNA product Design b-4 (A100) comprising derived and/or modified sequence from LASV(G1180-SLE-2010;Clade IV)__AIT17168__GPCmut12 (opt1)
aggagagucccgcagucggcguccagcggcucugcuuguucgugugugugucguugcaggccuuauucaagcuuaccaugggccagaucgugaccuucuuccaggaggucccccacgugaucgaggaggugaugaacaucguccugaucgcccucagcauccuggccgugcugaaggggcucuacaacuucgcgaccugcggccugguggggcugcucaccuuccugcugcucugcggccgcuccugcaccgccagccgguacaagggggucuacgagcugcagacccuggagcucaacauggagacccugaacaugugcaugccgcuguccugcaccaagaacaacagccaccacuacaucauggugggcaacgagaccggccucgagcugacccugacgaacaccuccaucaucaaccacaaguucugcaaccucagcgacgcccacaagaagaaccuguacgaccacgcccugauguccaucaucagcaccuuccaccucuccauccccaacuucaaccaguacgaggccaugagcugcgacuucaacgggggcaagaucuccgugcaguacaaccugagccacuccuacgcgggggacgccgccaaccacugcggcaccgucgccaacggggugcugcagacguucaugcgcauggcguggggcggcagcuacaucgcccucgacuccgggcacggcagcugggacugcaucaugaccuccuaccaguaccugaucauccagaacaccaccugggaggaccacugccaguucagccggcccucccccaucggguaccugggccuccugagccagcgcacgcgggacaucuacaucagccgccggcugcucggcaccuucaccuggacccuguccgacagcgaggggaaggacacgccgggcggguacugccugacccgcuggaugcucaucgaggccgagcugaagugcuucggcaacaccgccguggccaagugcaacgagaagcacgacgaggaguucugcgacaugcugcggcuguucgacuucugcaagcaggcgauccagcgccugaaggccgaggcccagauguccauccagcugaucaacaaggccgucaacgcccucaucaacgaccagcugaucaugaagaaccaccuccgggacaucauggggauccccuacugcaacuacagcaaguacugcuaccucaaccacaccacgaccggcaagaccucccugcccaagugcugccuggugagcaacggcuccuaccucaacgagacccacuucagcgacgacaucgagcagcaggcggacaacaugaucacggagaugcugcagaaggaguacauggagcgccaggggaagacgccccugggccucguggaccuguucgucuucuccaccagcuucuaccugaucuccaucuuccugcaccucgugaagaucccgacccaccggcacaucgugggcaagagcugccccaagccccaccgccugaaccacauggggaucugcuccugcgggcuguacaagcagcccggcgucccggugaaguggaagcggugaggacuaguaauaaggaaacuguaugaaugucugugggcaggaagugaagagauccuucuguaaagguuuuuggaauuaugucugcugaauaauaaacuuuuuugaaauaauaaaucugguagaaaaaugagaucuaaaaaaaaaaaaaaaaaaaaaaaaaaaaaaaaaaaaaaaaaaaaaaaaaaaaaaaaaaaaaaaaaaaaaaaaaaaaaaaaaaaaaaaaaaaaaaaaaaaa

SEQ ID NO: 41116 - RNA, 1788 nt, Artificial Sequence
  mRNA product Design b-4 (A100) comprising derived and/or modified sequence from LASV(G1442-SLE-2011;Clade IV)__AIT17180__GPCmut12 (opt1)
aggagagucccgcagucggcguccagcggcucugcuuguucgugugugugucguugcaggccuuauucaagcuuaccaugggccagaucgugaccuucuuccaggaggucccccacgugaucgaggaggugaugaacaucguccugaucgcccucagcauccuggccgugcugaaggggcucuacaacguggcgaccugcggccugaucgggcuggucacguuccuccugcugugcggccgcuccugcaccaccacccucuacaaggggguguacgagcugcagacgcuggagcucaacauggagacccugaacaugugcaugccgcugagcugcaccaagaacaacucccaccacuacauccgggugggcaacgagacgggccucgagcugacccugaccaacaccagcaucaucaaccacaaguucugcaaccucuccgacgcccacaagaagaaccuguacgaccacgcccugaugagcaucaucuccacguuccaccucagcauccccaacuucaaccaguacgaggccauguccugcgacuucaacgggggcaagaucagcguccaguacaaccugucccacagcuacgccggggacgcggccaaccacugcggcaccguggccaacggggugcugcagaccuucaugcgcauggccuggggcggcuccuacaucgcgcucgacagcgggcggggcaacugggacugcaucaugaccuccuaccaguaccugaucauccagaacacgaccugggacgaccacugccaguucagccgccccucccccaucggguaccugggccuccugagccagcggacccgcgacgucuacaucucccggcgccugcucggcaccuucacguggacccugagcgacagcgaggggaaggacaccccgggcggguacugccugacccgguggaugcucaucgaggccgagcugaagugcuucggcaacacggccguggccaagugcaacgagaagcacgacgaggaguucugcgacaugcugcgccucuucgacuucugcaagcaggccauccagcggcugaaggcggaggcccagauguccauccagcugaucaacaaggccgugaacgcccucaucaacgaccagcugaucaugaagaaccaccuccgcgacaucauggggauccccuacugcaacuacagcaaguacugcuaccugaacaacaccgccaccggcaagaccucccugcccaagugcugccugaucagcaacggcuccuaccucaacgagacgcacuucagcgacgacaucgagcaggaggcggacaacaugaucaccgagaugcugcagaaggaguacauggagcggcaggggaagacgccccugggccucgucgaccuguucguguucuccaccagcuucuaccugaucuccaucuuccugcaccucgugaagaucccgacccaccgccacaucgucggcaagagcugccccaagccccaccggcugaaccacauggggaucugcuccugcgggcuguacaagcagcccggcgugccggugcgcuggaagcggugaggacuaguaauaaggaaacuguaugaaugucugugggcaggaagugaagagauccuucuguaaagguuuuuggaauuaugucugcugaauaauaaacuuuuuugaaauaauaaaucugguagaaaaaugagaucuaaaaaaaaaaaaaaaaaaaaaaaaaaaaaaaaaaaaaaaaaaaaaaaaaaaaaaaaaaaaaaaaaaaaaaaaaaaaaaaaaaaaaaaaaaaaaaaaaaaa

SEQ ID NO: 41117 - RNA, 1788 nt, Artificial Sequence
  mRNA product Design b-4 (A100) comprising derived and/or modified sequence from LASV(G3010-SLE-2013;Clade IV)__AIT17344__GPCmut12 (opt1)
aggagagucccgcagucggcguccagcggcucugcuuguucgugugugugucguugcaggccuuauucaagcuuaccaugggccagaucgugaccuucuuccaggaggucccccacgugaucgaggaggugaugaacaucguccugaucgcccucagcauccuggccgugcugaaggggcucuacaacuucgcgaccugcggccugguggggcuggucacguuccuccugcugugcggccgcuccugcaccaccagccucuacaaggggguguacgagcugcagacccuggagcucaacauggagacgcugaacaugugcaugccgcuguccugcaccaagaacaacagccaccacuacaucauggugggcaacgagaccggccucgagcugacgcugaccaacaccuccaucaucaaccacaaguucugcaaccucagcgacgcccacaagaagaaccuguacaaccacgcccugauguccaucaucagcaccuuccaccucuccauccccaacuucaaccaguacgaggccaugagcugcgacuucaacgggggcaagaucuccguccaguacaaccugagccacuccuacgccggggacgcggccagccacugcggcacgguggccaacggggugcugcagaccuucaugcggauggccuggggcggcuccuacaucgcgcucgacagcggguacggcaagugggacugcaucaugaccuccuaccaguaccugaucauccagaacaccacgugggaggaccacugccaguucagccgccccucccccaucggguaccugggccuccugagccagcggacccgcgacaucuacaucagccggcgccugcucggcaccuucaccuggacgcuguccgacagcgaggggaaggacaccccgggcggguacugccugacccgguggaugcucaucgaggccgagcugaagugcuucggcaacaccgccgucgccaagugcaacgagaagcacgacgaggaguucugcgacaugcugcgccucuucgacuucugcaagcaggccauccagcggcugaagacggaggcgcagauguccauccagcugaucaacaaggccgugaacgcccucaucaacgaccagcugaucaugaagaaccaccuccgcgacaucauggggauccccuacugcaacuacagcaaguacugcuaccugaaccacaccaccaccggcaagacgucccugcccaagugcugccuggugagcaacggcuccuaccucaacgagacccacuucagcgacgacaucgagcagcaggccgacaacaugaucaccgagaugcugcagaaggaguacauggagcggcaggggaagacgccccugggccucgucgaccuguucguguucuccaccagcuucuaccugaucuccaucuuccugcaccucgugaagaucccgacccaccgccacaucgucggcaagagcugccccaagccccaccggcugaaccacauggggaucugcuccugcgggcuguacaagcagcccggcgugccggugcgcuggaagcggugaggacuaguaauaaggaaacuguaugaaugucugugggcaggaagugaagagauccuucuguaaagguuuuuggaauuaugucugcugaauaauaaacuuuuuugaaauaauaaaucugguagaaaaaugagaucuaaaaaaaaaaaaaaaaaaaaaaaaaaaaaaaaaaaaaaaaaaaaaaaaaaaaaaaaaaaaaaaaaaaaaaaaaaaaaaaaaaaaaaaaaaaaaaaaaaaa

SEQ ID NO: 41118 - RNA, 1788 nt, Artificial Sequence
  mRNA product Design b-4 (A100) comprising derived and/or modified sequence from LASV(G502-SLE-2009;Clade IV)__AIT17126__GPCmut12 (opt1)
aggagagucccgcagucggcguccagcggcucugcuuguucgugugugugucguugcaggccuuauucaagcuuaccaugggccagaucgugaccuucuuccaggaggucccccacgugaucgaggaggugaugaacaucguccugaucgcccucagcauccuggccgugcugaaggggcucuacaacuucgcgaccugcggccugguggggcugcucacguuccugcugcucugcggccgcuccugcaccaccgggcuguacaagggcgucuacgagcugcagacccucgagcugaacauggagacgcugaacaugugcaugccgcucagcugcaccaagaacaacucccaccacuacaucauggugggcaacgagaccgggcuggagcugacgcucaccaacaccagcaucaucaaccacaaguucugcaaccuguccgacgcccacaagaagaaccuguacgaccacgcccucaugagcaucaucuccaccuuccaccugagcauccccaacuucaaccaguacgaggccauguccugcgacuucaacggcgggaagaucagcgugcaguacaaccugucccacagcuacgccggcgacgcggccgaccacugcgggacggucgccaacggcgugcuccagaccuucaugcggauggccuggggcggguccuacaucgcgcuggacagcggccgcgggcggugggacugcaucaugaccuccuaccaguaccugaucauccagaacaccacgugggaggaccacugccaguucagccgccccucccccaucggcuaccucggccugcugagccagcggacccgcgacaucuacaucucccggcgccuccuggggaccuucaccuggacgcugagcgacagcgagggcaaggacacccccgggggcuacugccucacccgguggaugcugaucgaggccgagcugaagugcuucgggaacaccgccguggccaagugcaacgagaagcacgacgaggaguucugcgacaugcuccgccuguucgacuucugcaagcaggccauccagcggcugaaggcggaggcccagauguccauccagcucaucaacaaggccgucaacgcccugaucaacgaccagcuggugaugaagaaccaccuccgcgacaucaugggcauccccuacugcaacuacagccgguacugcuaccugaaccacacgaccaccggccgcaccucccugcccaagugcugccucgugagcaacggguccuaccugaacgagacgcacuucagcgacgacaucgagcagcaggccgacaacaugaucaccgagaugcugcagaaggaguacauggagcggcagggcaagaccccgcucgggcuggucgaccuguucguguucuccaccagcuucuaccugaucuccaucuuccuccaccuggugaagaucccgacgcaccgccacaucgucggcaagagcugccccaagccccaccggcugaaccacauggggaucugcuccugcggccucuacaagcagcccggcgugccggugaaguggaagcgcugaggacuaguaauaaggaaacuguaugaaugucugugggcaggaagugaagagauccuucuguaaagguuuuuggaauuaugucugcugaauaauaaacuuuuuugaaauaauaaaucugguagaaaaaugagaucuaaaaaaaaaaaaaaaaaaaaaaaaaaaaaaaaaaaaaaaaaaaaaaaaaaaaaaaaaaaaaaaaaaaaaaaaaaaaaaaaaaaaaaaaaaaaaaaaaaaa

SEQ ID NO: 41119 - RNA, 1788 nt, Artificial Sequence
  mRNA product Design b-4 (A100) comprising derived and/or modified sequence from LASV(G733-SLE-2010;Clade IV)__AIT17154__GPCmut12 (opt1)
aggagagucccgcagucggcguccagcggcucugcuuguucgugugugugucguugcaggccuuauucaagcuuaccaugggccagaucgugaccuucuuccaggaggucccccacgugaucgaggaggugaugaacaucguccugaucgcccucagcauccuggccgugcugaaggggcucuacaacuucgcgaccugcggcaucguggggcuggucuccuuccugcuccugugcggccgcagcugcacgaccucccuguacaaggggguguacgagcuccagacccuggagcugaacauggagacccucaacaugugcaugccgcugagcugcaccaagaacaacucccaccacuacaucauggugggcaacgagaccggccuggagcucacccugacgaacaccagcaucaucaaccacaaguucugcaaccuguccgacgcccacaagaagaaccucuacgaccacgcccugaugagcaucaucuccaccuuccaccugagcauccccaacuucaaccaguacgaggccauguccugcgacuucaacgggggcaagaucagcguccaguacaaccucucccacagcuacgccggggacgcggccaaccacugcggcaccaucgccaacggggugcugcagacguucaugcggauggccuggggcggcuccuacaucgcgcuggacagcgggcgcgaccggugggacugcaucaugaccuccuaccaguaccucaucauccagaacaccaccugggaggaccacugccaguucagccgccccucccccaucggcuaccuggggcugcucagccagcggacgcgcgacaucuacaucagccggcgccugcugggcaccuucaccuggacccucuccgacagcgagggcaaggacacgcccgggggcuacugccugacccgguggaugcugaucgaggccgagcucaagugcuucgggaacaccgccguggccaagugcaacgagaagcacgacgaggaguucugcgacaugcugcgccuguucgacuucugcaagcaggccauccagcggcucaaggcggaggcccagauguccauccagcugaucaacaaggccgucaacgcccugaucaacgaccagcucaucaugaagaaccaccuccgcgacaucaugggcauccccuacugcaacuacagcaaguacugcuaccugaaccacaccacgaccgggaagaccucccugcccaagugcugccuggugagcaacggcuccuaccugaacgagacccacuucagcgacgacaucgagcagcaggccgacaacaugaucacggagaugcuccagaaggaguacauggagcggcagggcaagaccccgcuggggcugguggaccucuucgucuucuccaccagcuucuaccugaucuccaucuuccugcaccuggugaagaucccgacccaccgccacguggucggcaagagcugccccaagccccaccggcucaaccacauggggaucugcuccugcggccuguacgggcagcccggcgugccggugaaguggaagcgcugaggacuaguaauaaggaaacuguaugaaugucugugggcaggaagugaagagauccuucuguaaagguuuuuggaauuaugucugcugaauaauaaacuuuuuugaaauaauaaaucugguagaaaaaugagaucuaaaaaaaaaaaaaaaaaaaaaaaaaaaaaaaaaaaaaaaaaaaaaaaaaaaaaaaaaaaaaaaaaaaaaaaaaaaaaaaaaaaaaaaaaaaaaaaaaaaa

SEQ ID NO: 41120 - RNA, 1788 nt, Artificial Sequence
  mRNA product Design b-4 (A100) comprising derived and/or modified sequence from MOPV/LASV reassortant(IGS-1;Clade IV)__AFY05576__GPCmut12 (opt1)
aggagagucccgcagucggcguccagcggcucugcuuguucgugugugugucguugcaggccuuauucaagcuuaccaugggccagaucgugaccuucuuccaggaggucccccacgugaucgaggaggugaugaacaucguccugaucgcccucagcgugcuggccgugcugaaggggcucuacaacuucgcgaccugcggccuggucgggcuggugacguuccuccugcugugcggccgcuccugcaccaccagccucuacaaggggguguacgagcugcagacccuggagcucaacauggagacgcugaacaugugcaugccgcuguccugcaccaagaacaacagccaccacuacaucauggucggcaacgagaccggccucgagcugacgcugaccaacaccuccaucaucaaccacaaguucugcaaccucagcgacgcccacaagaagaaccuguacgaccacgcccugauguccaucaucagcaccuuccaccucuccauccccaacuucaaccaguacgaggccaugagcugcgacuucaacgggggcaagaucuccgugcaguacaaccugagccacuccuacgccggggacgcggccaaccacugcggcacgguggccaacgggguccugcagaccuucaugcggauggccuggggcggcagcuacaucgcgcucgacuccgggcgcggcaacugggacugcaucaugaccagcuaccaguaccugaucauccagaacaccacgugggaggaccacugccaguucucccggcccagccccaucggguaccugggccuccugucccagcgcacccgggacaucuacaucagccgccggcugcucggcaccuucaccuggacgcugagcgacuccgagggggaggacaccccgggcggguacugccugacccgcuggaugcucaucgaggccgagcugaagugcuucggcaacaccgccguggccaagugcaacgagaagcacgacgaggaguucugcgacaugcugcggcuguucgacuucugcaagcaggccauccagcgccugaaggcggaggcccagaugagcauccagcugaucaacaaggccgugaacgcccucaucaacgaccagcugaucaugaagaaccaccuccgggacaucauggggauccccuacugcaacuacuccaaguacugcuaccucaaccacacgaccaccggccgcaccagccugcccaagugcugccuggucuccaacggcagcuaccucaacgagacgcacuucuccgacgacaucgagcagcaggccgacaacaugaucaccgagaugcugcagaaggaguacauggagcggcaggggaagacgccccugggccucguggaccuguucguguucagcaccuccuucuaccugaucagcaucuuccugcaccucgucaagaucccgacccaccgccacaucguggggaaguccugccccaagccccaccggcugaaccacaugggcaucugcagcugcgggcuguacaagcagcccggcgugccggucaaguggaagcgcugaggacuaguaauaaggaaacuguaugaaugucugugggcaggaagugaagagauccuucuguaaagguuuuuggaauuaugucugcugaauaauaaacuuuuuugaaauaauaaaucugguagaaaaaugagaucuaaaaaaaaaaaaaaaaaaaaaaaaaaaaaaaaaaaaaaaaaaaaaaaaaaaaaaaaaaaaaaaaaaaaaaaaaaaaaaaaaaaaaaaaaaaaaaaaaaaa

SEQ ID NO: 41121 - RNA, 1788 nt, Artificial Sequence
  mRNA product Design b-4 (A100) comprising derived and/or modified sequence from LASV(LM765-SLE-2012;Clade IV)__AIT17814__GPCmut12 (opt1)
aggagagucccgcagucggcguccagcggcucugcuuguucgugugugugucguugcaggccuuauucaagcuuaccaugggccagaucgugaccuucuuccaggaggucccccacgugaucgaggaggugaugaacaucguccugaucgcccucagcauccuggccgugcugaaggggcucuacaacuucgcgaccugcggccugguggggcuggucacguuccuccugcugugcggccgcuccugcaccaccagccucuacaaggggguguacgagcugcagacccuggagcucaacauggagacgcugaacaugugcaugccgcuguccugcaccaagaacaacagccaccacuacaucauggugggcaacgagaccggccucgagcugacgcugaccaacaccuccaucaucgaccacaaguucugcaaccucagcgacgcccaccggaagaaccuguacgaccacgcccugauguccaucaucagcaccuuccaccucuccauccccaacuucaaccaguacgaggccaugagcugcgacuucaacgggggcaagaucuccguccaguacaaccugagccacuccuacgccaaggacgcggccgaccacugcgggacgguggccaacggcgugcugcagaccuucaugcgcauggccuggggcgggagcuacaucgcgcucgacuccggccgggggcgcugggacugcaucaugaccagcuaccaguaccugaucauccagaacaccacgugggaggaccacugccaguucucccggcccagccccaucggcuaccuggggcuccugucccagcgcacccgggacaucuacaucagccgccggcugcucggcaccuucaccuggacgcugagcgacuccgagggcaaggacacccccgggggcuacugccugacccgcuggaugcucaucgaggccgagcugaagugcuucgggaacaccgccgucgccaagugcaacgagaagcacgacgaggaguucugcgacaugcugcggcuguucgacuucugcaagcaggccauccagcgccugaaggcggaggcccagaugagcauccagcugaucaacaaggccgugaacgcccucaucaacgaccagcugaucaugaagaaccaccuccgggacaucaugggcauccccuacugcaacuacuccaaguacugcuaccucaaccacacgaccaccgggaagaccagccugcccaagugcugccugguguccaacggcagcuaccucaacgagacgcacuucuccgacgacaucgagcagcaggccgacaacaugaucaccgagaugcugcagaaggaguacauggagcgccagggcaagaccccgcuggggcucgucgaccuguucguguucagcaccuccuucuaccugaucagcaucuuccugcaccucgugaagaucccgacgcaccggcacaucgucggcaagcccugccccaagccccaccgccugaaccacauggggaucugcuccugcggccuguacaagcagccgggggugcccgugaaguggaagcggugaggacuaguaauaaggaaacuguaugaaugucugugggcaggaagugaagagauccuucuguaaagguuuuuggaauuaugucugcugaauaauaaacuuuuuugaaauaauaaaucugguagaaaaaugagaucuaaaaaaaaaaaaaaaaaaaaaaaaaaaaaaaaaaaaaaaaaaaaaaaaaaaaaaaaaaaaaaaaaaaaaaaaaaaaaaaaaaaaaaaaaaaaaaaaaaaa

SEQ ID NO: 41122 - RNA, 1788 nt, Artificial Sequence
  mRNA product Design b-4 (A100) comprising derived and/or modified sequence from LASV(LM776-SLE-2012;Clade IV)__AIT17824__GPCmut12 (opt1)
aggagagucccgcagucggcguccagcggcucugcuuguucgugugugugucguugcaggccuuauucaagcuuaccaugggccagaucgugaccuucuuccaggaggucccccacgugaucgaggaggugaugaacaucguccugaucgcccucagcauccuggccgugcugaaggggcucuacaacuucgcgaccugcggccugguggggcuggucacguuccuccugcugugcggccgcuccugcaccaccagcguguacaaggggguguacgagcuccagacccuggagcugaacauggagacgcucaacaugugcaugccgcuguccugcaccaagaacaacagccaccacuacaucauggucggcaacgagaccggccuggagcucacgcugaccaacaccuccaucaucaaccacaaguucugcaaccugagcgacgcccacaagaagaaccucuacgaccacgcccugauguccaucaucagcaccuuccaccuguccauccccaacuucaaccaguacgaggccaugagcugcgacuucaacgggggcaagaucuccgugcaguacaaccucagccacuccuacgccggggacgcggccaaccacugcggcacgguggccaacgggguccugcagaccuucaugcggauggccuggggcggcagcuacaucgcgcuggacuccgggcacggcaagugggacugcaucaugaccagcuaccaguaccucaucauccagaacaccacgugggaggaccacugccaguucucccgccccagccccaucggguaccugggccugcucucccagcggacccgcgacaucuacaucagccggcgccugcugggcaccuucaccuggacgcucagcgacuccgaggggaaggacaccccgggcggguacugccugacccgguggaugcugaucgaggccgagcucaagugcuucggcaacaccgccguggccaagugcaacgagaagcacgacgaggaguucugcgacaugcugcgccuguucgacuucugcaagcaggccauccagcggcucaaggcggaggcccagaugagcauccagcugaucaacaaggccgugaacgcccugaucaacgaccagcucaucaugaagaaccaccuccgcgacaucauggggauccccuacugcaacuacuccaaguacugcuaccugaaccacacgaccaccggcaagaccagccugcccaagugcugccuggucuccaacggcagcuaccugaacgagacgcacuucuccgacgacaucgagcagcaggccgacaacaugaucaccgagaugcuccagaaggaguacauggagcggcaggggaagacgccccugggccugguggaccucuucguguucagcaccuccuucuaccugaucagcaucuuccugcaccuggucaagaucccgacccaccgccacaucguggggaaguccugccccaagccccaccggcucaaccacaugggcaucugcagcugcgggcuguacaagcagcccggcgugccgguccgcuggaagcggugaggacuaguaauaaggaaacuguaugaaugucugugggcaggaagugaagagauccuucuguaaagguuuuuggaauuaugucugcugaauaauaaacuuuuuugaaauaauaaaucugguagaaaaaugagaucuaaaaaaaaaaaaaaaaaaaaaaaaaaaaaaaaaaaaaaaaaaaaaaaaaaaaaaaaaaaaaaaaaaaaaaaaaaaaaaaaaaaaaaaaaaaaaaaaaaaa

SEQ ID NO: 41123 - RNA, 1788 nt, Artificial Sequence
  mRNA product Design b-4 (A100) comprising derived and/or modified sequence from LASV(Mad39;Clade IV)__ANH09722__GPCmut12 (opt1)
aggagagucccgcagucggcguccagcggcucugcuuguucgugugugugucguugcaggccuuauucaagcuuaccaugggccagaucgugaccuucuuccaggaggucccccacgugaucgaggaggugaugaacaucguccugaucgcccucagcauccuggccgugcugaaggggcucuacaacguggcgaccugcggccugaucgggcuggucacguuccuccugcugugcggccgcuccugcaccaccacccucuacaaggggguguacgagcugcaggcccuggagcucaacauggagacgcugaacaugugcaugccgcugagcugcaccaagaacaacucccaccacuacauccgggugggcaacgagaccggccucgagcugacgcugaccaacaccagccucaucaaccacaaguucugcaaccuguccgacgcccacaagaagaaccuguacgaccacgcccucaugagcaucaucuccaccuuccaccugagcauccccaacuucaaccaguacgaggccauguccugcgacuucaacgacgggaagaucagcguccaguacaaccugucccacacguacgcgggcgacaccgccaaccacugcgggaccguggccaacggcgugcuccagaccuucaugcgcauggccuggggcgggagcuacaucgcgcuggacuccggccgcgggggcugggacugcaucaugacgagcuaccaguaccugaucauccagaacaccaccugggaggaccacugccaguucucccggcccagccccaucggguaccucggccugcugucccagcggacccgcgacaucuacaucagccggcgccuccugggcacguucaccuggacccuguccgacagcgaggggaaggacaccccgggcggguacugccucacgcgguggaugcugaucgaggccgagcugaagugcuucggcaacaccgccgucgccaagugcaacgagaagcacgacgaggaguucugcgacaugcuccgccuguucgacuucugcaagcaggccauccagcggcugaaggcggaggcccagaugagcauccagcucaucaacaaggccgugaacgcccugaucaacgaccagcugaucaugaagaaccaccuccgcgacaucauggggauccccuacugcaacuacuccaaguacugcuaccugaaccacaccgugaccggcaagacgagccugcccaagugcugccucgucuccaacggcagcuaccugaacgagacccacuucuccgacgacaucgagcagcaggccgacaacaugaucaccgagaugcugcagaaggaguacauggagcggcaggggaagacgccccucggccugguggaccuguucguguucagcaccuccuucuaccugaucagcaucuuccuccaccuggucaagaucccgacccaccgccacgugguggggaagcccugccccaagccccaccggcugaaccacaugggcaucugcuccugcggguucuacaagcagccgggcguccccgugcgcuggaagcggugaggacuaguaauaaggaaacuguaugaaugucugugggcaggaagugaagagauccuucuguaaagguuuuuggaauuaugucugcugaauaauaaacuuuuuugaaauaauaaaucugguagaaaaaugagaucuaaaaaaaaaaaaaaaaaaaaaaaaaaaaaaaaaaaaaaaaaaaaaaaaaaaaaaaaaaaaaaaaaaaaaaaaaaaaaaaaaaaaaaaaaaaaaaaaaaaa

SEQ ID NO: 41124 - RNA, 1788 nt, Artificial Sequence
  mRNA product Design b-4 (A100) comprising derived and/or modified sequence from LASV(Z0947-SLE-2011;Clade IV)__AIT17840__GPCmut12 (opt1)
aggagagucccgcagucggcguccagcggcucugcuuguucgugugugugucguugcaggccuuauucaagcuuaccaugggccagaucgugaccuucuuccaggaggucccccacgugaucgaggaggugaugaacaucguccugaucgcccucagcauccuggccgugcugaaggggcucuacaacuucgcgaccugcggccugguggggcuggucacguuccuccugcugugcggccgcuccugcaccaucagccucuacaaggggguguacgagcugcagacccuggagcucaacauggagacccugaacaugugcaugccgcuguccugcaccaagaacaacagccaccacuacaucauggugggcaacgagaccggccucgagcugacccugacgaacaccuccaucaucaaccacaaguucugcaaccucagcgacgcccacaagaagaaccuguacgaccacgcccugauguccaucaucagcaccuuccaccucuccauccccaacuucaaccaguacgaggccaugagcugcgacuucaacgggggcaagaucuccguccaguacaaccugagccacuccuacgccggggacgcggccaaccacugcggcaccguggccaacggggugcugcagacguucaugcggauggccuggggcggcagcuacaucgcgcucgacuccgggcgcgaccggugggacugcaucaugaccagcuaccaguaccugaucauccagaacaccaccugggaggaccacugccaguucucccgccccagccccaucggcuaccuggggcuccugucccagcggacgcgcgacaucuacaucagccggcgccugcucggcaccuucaccuggacccugagcgacuccgagggcaaggacacgcccgggggcuacugccugacccgguggaugcucaucgaggccgagcugaagugcuucgggaacaccgccgucgccaagugcaacgagaagcacgacgaggaguucugcgacaugcugcgccucuucgacuucugcaagcaggccauccagcggcugaaggcggaggcccagaugagcauccagcugaucaacaaggccgugaacgcccucaucaacgaccagcugaucaugaagaaccaccuccgcgacaucaugggcauccccuacugcaacuacuccaaguacugcuaccugaaccacaccacgaccgggaagaccagccugcccaagugcugccugguguccaacggcagcuaccucaacgagacccacuucuccgacgacaucgagcagcaggccgacaacaugaucacggagaugcugcagaaggaguacauggagcggcagggcaagaccccgcuggggcucgucgaccuguucguguucagcaccuccuucuaccugaucagcaucuuccugcaccucgugaagaucccgacccaccgccacaucgucggcaagcccugccccaagccccaccggcugaaccacauggggaucugcuccugcggccuguacaagcagccgggggugcccgugaaguggaagcgcugaggacuaguaauaaggaaacuguaugaaugucugugggcaggaagugaagagauccuucuguaaagguuuuuggaauuaugucugcugaauaauaaacuuuuuugaaauaauaaaucugguagaaaaaugagaucuaaaaaaaaaaaaaaaaaaaaaaaaaaaaaaaaaaaaaaaaaaaaaaaaaaaaaaaaaaaaaaaaaaaaaaaaaaaaaaaaaaaaaaaaaaaaaaaaaaaa

SEQ ID NO: 41125 - RNA, 1788 nt, Artificial Sequence
  mRNA product Design b-4 (A100) comprising derived and/or modified sequence from LASV(Josiah;Clade IV)__NP_694870__GPCmut12 (opt1)
aggagagucccgcagucggcguccagcggcucugcuuguucgugugugugucguugcaggccuuauucaagcuuaccaugggccagaucgugaccuucuuccaggaggucccccacgugaucgaggaggugaugaacaucguccugaucgcccucagcgugcuggccgugcugaaggggcucuacaacuucgcgaccugcggccuggucgggcuggugaccuuccuccugcugugcggccgcuccugcaccaccagccucuacaaggggguguacgagcugcagacccuggagcucaacauggagacgcugaacaugugcaugccgcuguccugcaccaagaacaacagccaccacuacaucauggucggcaacgagaccggccucgagcugacccugacgaacaccuccaucaucaaccacaaguucugcaaccucagcgacgcccacaagaagaaccuguacgaccacgcccugauguccaucaucagcaccuuccaccucuccauccccaacuucaaccaguacgaggccaugagcugcgacuucaacgggggcaagaucuccgugcaguacaaccugagccacuccuacgccggggacgcggccaaccacugcggcaccguggccaacgggguccugcagacguucaugcggauggccuggggcggcagcuacaucgcgcucgacuccgggcgcggcaacugggacugcaucaugaccagcuaccaguaccugaucauccagaacaccaccugggaggaccacugccaguucucccggcccagccccaucggguaccugggccuccugucccagcgcacgcgggacaucuacaucagccgccggcugcucggcaccuucaccuggacccugagcgacuccgaggggaaggacacgccgggcggguacugccugacccgcuggaugcucaucgaggccgagcugaagugcuucggcaacaccgccguggccaagugcaacgagaagcacgacgaggaguucugcgacaugcugcggcuguucgacuucugcaagcaggccauccagcgccugaaggcggaggcccagaugagcauccagcugaucaacaaggccgugaacgcccucaucaacgaccagcugaucaugaagaaccaccuccgggacaucauggggauccccuacugcaacuacuccaaguacugcuaccucaaccacaccacgaccggccgcaccagccugcccaagugcugccuggucuccaacggcagcuaccucaacgagacccacuucuccgacgacaucgagcagcaggccgacaacaugaucacggagaugcugcagaaggaguacauggagcggcaggggaagacgccccugggccugguggaccucuucguguucagcaccuccuucuaccugaucagcaucuuccugcaccucgucaagaucccgacccaccgccacaucguggggaaguccugccccaagccccaccggcugaaccacaugggcaucugcagcugcgggcuguacaagcagcccggcgugccggucaaguggaagcgcugaggacuaguaauaaggaaacuguaugaaugucugugggcaggaagugaagagauccuucuguaaagguuuuuggaauuaugucugcugaauaauaaacuuuuuugaaauaauaaaucugguagaaaaaugagaucuaaaaaaaaaaaaaaaaaaaaaaaaaaaaaaaaaaaaaaaaaaaaaaaaaaaaaaaaaaaaaaaaaaaaaaaaaaaaaaaaaaaaaaaaaaaaaaaaaaaa
